United States Patent Application Publication US 2011/0183924 A1 - sequence listing, part 265

SEQ ID NO: 751810 - protein, 1542 aa, Homo sapiens
MQINGNFCGLVLNQPLGGLHVIEGLPLLADSTDGMASVAAYTYRQHSVVFIGTRSGSLKKVRVDGFQDAHLYETVPVVDGSPILRDLLFSPDHRHIYLLSEKQVSQLPVETCEQYQSCAACLGSGDPHCGWCVLRHRCCREGACLGASAPHGFAEELSKCVQVRVRPNNVSVTSPGVQLTVTLHNVPDLSAGVSCAFEAAAENEAVLLPSGELLCPSPSLQELRALTRGHGATRTVRLQLLSKETGVRFAGADFVFYNCSVLQSCMSCVGSPYPCHWCKYRHTCTSRPHECSFQEGRVHSPEVRRAPHVRGWALWCGRGHRLLCVLGFFEPSPGWAWRRVALCAADRCFPQQGCPEILPSGDLLIPVGVMQPLTLRAKNLPQPQSGQKNYECVVRVQGRQQRVPAVRFNSSSVQCQNASYSYEGDEHGDTELDFSVVWDGDFPIDKPPSFRALLYKCWAQRPSCGLCLKADPRFNCGWCISEHRCQLRTHCPAPKTNWMHLSQKGTRCSHPRITQIHPLVGPKEGGTRVTIVGENLGLLSREVGLRVAGVRCNSIPAEYISAERIVCEMEESLVPSPPPGPVELCVGDCSADFRTQSEQVYSFVTPTFDQVSPSRGPASGGTRLTISGSSLDAGSRVTVTVRDSECQFVRRDAKAIVCISPLSTLGPSQAPITLAIDRANISSPGLIYTYTQDPTVTRLEPTWSIINGSTAITVSGTHLLTVQEPRVRAKYRGIETTNTCQVINDTAMLCKAPGIFLGRPQPRAQGEHPDEFGFLLDHVQTARSLNRSSFTYYPDPSFEPLGPSGVLDVKPGSHVVLKGKNLIPAAAGSSRLNYTVLIGGQPCSLTVSDTQLLCDSPSQTGRQPVMVLVGGLEFWLGTLHISAERALTLPAMMGLAAGGGLLLLAITAVLVAYKRKTQDADRTLKRLQLQMDNLESRVALECKEAFAELQTDINELTNHMDEVQIPFLDYRTYAVRVLFPGIEAHPVLKELDTPPNVEKALRLFGQLLHSRAFVLTFIHTLEAQSSFSMRDRGTVASLTMVALQSRLDYATGLLKQLLADLIEKNLESKNHPKLLLRRTESVAEKMLTNWFTFLLHKFLKECAGEPLFLLYCAIKQQMEKGPIDAITGEARYSLSEDKLIRQQIDYKTLTLHCVCPENEGSAQVPVKVLNCDSITQAKDKLLDTVYKGIPYSQRPKAEDMDLEWRQGRMTRIILQDEDVTTKIECDWKRLNSLAHYQVTDGSLVALVPKQVSAYNMANSFTFTRSLSRYESLLRTASSPDSLRSRAPMITPDQETGTKLWHLVKNHDHADHREGDRGSKMVSEIYLTRLLATKGTLQKFVDDLFETVFSTAHRGSALPLAIKYMFDFLDEQADQRQISDPDVRHTWKSNCLPLRFWVNVIKNPQFVFDIHKNSITDACLSVVAQTFMDSCSTSEHRLGKDSPSNKLLYAKDIPNYKSWVERYYRDIAKMASISDQDMDAYLVEQSRLHASDFSVLSALNELYFYVTKYRQEILTALDRDASCRKHKLRQKLEQIISLVSSDS

SEQ ID NO: 751811 - protein, 1147 aa, Homo sapiens
TQAHFSQSHTGGDFCCFNRVLLCHPGSQKCAWVRTQAHFSVVWDGDFPIDKPPSFRALLYKCWAQRPSCGLCLKADPRFNCGWCISEHRCQLRTHCPAPKTNWMHLSQKGTRCSHPRITQIHPLVGPKEGGTRVTIVGENLGLLSREVGLRVAGVRCNSIPAEYISAERIVCEMEESLVPSPPPGPVELCVGDCSADFRTQSEQVYSFVTPTFDQVSPSRGPASGGTRLTISGSSLDAGSRVTVTVRDSECQFVRRDAKAIVCISPLSTLGPSQAPITLAIDRANISSPGLIYTYTQDPTVTRLEPTWSIINGSTAITVSGTHLLTVQEPRVRAKYRGIETTNTCQVINDTAMLCKAPGIFLGRPQPRAQGEHPDEFGFLLDHVQTARSLNRSSFTYYPDPSFEPLGPSGVLDVKPGSHVVLKGKNLIPAAAGSSRLNYTVLIGGQPCSLTVSDTQLLCDSPSQTGRQPVMVLVGGLEFWLGTLHISAERALTLPAMMGLAAGGGLLLLAITAVLVAYKRKTQDADRTLKRLQLQMDNLESRVALECKEAFAELQTDINELTNHMDEVQIPFLDYRTYAVRVLFPGIEAHPVLKELDTPPNVEKALRLFGQLLHSRAFVLTFIHTLEAQSSFSMRDRGTVASLTMVALQSRLDYATGLLKQLLADLIEKNLESKNHPKLLLRRTESVAEKMLTNWFTFLLHKFLKECAGEPLFLLYCAIKQQMEKGPIDAITGEARYSLSEDKLIRQQIDYKTLTLHCVCPENEGSAQVPVKVLNCDSITQAKDKLLDTVYKGIPYSQRPKAEDMDLEWRQGRMTRIILQDEDVTTKIECDWKRLNSLAHYQVTDGSLVALVPKQVSAYNMANSFTFTRSLSRYESLLRTASSPDSLRSRAPMITPDQETGTKLWHLVKNHDHADHREGDRGSKMVSEIYLTRLLATKGTLQKFVDDLFETVFSTAHRGSALPLAIKYMFDFLDEQADQRQISDPDVRHTWKSNCLPLRFWVNVIKNPQFVFDIHKNSITDACLSVVAQTFMDSCSTSEHRLGKDSPSNKLLYAKDIPNYKSWVERYYRDIAKMASISDQDMDAYLVEQSRLHASDFSVLSALNELYFYVTKYRQEILTALDRDASCRKHKLRQKLEQIISLVSSDS

SEQ ID NO: 751812 - protein, 814 aa, Homo sapiens
GQYGCGWKIKTCQVINDTAMLCKAPGIFLGRPQPRAQGEHPDEFGFLLDHVQTARSLNRSSFTYYPDPSFEPLGPSGVLDVKPGSHVVLKGKNLIPAAAGSSRLNYTVLIGGQPCSLTVSDTQLLCDSPSQTGRQPVMVLVGGLEFWLGTLHISAERALTLPAMMGLAAGGGLLLLAITAVLVAYKRKTQDADRTLKRLQLQMDNLESRVALECKEAFAELQTDINELTNHMDEVQIPFLDYRTYAVRVLFPGIEAHPVLKELDTPPNVEKALRLFGQLLHSRAFVLTFIHTLEAQSSFSMRDRGTVASLTMVALQSRLDYATGLLKQLLADLIEKNLESKNHPKLLLRRTESVAEKMLTNWFTFLLHKFLKECAGEPLFLLYCAIKQQMEKGPIDAITGEARYSLSEDKLIRQQIDYKTLTLHCVCPENEGSAQVPVKVLNCDSITQAKDKLLDTVYKGIPYSQRPKAEDMDLEWRQGRMTRIILQDEDVTTKIECDWKRLNSLAHYQVTDGSLVALVPKQVSAYNMANSFTFTRSLSRYESLLRTASSPDSLRSRAPMITPDQETGTKLWHLVKNHDHADHREGDRGSKMVSEIYLTRLLATKGTLQKFVDDLFETVFSTAHRGSALPLAIKYMFDFLDEQADQRQISDPDVRHTWKSNCLPLRFWVNVIKNPQFVFDIHKNSITDACLSVVAQTFMDSCSTSEHRLGKDSPSNKLLYAKDIPNYKSWVERYYRDIAKMASISDQDMDAYLVEQSRLHASDFSVLSALNELYFYVTKYRQEILTALDRDASCRKHKLRQKLEQIISLVSSDS

SEQ ID NO: 751813 - protein, 505 aa, Homo sapiens
TLVLPVDLRIPAEMTVAKQLLADLIEKNLESKNHPKLLLRRTESVAEKMLTNWFTFLLHKFLKECAGEPLFLLYCAIKQQMEKGPIDAITGEARYSLSEDKLIRQQIDYKTLTLHCVCPENEGSAQVPVKVLNCDSITQAKDKLLDTVYKGIPYSQRPKAEDMDLEWRQGRMTRIILQDEDVTTKIECDWKRLNSLAHYQVTDGSLVALVPKQVSAYNMANSFTFTRSLSRYESLLRTASSPDSLRSRAPMITPDQETGTKLWHLVKNHDHADHREGDRGSKMVSEIYLTRLLATKGTLQKFVDDLFETVFSTAHRGSALPLAIKYMFDFLDEQADQRQISDPDVRHTWKSNCLPLRFWVNVIKNPQFVFDIHKNSITDACLSVVAQTFMDSCSTSEHRLGKDSPSNKLLYAKDIPNYKSWVERYYRDIAKMASISDQDMDAYLVEQSRLHASDFSVLSALNELYFYVTKYRQEILTALDRDASCRKHKLRQKLEQIISLVSSDS

SEQ ID NO: 751814 - protein, 457 aa, Homo sapiens
MLTNWFTFLLHKFLKECAGEPLFLLYCAIKQQMEKGPIDAITGEARYSLSEDKLIRQQIDYKTLTLHCVCPENEGSAQVPVKVLNCDSITQAKDKLLDTVYKGIPYSQRPKAEDMDLEWRQGRMTRIILQDEDVTTKIECDWKRLNSLAHYQVTDGSLVALVPKQVSAYNMANSFTFTRSLSRYESLLRTASSPDSLRSRAPMITPDQETGTKLWHLVKNHDHADHREGDRGSKMVSEIYLTRLLATKGTLQKFVDDLFETVFSTAHRGSALPLAIKYMFDFLDEQADQRQISDPDVRHTWKSNCLPLRFWVNVIKNPQFVFDIHKNSITDACLSVVAQTFMDSCSTSEHRLGKDSPSNKLLYAKDIPNYKSWVERYYRDIAKMASISDQDMDAYLVEQSRLHASDFSVLSALNELYFYVTKYRQEILTALDRDASCRKHKLRQKLEQIISLVSSDS

SEQ ID NO: 751815 - protein, 1413 aa, Homo sapiens
MQINGNFCGLVLNQPLGGLHVIEGLPLLADSTDGMASVAAYTYRQHSVVFIGTRSGSLKKVRVDGFQDAHLYETVPVVDGSPILRDLLFSPDHRHIYLLSEKQVSQLPVETCEQYQSCAACLGSGDPHCGWCVLRHRCCREGACLGASAPHGFAEELSKCVQVRVRPNNVSVTSPGVQLTVTLHNVPDLSAGVSCAFEAAAENEAVLLPSGELLCPSPSLQELRALTRGHGATRTVRLQLLSKETGVRFAGADFVFYNCSVLQSCMSCVGSPYPCHWCKYRHTCTSRPHECSFQEGRVHSPEVRRAPHVRGWALWCGRGHRLLCVLGFFEPSPGWAWRRVALCAADRCFPQQGCPEILPSGDLLIPVGVMQPLTLRAKNLPQPQSGQKNYECVVRVQGRQQRVPAVRFNSSSVQCQNASYSYEGDEHGDTELDFSVVWDGDFPIDKPPSFRALLYKCWAQRPSCGLCLKADPRFNCGWCISEHRCQLRTHCPAPKTNWMHLSQKGTRCSHPRITQIHPLVGPKEGGTRVTIVGENLGLLSREVGLRVAGVRCNSIPAEYISAERIVCEMEESLVPSPPPGPVELCVGDCSADFRTQSEQVYSFVTPTFDQVSPSRGPASGGTRLTISGSSLDAGSRVTVTVRDSECQFVRRDAKAIVCISPLSTLGPSQAPITLAIDRANISSPGLIYTYTQDPTVTRLEPTWSIINGSTAITVSGTHLLTVQEPRVRAKYRGIETTNTCQVINDTAMLCKAPGIFLGRPQPRAQGEHPDEFGFLLDHVQTARSLNRSSFTYYPDPSFEPLGPSGVLDVKPGSHVVLKGKNLIPAAAGSSRLNYTVLIGGQPCSLTVSDTQLLCDSPSQTGRQPVMVLVGGLEFWLGTLHISAERALTLPAMMGLAAGGGLLLLAITAVLVAYKRKTQDADRTLKRLQLQMDNLESRVALECKEAFAELQTDINELTNHMDEVQIPFLDYRTYAVRVLFPGIEAHPVLKELDTPPNVEKALRLFGQLLHSRAFVLTFIHTLEAQSSFSMRDRGTVASLTMVALQSRLDYATGLLKQLLADLIEKNLESKNHPKLLLRRTESVAEKMLTNWFTFLLHKFLKECAGEPLFLLYCAIKQQMEKGPIDAITGEARYSLSEDKLIRQQIDYKTLTLHCVCPENEGSAQVPVKVLNCDSITQAKDKLLDTVYKGIPYSQRPKAEDMDLEWRQGRMTRIILQDEDVTTKIECDWKRLNSLAHYQVTDGSLVALVPKQVSAYNMANSFTFTRSLSRYESLLRTASSPDSLRSRAPMITPDQETGTKLWHLVKNHDHADHREGDRGSKMVSEIYLTRLLATKGTLQKFVDDLFETVFSTAHRGSALPLAIKYMFDFLDEQADQRQISDPDVRHTWKSNWYHPVLGCQQPVWRLVGGRRWWLC

SEQ ID NO: 751816 - protein, 749 aa, Homo sapiens
MQINGNFCGLVLNQPLGGLHVIEGLPLLADSTDGMASVAAYTYRQHSVVFIGTRSGSLKKVRVDGFQDAHLYETVPVVDGSPILRDLLFSPDHRHIYLLSEKQVSQLPVETCEQYQSCAACLGSGDPHCGWCVLRHRCCREGACLGASAPHGFAEELSKCVQVRVRPNNVSVTSPGVQLTVTLHNVPDLSAGVSCAFEAAAENEAVLLPSGELLCPSPSLQELRALTRGHGATRTVRLQLLSKETGVRFAGADFVFYNCSVLQSCMSCVGSPYPCHWCKYRHTCTSRPHECSFQEGRVHSPEVRRAPHVRGWALWCGRGHRLLCVLGFFEPSPGWAWRRVALCAADRCFPQQGCPEILPSGDLLIPVGVMQPLTLRAKNLPQPQSGQKNYECVVRVQGRQQRVPAVRFNSSSVQCQNASYSYEGDEHGDTELDFSVVWDGDFPIDKPPSFRALLYKCWAQRPSCGLCLKADPRFNCGWCISEHRCQLRTHCPAPKTNWMHLSQKGTRCSHPRITQIHPLVGPKEGGTRVTIVGENLGLLSREVGLRVAGVRCNSIPAEYISAERIVCEMEESLVPSPPPGPVELCVGDCSADFRTQSEQVYSFVTPTFDQVSPSRGPASGGTRLTISGSSLDAGSRVTVTVRDSECQFVRRDAKAIVCISPLSTLGPSQAPITLAIDRANISSPGLIYTYTQDPTVTRLEPTWSIINGSTAITVSGTHLLTVQEPRVRAKYRGIETTNVSTSCPAPPRP

SEQ ID NO: 751817 - protein, 974 aa, Homo sapiens
MEESLVPSPPPGPVELCVGDCSADFRTQSEQVYSFVTPTFDQVSPSRGPASGGTRLTISGSSLDAGSRVTVTVRDSECQFVRRDAKAIVCISPLSTLGPSQAPITLAIDRANISSPGLIYTYTQDPTVTRLEPTWSIINGSTAITVSGTHLLTVQEPRVRAKYRGIETTNTCQVINDTAMLCKAPGIFLGRPQPRAQGEHPDEFGFLLDHVQTARSLNRSSFTYYPDPSFEPLGPSGVLDVKPGSHVVLKGKNLIPAAAGSSRLNYTVLIGGQPCSLTVSDTQLLCDSPSQTGRQPVMVLVGGLEFWLGTLHISAERALTLPAMMGLAAGGGLLLLAITAVLVAYKRKTQDADRTLKRLQLQMDNLESRVALECKEAFAELQTDINELTNHMDEVQIPFLDYRTYAVRVLFPGIEAHPVLKELDTPPNVEKALRLFGQLLHSRAFVLTFIHTLEAQSSFSMRDRGTVASLTMVALQSRLDYATGLLKQLLADLIEKNLESKNHPKLLLRRTESVAEKMLTNWFTFLLHKFLKECAGEPLFLLYCAIKQQMEKGPIDAITGEARYSLSEDKLIRQQIDYKTLTLHCVCPENEGSAQVPVKVLNCDSITQAKDKLLDTVYKGIPYSQRPKAEDMDLEWRQGRMTRIILQDEDVTTKIECDWKRLNSLAHYQVTDGSLVALVPKQVSAYNMANSFTFTRSLSRYESLLRTASSPDSLRSRAPMITPDQETGTKLWHLVKNHDHADHREGDRGSKMVSEIYLTRLLATKGTLQKFVDDLFETVFSTAHRGSALPLAIKYMFDFLDEQADQRQISDPDVRHTWKSNCLPLRFWVNVIKNPQFVFDIHKNSITDACLSVVAQTFMDSCSTSEHRLGKDSPSNKLLYAKDIPNYKSWVERYYRDIAKMASISDQDMDAYLVEQSRLHASDFSVLSALNELYFYVTKYRQEILTALDRDASCRKHKLRQKLEQIISLVSSDS

SEQ ID NO: 751818 - protein, 1066 aa, Homo sapiens
MQINGNFCGLVLNQPLGGLHVIEGLPLLADSTDGMASVAAYTYRQHSVVFIGTRSGSLKKVRVDGFQDAHLYETVPVVDGSPILRDLLFSPDHRHIYLLSEKQVSQLPVETCEQYQSCAACLGSGDPHCGWCVLRHRCCREGACLGASAPHGFAEELSKCVQVRVRPNNVSVTSPGVQLTVTLHNVPDLSAGVSCAFEAAAENEAVLLPSGELLCPSPSLQELRALTRGHGATRTVRLQLLSKETGVRFAGADFVFYNCSVLQSCMSCVGSPYPCHWCKYRHTCTPRAQGEHPDEFGFLLDHVQTARSLNRSSFTYYPDPSFEPLGPSGVLDVKPGSHVVLKGKNLIPAAAGSSRLNYTVLIGGQPCSLTVSDTQLLCDSPSQTGRQPVMVLVGGLEFWLGTLHISAERALTLPAMMGLAAGGGLLLLAITAVLVAYKRKTQDADRTLKRLQLQMDNLESRVALECKEAFAELQTDINELTNHMDEVQIPFLDYRTYAVRVLFPGIEAHPVLKELDTPPNVEKALRLFGQLLHSRAFVLTFIHTLEAQSSFSMRDRGTVASLTMVALQSRLDYATGLLKQLLADLIEKNLESKNHPKLLLRRTESVAEKMLTNWFTFLLHKFLKECAGEPLFLLYCAIKQQMEKGPIDAITGEARYSLSEDKLIRQQIDYKTLTLHCVCPENEGSAQVPVKVLNCDSITQAKDKLLDTVYKGIPYSQRPKAEDMDLEWRQGRMTRIILQDEDVTTKIECDWKRLNSLAHYQVTDGSLVALVPKQVSAYNMANSFTFTRSLSRYESLLRTASSPDSLRSRAPMITPDQETGTKLWHLVKNHDHADHREGDRGSKMVSEIYLTRLLATKGTLQKFVDDLFETVFSTAHRGSALPLAIKYMFDFLDEQADQRQISDPDVRHTWKSNCLPLRFWVNVIKNPQFVFDIHKNSITDACLSVVAQTFMDSCSTSEHRLGKDSPSNKLLYAKDIPNYKSWVERYYRDIAKMASISDQDMDAYLVEQSRLHASDFSVLSALNELYFYVTKYRQEILTALDRDASCRKHKLRQKLEQIISLVSSDS

SEQ ID NO: 751819 - protein, 615 aa, Homo sapiens
TLADLSTCSRVGLEYKEAFAELQTDINELTNHMDEVQIPFLDYRTYAVRVLFPGIEAHPVLKELDTPPNVEKALRLFGQLLHSRAFVLTFIHTLEAQSSFSMRDRGTVASLTMVALQSRLDYATGLLKQLLADLIEKNLESKNHPKLLLRRTESVAEKMLTNWFTFLLHKFLKECAGEPLFLLYCAIKQQMEKGPIDAITGEARYSLSEDKLIRQQIDYKTLTLHCVCPENEGSAQVPVKVLNCDSITQAKDKLLDTVYKGIPYSQRPKAEDMDLEWRQGRMTRIILQDEDVTTKIECDWKRLNSLAHYQVTDGSLVALVPKQVSAYNMANSFTFTRSLSRYESLLRTASSPDSLRSRAPMITPDQETGTKLWHLVKNHDHADHREGDRGSKMVSEIYLTRLLATKGTLQKFVDDLFETVFSTAHRGSALPLAIKYMFDFLDEQADQRQISDPDVRHTWKSNCLPLRFWVNVIKNPQFVFDIHKNSITDACLSVVAQTFMDSCSTSEHRLGKDSPSNKLLYAKDIPNYKSWVERYYRDIAKMASISDQDMDAYLVEQSRLHASDFSVLSALNELYFYVTKYRQEILTALDRDASCRKHKLRQKLEQIISLVSSDS

SEQ ID NO: 751820 - protein, 176 aa, Homo sapiens
MCTWEGPLGANQGASGARPSVVHSLPLRFWVNVIKNPQFVFDIHKNSITDACLSVVAQTFMDSCSTSEHRLGKDSPSNKLLYAKDIPNYKSWVERYYRDIAKMASISDQDMDAYLVEQSRLHASDFSVLSALNELYFYVTKYRQEILTALDRDASCRKHKLRQKLEQIISLVSSDS

SEQ ID NO: 751821 - protein, 829 aa, Homo sapiens
MQINGNFCGLVLNQPLGGLHVIEGLPLLADSTDGMASVAAYTYRQHSVVFIGTRSGSLKKVRVDGFQDAHLYETVPVVDGSPILRDLLFSPDHRHIYLLSEKQVSQLPVETCEQYQSCAACLGSGDPHCGWCVLRHRCCREGACLGASAPHGFAEELSKCVQVRVRPNNVSVTSPGVQLTVTLHNVPDLSAGVSCAFEAAAENEAVLLPSGELLCPSPSLQELRALTRGHGATRTVRLQLLSKETGVRFAGADFVFYNCSVLQSCMSCVGSPYPCHWCKYRHTCTSRPHECSFQEGRVHSPEVRRAPHVRGWALWCGRGHRLLCVLGFFEPSPGWAWRRVALCAADRCFPQQGCPEILPSGDLLIPVGVMQPLTLRAKNLPQPQSGQKNYECVVRVQGRQQRVPAVRFNSSSVQCQNASYSYEGDEHGDTELDFSVVWDGDFPIDKPPSFRALLYKCWAQRPSCGLCLKADPRFNCGWCISEHRCQLRTHCPAPKTNWMHLSQKGTRCSHPRITQIHPLVGPKEGGTRVTIVGENLGLLSREVGLRVAGVRCNSIPAEYISAERIVCEMEESLVPSPPPGPVELCVGDCSADFRTQSEQVYSFVTPTFDQVSPSRGPASGGTRLTISGSSLDAGSRVTVTVRDSECQFVRRDAKAIVCISPLSTLGPSQAPITLAIDRANISSPGLIYTYTQDPTVTRLEPTWSIINGSTAITVSGTHLLTVQEPRVRAKYRGIETTNTCQVINDTAMLCKAPGIFLGRPQPRAQGEHPDEFGFLLDHVQTARSLNRPSSARPVGPRRPCLTTLCLLPPLRNLALSDSPRPPVLSSLVA

SEQ ID NO: 751822 - protein, 106 aa, Homo sapiens
MSPERHTQGPNRYYRDIAKMASISDQDMDAYLVEQSRLHASDFSVLSALNELYFYVTKYRQEVCVIPTDSQLLGPEGAASDKGRRVGGGWGLFTVSPLTRAWGRHR

SEQ ID NO: 751823 - protein, 66 aa, Homo sapiens
PGSRPLRSGTNAWQPGAQGEELPVAQDPGASQAPRAPRVDRKPPEHRGVGGLGQSMGPSCSCDLFS

SEQ ID NO: 751824 - protein, 596 aa, Homo sapiens
MNRTWPRRIWGSSQDEAELIREDIQGALHNYRSGRGERRAAALRATQEELQRDRSPAAETPPLQRRPSVRAVISTVERGAGRGRPQAKPIPEAEEAQRPEPVGTSSNADSASPDLGPRGPDLAVLQAEREVDILNHVFDDVESFVSRLQKSAEAARVLEHRERGRRSRRRAAGEGLLTLRAKPPSEAEYTDVLQKIKYAFSLLARLRGNIADPSSPELLHFLFGPLQMIVNTSGGPEFASSVRRPHLTSDAVALLRDNVTPRENELWTSLGDSWTRPGLELSPEEGPPYRPEFFSGWEPPVTDPQSRAWEDPVEKQLQHERRRRQQSAPQVAVNGHRDLEPESEPQLESETAGKWVLCNYDFQARNSSELSVKQRDVLEVLDDSRKWWKVRDPAGQEGYVPYNILTPYPGPRLHHSQSPARSLNSTPPPPPAPAPAPPPALARPRWDRPRWDSCDSLNGLDPSEKEKFSQMLIVNEELQARLAQGRSGPSRAVPGPRAPEPQLSPGSDASEVRAWLQAKGFSSGTVDALGVLTGAQLFSLQKEELRAVSPEEGARVYSQVTVQRSLLEDKEKVSELEAVMEKQKKKVEGEVEMEVI

SEQ ID NO: 751825 - protein, 548 aa, Homo sapiens
MGRKAIVLAIANTSLAFPLCQHLVTFCLGEDDGVHTVEDASRKLAVMDSQGRVWAQEMLLRVSPDHVTLLDPASKEELESYPLGAIVRCDAVMPPGRSRSLLLLVCQEPERAQPDVHFFQGLRLGAELIREDIQGALHNYRSGRGERRAAALRATQEELQRDRSPAAETPPLQRRPSVRAVISTVERGAGRGRPQAKPIPEAEEAQRPEPVGTSSNADSASPDLGPRGPDLAVLQAEREVDILNHVFDDVESFVSRLQKSAEAARVLEHRERGRRSRRRAAGEGLLTLRAKPPSEAEYTDVLQKIKYAFSLLARLRGNIADPSSPELLHFLFGPLQMIVNTSGGPEFASSVRRPHLTSDAVALLRDNVTPRENELWTSLGDSWTRPGLELSPEEGPPYRPEFFSGWEPPVTDPQSRAWEDPVEKQLQHERRRRQVTQATQQGRGWEVRGRGRSAWPRLTRLSYFLQQSAPQVAVNGHRDLEPESEPQLESETAGKWVLCNYDFQARNSSELSVKQRDVLEDKEKVSELEAVMEKQKKKVEGEVEMEVI

SEQ ID NO: 751826 - protein, 443 aa, Homo sapiens
KKKKKKKKNRGRRSRRRAAGEGLLTLRAKPPSEAEYTDVLQKIKYAFSLLARLRGNIADPSSPELLHFLFGPLQMIVNTSGGPEFASSVRRPHLTSDAVALLRDNVTPRENELWTSLGDSWTRPGLELSPEEGPPYRPEFFSGWEPPVTDPQSRAWEDPVEKQLQHERRRRQQSAPQVAVNGHRDLEPESEPQLESETAGKWVLCNYDFQARNSSELSVKQRDVLEVLDDSRKWWKVRDPAGQEGYVPYNILTPYPGPRLHHSQSPARSLNSTPPPPPAPAPAPPPALARPRWDRPRWDSCDSLNGLDPSEKEKFSQMLIVNEELQARLAQGRSGPSRAVPGPRAPEPQLSPGSDASEVRAWLQAKGFSSGTVDALGVLTGAQLFSLQKEELRAVSPEEGARVYSQVTVQRSLLEDKEKVSELEAVMEKQKKKVEGEVEMEVI

SEQ ID NO: 751827 - protein, 326 aa, Homo sapiens
EQIEGRLEGSNVGGDENKAVRLEETKGGLGEGPSRGSQQGQRAGSCRPHTGGAAALKTPPLLLHSHRDLEPESEPQLESETAGKWVLCNYDFQARNSSELSVKQRDVLEVLDDSRKWWKVRDPAGQEGYVPYNILTPYPGPRLHHSQSPARSLNSTPPPPPAPAPAPPPALARPRWDRPRWDSCDSLNGLDPSEKEKFSQMLIVNEELQARLAQGRSGPSRAVPGPRAPEPQLSPGSDASEVRAWLQAKGFSSGTVDALGVLTGAQLFSLQKEELRAVSPEEGARVYSQVTVQRSLLEDKEKVSELEAVMEKQKKKVEGEVEMEVI

SEQ ID NO: 751828 - protein, 277 aa, Homo sapiens [sequence omitted]

SEQ ID NO: 751829 - protein, 132 aa, Homo sapiens
HQGKSRPQVKSDRGRAGCADRGAAFLAAEGGAAGGEPRGGGTCVQPGHRAALAAGGQRESVRAGGSDGEAKEEGGRRGGNGGHLTCQAPFAKSDEAPWENGLLRLSPIAEVDLLKDGQSAPALVFPHPGGQT

SEQ ID NO: 751830 - protein, 299 aa, Homo sapiens
KKKKKKKKNRGRRSRRRAAGEGLLTLRAKPPSEAEYTDVLQKIKYAFSLLARLRGNIADPSSPELLHFLFGPLQMIVNTSGGPEFASSVRRPHLTSDAVALLRDNVTPRENELWTSLGDSWTRPGLELSPEEGPPYRPEFFSGWEPPVTDPQSRAWEDPVEKQLQHERRRRQQSAPQVAVNGHRDLEPESEPQLESETAGKWVLCNYDFQARNSSELSVKQRDVLEVLDDSRKWWKVRDPAGQEGYVPYNILTPYPGPRLHHSQSPARSLNSTPPPPPAPARCSSLTMSIWENFSFSLG

SEQ ID NO: 751831 - protein, 182 aa, Homo sapiens
KKKKKKKKNRGRRSRRRAAGEGLLTLRAKPPSEAEYTDVLQKIKYAFSLLARLRGNIADPSSPELLHFLFGPLQMIVNTSGGPEFASSVRRPHLTSDAVALLRDNVTPRENELWTSLGDSWTRPGLELSPEEGPPYRPEFFSGWEPPVTDPQSRAWEDPVEKQLQHERRRRQQSAPQVAVNG

SEQ ID NO: 751832 - protein, 506 aa, Homo sapiens
DLFQMSPLSPGSPLPPLARADLTAILTGCPPLSACLVLAPRPHRRARLLPSEGLLTLRAKPPSEAEYTDVLQKIKYAFSLLARLRGNIADPSSPELLHFLFGPLQMIVNTSGGPEFASSVRRPHLTSDAVALLRDNVTPRENELWTSLGDSWTRPGLELSPEEGPPYRPEFFSGWEPPVTDPQSRAWEDPVEKQLQHERRRRQVTQATQQGRGWEVRGRGRSAWPRLTRLSYFLQQSAPQVAVNGHRDLEPESEPQLESETAGKWVLCNYDFQARNSSELSVKQRDVLEVLDDSRKWWKVRDPAGQEGYVPYNILTPYPGPRLHHSQSPARSLNSTPPPPPAPAPAPPPALARPRWDRPRWDSCDSLNGLDPSEKEKFSQMLIVNEELQARLAQGRSGPSRAVPGPRAPEPQLSPGSDASEVRAWLQAKGFSSGTVDALGVLTGAQLFSLQKEELRAVSPEEGARVYSQVTVQRSLLEDKEKVSELEAVMEKQKKKVEGEVEMEVI

SEQ ID NO: 751833 - protein, 443 aa, Homo sapiens; identical to SEQ ID NO: 751826

SEQ ID NO: 751834 - protein, 443 aa, Homo sapiens; identical to SEQ ID NO: 751826

SEQ ID NO: 751835 - protein, 126 aa, Homo sapiens [sequence omitted]

SEQ ID NO: 751836 - protein, 443 aa, Homo sapiens
KKKKKKKKNRGRRSRRRAAGEGLLTLRAKPPSEAEYTDVLQKIKYAFSLLARLRGNIADPSSPELLHFLFGPLQMIVNTSGGPEFASSVRRPHLTSDAVALLRDNVTPRENELWTSLGDSWTRPGLELSPEEGPPYRPEFFSGWEPPVTDPQSRAWEDPVEKQLQHERRRRQQSAPQVAVNGHRDLEPESEPQLESETAGKWVLCNYDFQARNSSELSVKQRDVLEVLDDSRKWWKVRDPAGQEGYVPYNILTPYPGPRLHHSQSPARSLNSTPPPPPAPAPAPPPALARPRWDRPRWDSCDSLNGLDPSEKEKFSQMLIVNEELQARLAQGRSGPSRAVPGPRAPEPQLSPGSDASEVRAWLQAKGFSSGTVDALGVLTGAQLFSLQKEELRAVSPEEGARVYSQVTVQRSLLEDKEKVSELEAVMEKQKKKVEGEVDIPAG

SEQ ID NO: 751837 - protein, 145 aa, Homo sapiens
KKKKKKKKNRGRRSRRRAAGEGLLTLRAKPPSEAEYTDVLQKIKYAFSLLARLRGNIADPSSPELLHFLFGPLQMIVNTSGGPEFASSVRRPHLTSDAVALLRDNVTPRENELWTSLGDSWTRPGLELSHGGGTPTREHPPTERA

SEQ ID NO: 751838 - protein, 250 aa, Homo sapiens
MRILQLILLALATGLVGGETRIIKGFECKPHSQPWQAALFEKTRLLCGATLIAPRWLLTAAHCLKPRYIVHLGQHNLQKEEGCEQTRTATESFPHPGFNNSLPNKDHRNDIMLVKMASPVSITWAVRPLTLSSRCVTAGTSCLISGWGSTSSPQLRLPHTLRCANITIIEHQKCENAYPGNITDTMVCASVQEGGKDSCQGDSGGPLVCNQSLQGIISWGQDPCAITRKPGVYTKVCKYVDWIQETMKNN

SEQ ID NO: 751839 - protein, 250 aa, Homo sapiens; identical to SEQ ID NO: 751838

SEQ ID NO: 751840 - protein, 282 aa, Homo sapiens
MQRLRWLRDWKSSGRGLTAAKEPGARSSPLQAMRILQLILLALATGLVGGETRIIKGFECKPHSQPWQAALFEKTRLLCGATLIAPRWLLTAAHCLKPRYIVHLGQHNLQKEEGCEQTRTATESFPHPGFNNSLPNKDHRNDIMLVKMASPVSITWAVRPLTLSSRCVTAGTSCLISGWGSTSSPQLRLPHTLRCANITIIEHQKCENAYPGNITDTMVCASVQEGGKDSCQGDSGGPLVCNQSLQGIISWGQDPCAITRKPGVYTKVCKYVDWIQETMKNN

SEQ ID NO: 751841 - protein, 250 aa, Homo sapiens; identical to SEQ ID NO: 751838

SEQ ID NO: 751842 - protein, 75 aa, Homo sapiens
RILNAMTEKGWKNEMTTVMNISGLLPLCGRLPVTSEVHPRTPTCENWTHGDAQNPKTLLTVQQASSRVPLAFSRG

SEQ ID NO: 751843 - protein, 805 aa, Homo sapiens
TLRRLSPRPQHPELFSGQACACSPSLPPGAAATHPQMVGPEDAGACSGRNPKLLPVPAPDPVGQDRKVIRATGGFGGGVGAVEPPEEADEEEETPPRQLLQRYLAAAGEQLEPGLCYCPLPAGQAGAPPPSAAPRSDACLLGSGSKHRGAEVADGRAPRHEGMTNGDSGFLPGRDCRDLEEARGLARAGGRESRRRRPYGRLRLEGPGDEDADGAGSPSDWASPLEDPLRSCCLVAADAQEPEGAGSDSGDSPASSCSSSEDSEQRGVGAGGPEEGAPPATSAERTNGGAEPRLGFSDIHFNSRNTFQVSRGQSARDHLPPAGPPVPLPAAEQGPAGASARARRSGGFADFFTRNLFPKRTKELKSVVHSAPGWKLFGKVPPRENLQKTSKIIQQEYEARTGRTCKPPPQSSRRKNFEFEPLSTTALILEDRPSNLPAKSVEEALRHRQEYDEMVAEAKKREIKEAHKRKRIMKERFKQEENIASAMVIWINEILPNWEVMRSTRRVRELWWQGLPPSVRGKVWSLAVGNELNITPELYEIFLSRAKERWKSFSETSSENDTEGVSVADREASLELIKLDISRTFPSLYIFQKGGPYHDVLHSILGAYTCYRPDVGYVQGMSFIAAVLILNLEEADAFIAFANLLNKPCQLAFFRVDHSMMLKYFATFEVFFEENLSKLFLHFKSYSLTPDIYLIDWIFTLYSKSLPLDLACRVWDVFCRDGEEFLFRTGLGILRLYEDILLQMDFIHIAQFLTKLPEDITSEKLFSCIAAIQMQNSTKKWTQVFASVMKDIKEGDKNSSPALKS

SEQ ID NO: 751844 - protein, 805 aa, Homo sapiens; identical to SEQ ID NO: 751843

SEQ ID NO: 751845 - protein, 690 aa, Homo sapiens
TLRRLSPRPQHPELFSGQACACSPSLPPGAAATHPQMVGPEDAGACSGRNPKLLPVPAPDPVGQDRKVIRATGGFGGGVGAVEPPEEADEEEEADEEEETPPRQLLQRYLAAAGEQLEPGLCYCPLPAGQAGAPPPSAAPRSDACLLGSGSKHRGAEVADGRAPRHEGMTNGDSGFLPGRDCRDLEEARGLARAGGRESRRRRPYGRLRLEGPGDEDADGAGSPSDWASPLEDPLRSCCLVAADAQEPEGAGSDSGDSPASSCSSSEDSEQRGVGAGGPEEGAPPATSAERTNGGAEPRLGFSDIHFNSRNTFQVSRGQSARDHLPPAGPPVPLPAAEQGPAGASARARRSGGFADFFTRNLFPKRTKELKSVVHSAPGWKLFGKVPPRENLQKTSKIIQQEYEARTGRTCKPPPQSSRRKNFEFEPLSTTALILEDRPSNLPAKSVEEALRHRQEYDEMVAEAKKREIKEAHKRKRIMKERFKQEENIASAMVIWINEILPNWEVMRSTRRVRELWWQGLPPSVRGKVWSLAVGNELNITPELYEIFLSRAKERWKSFSETSSENDTEGVSVADREASLELIKLDISRTFPSLYIFQKGGPYHDVLHSILGAYTCYRPDVGYVQGMSFIAAVLILNLEEADAFIAFANLLNKPCQLAFFRVDHSMMLKYFATFEVFFEENLSKLDLHTI

SEQ ID NO: 751846 - protein, 811 aa, Homo sapiens
TLRRLSPRPQHPELFSGQACACSPSLPPGAAATHPQMVGPEDAGACSGRNPKLLPVPAPDPVGQDRKVIRATGGFGGGVGAVEPPEEADEEEEADEEEETPPRQLLQRYLAAAGEQLEPGLCYCPLPAGQAGAPPPSAAPRSDACLLGSGSKHRGAEVADGRAPRHEGMTNGDSGFLPGRDCRDLEEARGLARAGGRESRRRRPYGRLRLEGPGDEDADGAGSPSDWASPLEDPLRSCCLVAADAQEPEGAGSDSGDSPASSCSSSEDSEQRGVGAGGPEEGAPPATSAERTNGGAEPRLGFSDIHFNSRNTFQVSRGQSARDHLPPAGPPVPLPAAEQGPAGASARARRSGGFADFFTRNLFPKRTKELKSVVHSAPGWKLFGKVPPRENLQKTSKIIQQEYEARTGRTCKPPPQSSRRKNFEFEPLSTTALILEDRPSNLPAKSVEEALRHRQEYDEMVAEAKKREIKEAHKRKRIMKERFKQEENIASAMVIWINEILPNWEVMRSTRRVRELWWQGLPPSVRGKVWSLAVGNELNITPELYEIFLSRAKERWKSFSETSSENDTEGVSVADREASLELIKLDISRTFPSLYIFQKGGPYHDVLHSILGAYTCYRPDVGYVQGMSFIAAVLILNLEEADAFIAFANLLNKPCQLAFFRVDHSMMLKYFATFEVFFEENLSKLFLHFKSYSLTPDIYLIDWIFTLYSKSLPLDLACRVWDVFCRDGEEFLFRTGLGILRLYEDILLQMDFIHIAQFLTKLPEDITSEKLFSCIAAIQMQNSTKKWTQVFASVMKDIKEGDKNSSPALKS

SEQ ID NO: 751847 - protein, 79 aa, Homo sapiens
CKPRTFESSRRKNFEFEPLSTTALILEDRPSNLFPKRTKELKSVVHSAPGWKLFGKVPPRENLQKTSKIIQQVSTDIAM

SEQ ID NO: 751848 - protein, 805 aa, Homo sapiens; identical to SEQ ID NO: 751843

SEQ ID NO: 751849 - protein, 805 aa, Homo sapiens; identical to SEQ ID NO: 751843

SEQ ID NO: 751850 - protein, 112 aa, Homo sapiens [sequence omitted]

SEQ ID NO: 751851 - protein, 319 aa, Homo sapiens
MAICPELAQTDKSALANLSDETETLKNFTDEVQTSSSFSSSGGRQSSPLTSGSKLEREKQTPSLEQGDTQSELLDYKNYEKKLSKKWINYLKLKDSNFERHQPDTKLPTEITRVSDEELNALQSYCTMKINLIHRRGDSKKKTSSRHKKLHLGLDVEASERDAFSCTVPDELLNRIYFKNMRTTPKQEAAAKQHISYQCPYCNRKRAELALSAFLKQKKTLLESFLLQERIDEHLHTKDFLTRIGEAHQDFPRLSDDPRIIWKRLTEKSHIRYSGFERSETEQKMQRDGNSACHLPFSLPFLKRLTLIKPELVIVNDNV

SEQ ID NO: 751852 - protein, 79 aa, Homo sapiens
SITVGIRRKQSSGFARDLRCIHSESRGPIMFHVSLDLAQILLSPSAACSLKILQHITVSNMIISVFTHFRRRDQGGDQT

SEQ ID NO: 751853 - protein, 224 aa, Homo sapiens
  misc_feature (29)..(29): Xaa can be any naturally occurring amino acid
RGSPGSRCRCDIQMTQIPPSLAASVGERXTMTCRASEGIGAFLGWYQKKPGAAPRLLVYGATNLQSGVPSRFSGRGVGSDVSLTIEKSPALKTSLVYICPVLFFPFSYGPGTTLDHKRTVAAPSVFIFPPSDEQLKSGTASVVCLLNNFYPREAKVQWKVDNALQSGNSQESVTEQDSKDSTYSLSSTLTLSKADYEKHKVYACEVTHQGLSSPVTKSFYRGEC

SEQ ID NO: 751854 - protein, 167 aa, Homo sapiens
MRIRNVTCRVESLMFAGSRSGTHFTLTIAVFKLKDSGLYFLSQGYAAPFTFGPGTTVSVNRTVAAPSVFIFPPSDEQLKSGTASVVCLLNNFYPREAKVQWKVDNALQSGNSQESVTEQDSKDSTYSLSSTLTLSKADYEKHKVYACEVTHQGLSSPVTKSFYRGEC

SEQ ID NO: 751855 - protein, 202 aa, Homo sapiens
RCSFVSGKSTSLQVSQSLTAILGWYSIIWQAPGSSSIDATRRAICIPDRFSGSGSGTDFTFTISSLQPEDFATYYCQQYDDLVFTFGPGTKVDVKRTVAAPSVFIFPPSDEQLKSGTASVVCLLNNFYPREAKVQWKVDNALQSGNSQESVTEQDSKDSTYSLSSTLTLSKADYEKHKVYACEVTHQGLSSPVTKSFYRGEC

SEQ ID NO: 751856 - protein, 230 aa, Homo sapiens
LGPHLQSKGTQRTHMGTFVDKRFCLRQLPLHQESVSVYRVSRPQSQRPQGRGKAHAGSVSRGGIRNPASTLETAWHLFGFGRKPVGIDEPIGLVQGSSVTSRAASAVLWSKAGQALGTPAGDKRTVAAPSVFIFPPSDEQLKSGTASVVCLLNNFYPREAKVQWKVDNALQSGNSQESVTEQDSKDSTYSLSSTLTLSKADYEKHKVYACEVTHQGLSSPVTKSFYRGEC

SEQ ID NO: 751857 - protein, 84 aa, Homo sapiens
PGITAPVQQEKRLPSCPKPAFSVVPQLLGQVEPPLKLVSTCPRLPTAAHSSAFRAEPRAQRMEKPESGEVRERASRHTTEVIGL

SEQ ID NO: 751858 - protein, 216 aa, Homo sapiens
MAEPSAATQSHSISSSSFGAEPSAPGGGGSPGACPALGTKSCSSSCAVHDLIFWRDVKKTGFVFGTTLIMLLSLAAFSVISVVSYLILALLSVTISFRIYKSVIQAVQKSEEGHPFKPYPWYVRHLHPVPSAHAFIASHSTTVHCLRTCAWTTKLPNLVCHTVNIILPRRNKQECYLAAWCSRTEHSWAIMNIAVRQGTLQLGSYHVADTIEVETR

SEQ ID NO: 751859 - protein, 255 aa, Homo sapiens
MAEPSAATQSHSISSSSFGAEPSAPGGGGSPGACPALGTKSCSSSCADSFVSSSSSQPVSLFSTSQVHDLIFWRDVKKTGFVFGTTLIMLLSLAAFSVISVVSYLILALLSVTISFRIYKSVIQAVQKSEEGHPFKAYLDVDITLSSEAFHNYMNAAMVHINRALKLIIRLFLVEDLVDSLKLAVFMWLMTYVGAVFNGITLLILAELLIFSVPIVYEKYKTQIDHYVGIARDQTKSIVEKIQAKLPGIAKKKAE

SEQ ID NO: 751860 - protein, 194 aa, Homo sapiens
AVTLADPFVYCGRDVKKTGFVFGTTLIMLLSLAAFSVISVVSYLILALLSVTISFRIYKSVIQAVQKSEEGHPFKAYLDVDITLSSEAFHNYMNAAMVHINRALKLIIRLFLVEDLVDSLKLAVFMWLMTYVGAVFNGITLLILAELLIFSVPIVYEKYKTQIDHYVGIARDQTKSIVEKIQAKLPGIAKKKAE

SEQ ID NO: 751861 - protein, 236 aa, Homo sapiens
MAEPSAATQSHSISSSSFGAEPSAPGGGGSPGACPALGTKSCSSSCAVHDLIFWRDVKKTGFVFGTTLIMLLSLAAFSVISVVSYLILALLSVTISFRIYKSVIQAVQKSEEGHPFKAYLDVDITLSSEAFHNYMNAAMVHINRALKLIIRLFLVEDLVDSLKLAVFMWLMTYVGAVFNGITLLILAELLIFSVPIVYEKYKTQIDHYVGIARDQTKSIVEKIQAKLPGIAKKKAE

SEQ ID NO: 751862 - protein, 117 aa, Homo sapiens
MAEPSAATQSHSISSSSFGAEPSAPGGGGSPGACPALGTKSCSSSCAADLGNSSDYKCHTDQLEESLLIGAVLKGLLVYGLHSIYCVHAFINFLLPANFSHVSWYRSAVSKLCKGFS

SEQ ID NO: 751863 - protein, 76 aa, Homo sapiens
FCQRNIKGQSKQRTRGIREKKRRMEREVCPEGKRRARLKSDSGLRTGRVPEFDHCQNPVFQDGVGEASKILDPGPQ

SEQ ID NO: 751864 - protein, 119 aa, Homo sapiens
MGARSFCPIVGSTLLLPNHWAHAPSARSLGSRSFCPILGARSFCPIVGRTLLLPDRWAHAPSARSLGARSFCPIVGSTLLLPDRWAHAPSARSLGARFFCLIVGRTLLLPDRWAHAPSA

SEQ ID NO: 751865 - protein, 95 aa, Homo sapiens
MHEEMAQNGDSRDKPPPKRVAHSRTICDTVFPNGGGLGTRADAQDRGSDQHCSAAIGPWAAPALISSSAGWGEPGHFTQGTVRGRLCDHARSLGK

SEQ ID NO: 751866 - protein, 148 aa, Homo sapiens
  misc_feature (134)..(134): Xaa can be any naturally occurring amino acid
MHEEMAQNGDSRDKPPPKRVAHSRTICDTVFPNGGGLGTRADAQDRGSDQHCSAAIGPLFPSPVTGKKGGGEGTREGKSAPLRRKHQRVEGRFPHPLALEAEELREEQGVEPGGGFMSAQQLEQTRWCGGKGSXGALSQSLFPSGDPL

SEQ ID NO: 751867 - protein, 75 aa, Homo sapiens
EELASAEVNNLARRFWWPGIPVLARGAASQRRTDPCRARIGSRDPGGSAASVLSSRRESESRATREWRWRARRSL

SEQ ID NO: 751868 - protein, 41 aa, Homo sapiens
MTDRTLGALAPSNKWWSHVSRAVVTSFLVTPLDMVEGPFAA

SEQ ID NO: 751869 - protein, 334 aa, Homo sapiens
MAAVTHYLYLCQFSWMLIQSVNFWYVLVMNDEHTERRYLLFFLLSWGLPAFVVILLIVILKGIYHQSMSQIYGLIHGDLCFIPNVYAALFTAALVPLTCLVVVFVVFIHAYQVKPQWKAYDDVFRGRTNAAEIPLILYLFALISVTWLWGGLHMAYRHFWMLVLFVIFNSLQGLYVFMVYFILHNQMCCPMKASYTVEMNGHPGPSTAFFTPGSGMPPAGGEISKSTQNLIGAMEEVPPDWERASFQQGSQASPDLKPSPQNGATFPSSGGYGQGSLIADEESQEFDDLIFALKTGAGLSVSDNESGQGSQEGGTLTDSQIVELRRIPIADTHL

SEQ ID NO: 751870 - protein, 334 aa, Homo sapiens; identical to SEQ ID NO: 751869

SEQ ID NO: 751871 - protein, 335 aa, Homo sapiens
MAAVTHYLYLCQFSWMLIQSVNFWYVLVMNDEHTERRYLLFFLLSWGLPAFVVILLIVILKGIYHQSMSQIYGLIHGDLCFIPNVYAALFTAALVPLTCLVVVFVVFIHAYQVKPQWKAYDDVFRGRTNAAEIPLILYLFALISVTWLWGGLHMAYRHFWMLVLFVIFNSLQGLYVFMVYFILHNQMCCPMKASYTVEMNGHPGPSTAFFTPGSGMPPAGGEISKSTQNLIGAMEEVPPDWERASFQQGSQASPDLKPSPQNGATFPSSGGYGQGSLIADEESQEFDDLIFALKTGAGLSVSDNESGQGSQEGGTLTDSQIVELRRIPIADTHLC

SEQ ID NO: 751872 - protein, 330 aa, Homo sapiens
MADIIARLREDGIQKRVIQEGRGELPDFQDGTKATFHYRTLHSDDEGTVLDDSRARGKPMELIIGKKFKLPVWETIVCTMREGEIAQFLCDIKHVVLYPLVAKSLRNIAVGKDPLEGQRHCCGVAQMREHSSLGHADLDALQQNPQPLIFHMEMLKVESPGTYQQDPWAMTDEEKAKAVPLIHQEGNRLYREGHVKEAAAKYYDAIACLKNLQMKEQPGSPEWIQLDKQITPLLLNYCQCKLVVEEYYEVLDHCSSILNKYDDNVKAYFKRGKAHAAVWNAQEAQADFAKVLELDPALAPVVSRELRALEARIRQKDEEDKARFRGIFSH

SEQ ID NO: 751873 - protein, 169 aa, Homo sapiens
MELIIGKKFKLPVWETIVCTMREGEIAQFLCDIKHVVLYPLVAKSLRNIAVGKDPLEGQRHCCGVAQMREHSSLGHADLDALQQNPQPLIFHMEMLKVESPGTYQQDPWAMTDEEKAKAVPLIHQEGNRLYREGHVKEAAAKYYDAIACLKNLQMKSPVGSSKQQYRCL

SEQ ID NO: 751874 - protein, 330 aa, Homo sapiens; identical to SEQ ID NO: 751872

SEQ ID NO: 751875 - protein, 330 aa, Homo sapiens; identical to SEQ ID NO: 751872

SEQ ID NO: 751876 - protein, 330 aa, Homo sapiens; identical to SEQ ID NO: 751872

SEQ ID NO: 751877 - protein, 260 aa, Homo sapiens
MADIIARLREDGIQKRVIQEGRGELPDFQDGTKATFHYRTLHSDDEGTVLDDSRARGKPMELIIGKKFKLPVWETIVCTMREGEIAQFLCDIKHVVLYPLVAKSLRNIAVGKDPLEGQRHCCGVAQMREHSSLGHADLDALQQNPQPLIFHMEMLKVESPGTYQQDPWAMTDEEKAKAVPLIHQEGNRLYREGHVKEAAAKYYDAIACLKNLQMKADFAKVLELDPALAPVVSRELRALEARIRQKDEEDKARFRGIFSH

SEQ ID NO: 751878 - protein, 228 aa, Homo sapiens
MADIIARLREDGIQKRVIQEGRGELPDFQDGTKATFHYRTLHSDDEGTVLDDSRARGKPMELIIGKKFKLPVWETIVCTMREGEIAQFLCDIKHVVLYPLVAKSLRNIAVGKDPLEGQRHCCGVAQMREHSSLGHADLDALQQNPQPLIFHMEMLKVESPGTYQQDPWAMTDEEKAKAVPLIHQEGNRLYREGHVKEAAAKYYDAIACLKNLQMKSPVGSSKQQYRCL

SEQ ID NO: 751879 - protein, 199 aa, Homo sapiens
VVNSSSWSMVQQNPQPLIFHMEMLKVESPGTYQQDPWAMTDEEKAKAVPLIHQEGNRLYREGHVKEAAAKYYDAIACLKNLQMKEQPGSPEWIQLDKQITPLLLNYCQCKLVVEEYYEVLDHCSSILNKYDDNVKAYFKRGKAHAAVWNAQEAQADFAKVLELDPALAPVVSRELRALEARIRQKDEEDKARFRGIFSH

SEQ ID NO: 751880 - protein, 208 aa, Homo sapiens
MADIIARLREDGIQKRVIQEGRGELPDFQDGTKATFHYRTLHSDDEGTVLDDSRARGKPMELIIGKKFKLPVWETIVCTMREGEIAQFLCDIKHVVLYPLVAKSLRNIAVGKDPLEGQRHCCGVAQMREHSSLGHADLDAHNVKAYFKRGKAHAAVWNAQEAQADFAKVLELDPALAPVVSRELRALEARIRQKDEEDKARFRGIFSH

SEQ ID NO: 751881 - protein, 102 aa, Homo sapiens
MWVRSAADGRSCGVPEPRCDMPHALPGGEPWHVPAGPMGHDRRREGKGAVWNAQEAQADFAKVLELDPALAPVVSRELRALEARIRQKDEEDKARFRGIFSH

SEQ ID NO: 751882 - protein, 330 aa, Homo sapiens; identical to SEQ ID NO: 751872

SEQ ID NO: 751883 - protein, 330 aa, Homo sapiens; identical to SEQ ID NO: 751872

SEQ ID NO: 751884 - protein, 330 aa, Homo sapiens; identical to SEQ ID NO: 751872

SEQ ID NO: 751885 - protein, 267 aa, Homo sapiens [sequence omitted]

SEQ ID NO: 751886 - protein, 125 aa, Homo sapiens
MGPRPRSTTGRCTVTTRAPCWTTAGLVASPWSSSLARSSSCLCGRPSCAPCEKGRLPSSSVTSSMWSCTRWWPRVSATSRWARTPWRASGTAAVLHRCVNTAPWAMLTWTPCSRTPSPSSSTWRC

SEQ ID NO: 751887 - protein, 156 aa, Homo sapiens
MADIIARLREDGIQKRVIQEGRGELPDFQDGTKATFHYRTLHSDDEGTVLDDSRARGKPMELIIGKKFKLPVWETIVCTMREGEIAQFLCDIKHVVLYPLVAKSLRNIAVGKDPLEGQRHCCGVAQMREHSSLGHADLDALAPELQLAPELAAARP

SEQ ID NO: 751888 - protein, 342 aa, Homo sapiens
QSPATGGRLRGAPEAAGAMAGVACLGKAADADEWCDSGLGSLGPDAAAPGGPGLGAELGPGLSWAPLVFGYVTEDGDTALHLAVIHQHEPFLDFLLGFSAGTEYMDLQNDLGQTALHLAAILGETSTVEKLYAAGAGLCVAERRGHTALHLACRVGAHACARALLQPRPRRPREAPDTYLAQGPDRTPDTNHTPVALYPDSDLEKEEEESEEDWKLQLEAENYEGHTPLHVAVIHKDVEMVRLLRDAGADLDKPEPTCGRSPLHLAVEAQAADVLELLLRAGANPAARMYGGRTPLGSAMLRPNPILARLLRAHGAPEPEGEDEKSGPCSSSSDSDSGDEGG

SEQ ID NO: 751889 - protein, 356 aa, Homo sapiens
QSPATGGRLRGAPEAAGAMAGVACLGKAADADEWCDSGLGSLGPDAAAPGGPGLGAELGPGLSWAPLVFGYVTEDGDTALHLAVIHQHEPFLDFLLGFSAGTEYMDLQNDLGQTALHLAAILGETSTVEKLYAAGAGLCVAERRGHTALHLACRVGAHACARALLQPRPRRPREAPDTYLAQGPDRTPDTNHTPVALYPDSDLEKEEEESEEDWKLQLEAENYEGHTPLHVAVIHKDVEMVRLLRDAGADLDKPEPTCGRSPLHLAVEAQAADVLELLLRAGANPAARMYGGRTPLGSAMLRPNPILARLLRAHGAPEPEGEDEKSGPCSSSSDSDSGDEGVSQEERQGSPAGGSG

SEQ ID NO: 751890 - protein, 356 aa, Homo sapiens; identical to SEQ ID NO: 751889

SEQ ID NO: 751891 - protein, 323 aa, Homo sapiens
KAQLQAGDCGGPLRRRGPWLGSRAWEKLPTQMNGATAAWAPWVRTQRPPEDLGWARSWARGCRGLPSSSATSLRMGTRFSAGTEYMDLQNDLGQTALHLAAILGETSTVEKLYAAGAGLCVAERRGHTALHLACRVGAHACARALLQPRPRRPREAPDTYLAQGPDRTPDTNHTPVALYPDSDLEKEEEESEEDWKLQLEAENYEGHTPLHVAVIHKDVEMVRLLRDAGADLDKPEPTCGRSPLHLAVEAQAADVLELLLRAGANPAARMYGGRTPLGSAMLRPNPILARLLRAHGAPEPEGEDEKSGPCSSSSDSDSGDEGG

SEQ ID NO: 751892 - protein, 277 aa, Homo sapiens
DALSYNTQSAPVRALHLAVIHQHEPFLDFLLGFSAGTEYMDLQNDLGQTALHLAAILGETSTVEKLYAAGAGLCVAERRGHTALHLACRVGAHACARALLQPRPRRPREAPDTYLAQGPDRTPDTNHTPVALYPDSDLEKEEEESEEDWKLQLEAENYEGHTPLHVAVIHKDVEMVRLLRDAGADLDKPEPTCGRSPLHLAVEAQAADVLELLLRAGANPAARMYGGRTPLGSAMLRPNPILARLLRAHGAPEPEGEDEKSGPCSSSSDSDSGDEGG

SEQ ID NO: 751893 - protein, 266 aa, Homo sapiens
MWALHLAVIHQHEPFLDFLLGFSAGTEYMDLQNDLGQTALHLAAILGETSTVEKLYAAGAGLCVAERRGHTALHLACRVGAHACARALLQPRPRRPREAPDTYLAQGPDRTPDTNHTPVALYPDSDLEKEEEESEEDWKLQLEAENYEGHTPLHVAVIHKDVEMVRLLRDAGADLDKPEPTCGRSPLHLAVEAQAADVLELLLRAGANPAARMYGGRTPLGSAMLRPNPILARLLRAHGAPEPEGEDEKSGPCSSSSDSDSGDEGG

SEQ ID NO: 751894 - protein, 238 aa, Homo sapiens
MDLQNDLGQTALHLAAILGETSTVEKLYAAGAGLCVAERRGHTALHLACRVGAHACARALLQPRPRRPREAPDTYLAQGPDRTPDTNHTPVALYPDSDLEKEEEESEEDWKLQLEAENYEGHTPLHVAVIHKDVEMVRLLRDAGADLDKPEPTCGRSPLHLAVEAQAADVLELLLRAGANPAARMYGGRTPLGSAMLRPNPILARLLRAHGAPEPEGEDEKSGPCSSSSDSDSGDEGG

SEQ ID NO: 751895 - protein, 338 aa, Homo sapiens
QSPATGGRLRGAPEAAGAMAGVACLGKAADADEWCDSGLGSLGPDAAAPGGPGLGAELGPGLSWAPLVFGYVTEDGDTALHLAVIHQHEPFLDFLLGFSAGTEYMDLQNDLGQTALHLAAILGETSTVEKLYAAGAGLCVAERRGHTALHLACRVGAHACARALLQPRPRRPREAPDTYLAQGPDRTPDTNHTPVALYPDSDLEKEEEESEEDWKLQLEAENYEGHTPLHVAVIHKDVEMVRLLRDAGADLDKPEPTCGRSPLHLAVEAQAADVLELLLRAGANPAARMYGGRTPLGSAMLRPNPILARLLRAHGAPEPEGEDEKSGPCSSSSDMTAA

SEQ ID NO: 751896 - protein, 78 aa, Homo sapiens
QSPATGGRLRGAPEAAGAMAGVACLGKAADADEWCDSGLGSLGPDAAAPGGPGLGAELGPGLSWAPLVFGYVTEDGDT

SEQ ID NO: 751897 - protein, 117 aa, Homo sapiens
RRLRQENHLNLGGGGCSEPDRAMHSSLGNRERLRLKKKRRRKKRKYSNICNCIEHLQGRNHARYIFVCPADSVALYLFANILLCCLLYAKHVTSTPNILTNVHSKTLGKNVIFKSIQ

SEQ ID NO: 751898 - protein, 122 aa, Homo sapiens
STVPAAWEAWPRGPGGHSCLVESEGSLTENIWAFAGISRPCALALLRRDVLGAFLLWPELGASGQWCLSVRTQCGVVPHQVFRNHLGRYCLEHLPAEFPSLEALVENHAVTERSLFCPLDMG

SEQ ID NO: 751899 - protein, 783 aa, Homo sapiens
MRWQCGTRFRGLRPAVAPWTALLALGLPGWVLAVSATAAAVVPEQHASVAGQHPLDWLLTDRGPFHRAQEYADFMERYRQGFTTRYRIYREFARWKVNNLALERKDFFSLPLPLAPEFIRNIRLLGRRPNLQQVTENLIKKYGTHFLLSATLGGEESLTIFVDKQKLGRKTETTGGASIIGGSGNSTAVSLETLHQLAASYFIDRESTLRRLHHIQIATGAIKVTETRTGPLGCSNYDNLDSVSSVLVQSPENKVQLLGLQVLLPEYLRERFVAAALSYITCSSEGELVCKENDCWCKCSPTFPECNCPDADIQAMEDSLLQIQDSWATHNRQFEESEEFQALLKRLPDDRFLNSTAISQFWAMDTSLQHRYQQLGAGLKVLFKKTHRILRRLFNLCKRCHRQPRFRLPKERSLSYWWNRIQSLLYCGESTFPGTFLEQSHSCTCPYDQSSCQGPIPCALGEGPACAHCAPDNSTRCGSCNPGYVLAQGLCRPEVAESLENFLGLETDLQDLELKYLLQKQDSRIEVHSIFISNDMRLGSWFDPSWRKRMLLTLKSNKYKPGLVHVMLALSLQICLTKNSTLEPVMAIYVNPFGGSHSESWFMPVNEGSFPDWERTNVDAAAQCQNWTITLGNRWKTFFETVHVYLRSRIKSLDDSSNETIYYEPLEMTDPSKNLGYMKINTLQVFGYSLPFDPDAIRDLILQLDYPYTQGSQDSALLQLIELRDRVNQLSPPGKVRLDLFSCLLRHRLKLANNEVGRIQSSLRAFNSKLPNPVEYETGKLCS

SEQ ID NO: 751900 - protein, 783 aa, Homo sapiens; identical to SEQ ID NO: 751899

SEQ ID NO: 751901 - protein, 631 aa, Homo sapiens
MGEESLTIFVDKQKLGRKTETTGGASIIGGSGNSTAVSLETLHQLAASYFIDRESTLRRLHHIQIATGAIKVTETRTGPLGCSNYDNLDSVSSVLVQSPENKVQLLGLQVLLPEYLRERFVAAALSYITCSSEGELVCKENDCWCKCSPTFPECNCPDADIQAMEDSLLQIQDSWATHNRQFEESEEFQALLKRLPDDRFLNSTAISQFWAMDTSLQHRYQQLGAGLKVLFKKTHRILRRLFNLCKRCHRQPRFRLPKERSLSYWWNRIQSLLYCGESTFPGTFLEQSHSCTCPYDQSSCQGPIPCALGEGPACAHCAPDNSTRCGSCNPGYVLAQGLCRPEVAESLENFLGLETDLQDLELKYLLQKQDSRIEVHSIFISNDMRLGSWFDPSWRKRMLLTLKSNKYKPGLVHVMLALSLQICLTKNSTLEPVMAIYVNPFGGSHSESWFMPVNEGSFPDWERTNVDAAAQCQNWTITLGNRWKTFFETVHVYLRSRIKSLDDSSNETIYYEPLEMTDPSKNLGYMKINTLQVFGYSLPFDPDAIRDLILQLDYPYTQGSQDSALLQLIELRDRVNQLSPPGKVRLDLFSCLLRHRLKLANNEVGRIQSSLRAFNSKLPNPVEYETGKLCS

SEQ ID NO: 751902 - protein, 156 aa, Homo sapiens
GVPGSRFPRTVTPSTARRDRVPTTLPRESRSAPPHQTRTRSRERPEMSSNDSSLMAGIIYYSQEKYFHHVQQAAAVGLEKFSNDPVLKFFKAYGVLKEGNVLHDAAELLRGPGGGEPDHCDFRELPASPRPEDAAVLSSAGLGADSRNGTQNPRKR

SEQ ID NO: 751903 - protein, 255 aa, Homo sapiens
GVPGSRFPRTVTPSTARRDRVPTTLPRESRSAPPHQTRTRSRERPEMSSNDSSLMAGIIYYSQEKYFHHVQQAAAVGLEKFSNDPVLKFFKAYGVLKEDREAIQELEYSLKEIRKTVSGTALYYAGLFLWLIGRHDKAKEYIDRMLKISRGFREAMYFMMQQNYSEALEVVNQITVTSGSFLPALVLKMQLFLARQDWEQTVEMGHRILEKDESNIDACQILTVHELAREGNMTTVSSLKTQKVILETESRRNPS

SEQ ID NO: 751904 - protein, 333 aa, Homo sapiens
GVPGSRFPRTVTPSTARRDRVPTTLPRESRSAPPHQTRTRSRERPEMSSNDSSLMAGIIYYSQEKYFHHVQQAAAVGLEKFSNDPVLKFFKAYGVLKEEHIQDAISDLESIRHHPDVSLCSTMALIYAHKRCEIIDREAIQELEYSLKEIRKTVSGTALYYAGLFLWLIGRHDKAKEYIDRMLKISRGFREAYVLRGWVDLTSDKPHTAKKAIEYLEQGIQDTKDVLGLMGKAMYFMMQQNYSEALEVVNQITVTSGSFLPALVLKMQLFLARQDWEQTVEMGHRILEKDESNIDACQILTVHELAREGNMTTVSSLKTQKVILETESRRNPS

SEQ ID NO: 751905 - protein, 285 aa, Homo sapiens
GVPGSRFPRTVTPSTARRDRVPTTLPRESRSAPPHQTRTRSRERPEMSSNDSSLMAGIIYYSQEKYFHHVQQAAAVGLEKFSNDPVLKFFKAYGVLKEEHIQDAISDLESIRHHPDVSLCSTMALIYAHKRCEIIDREAIQELEYSLKEIRKTVSGTALYYAGLFLWLIGRHDKAKEYIDRMLKISRGFREAYVLRGWVDLTSDKPHTAKKAIEYLEQGIQDTKDVLGLMGKAMYFMMQQNYSEALEVVNQITVTSGSFLPALVLKMQLFLARQDWEQTVEMGHR

SEQ ID NO: 751906 - protein, 952 aa, Homo sapiens
VLGTRLGCKSAEAGPVGSPRAPALACWPGHLVNMASATAAAARRGLGRALPLLWRGYQTERGVYGYRPRKPESREPQGALERPPVDHGLARLVTVYCEHGHKAAKINPLFTGQALLENVPEIQALVQTLQGPFHTAGLLNMGKEEASLEEVLVYLNQIYCGQISIETSQLQSQDEKDWFAKRFEELQKETFTTEERKHLSKLMLESQEFDHFLATKFSTVKRYGGEGAESMMGFFHELLKMSAYSGITDVIIGMPHRGRLNLLTGLLQFPPELMFRKMRGLSEFPENFSATGDVLSHLTSSVDLYFGAHHPLHVTMLPNPSHLEAVNPVAVGKTRGRQQSRQDGDYSPDNSAQPGDRVICLQVHGDASFCGQGIVPETFTLSNLPHFRIGGSVHLIVNNQLGYTTPAERGRSSLYCSDIGKLVGCAIIHVNGDSPEEVVRATRLAFEYQRQFRKDVIIDLLCYRQWGHNELDEPFYTNPIMYKIIRARKSIPDTYAEHLIAGGLMTQEEVSEIKSSYYAKLNDHLNNMAHYRPPALNLQAHWQGLAQPEAQITTWSTGVPLDLLRFVGMKSVEVPRELQMHSHLLKTHVQSRMEKMMDGIKLDWATAEALALGSLLAQGFNVRLSGQDVGRGTFSQRHAMVVCQETDDTYIPLNHMDPNQKGFLEVSNSPLSEEAVLGFEYGMSIESPKLLPLWEAQFGDFFNGAQIIFDTFISGGEAKWLLQSGIVILLPHGYDGAGPDHSSCRIERFLQMCDSAEEGVDGDTVNMFVVHPTTPAQYFHLLRRQMVRNFRKPLIVASPKMLLRLPAAVSTLQEMAPGTTFNPVIGDSSVDPKKVKTLVFCSGKHFYSLVKQRESLGAKKHDFAIIRVEELCPFPLDSLQQEMSKYKHVKDHIWSQEEPQNMGPWSFVSPRFEKQLACKLRLVGRPPLPVPAVGIGTVHLHQHEDILAKTFA

SEQ ID NO: 751907 - protein, 952 aa, Homo sapiens; identical to SEQ ID NO: 751906

SEQ ID NO: 751908 - protein, 800 aa, Homo sapiens
VLGTRLGVNRPRIETSQLQSQDEKDWFAKRFEELQKETFTTEERKHLSKLMLESQEFDHFLATKFSTVKRYGGEGAESMMGFFHELLKMSAYSGITDVIIGMPHRGRLNLLTGLLQFPPELMFRKMRGLSEFPENFSATGDVLSHLTSSVDLYFGAHHPLHVTMLPNPSHLEAVNPVAVGKTRGRQQSRQDGDYSPDNSAQPGDRVICLQVHGDASFCGQGIVPETFTLSNLPHFRIGGSVHLIVNNQLGYTTPAERGRSSLYCSDIGKLVGCAIIHVNGDSPEEVVRATRLAFEYQRQFRKDVIIDLLCYRQWGHNELDEPFYTNPIMYKIIRARKSIPDTYAEHLIAGGLMTQEEVSEIKSSYYAKLNDHLNNMAHYRPPALNLQAHWQGLAQPEAQITTWSTGVPLDLLRFVGMKSVEVPRELQMHSHLLKTHVQSRMEKMMDGIKLDWATAEALALGSLLAQGFNVRLSGQDVGRGTFSQRHAMVVCQETDDTYIPLNHMDPNQKGFLEVSNSPLSEEAVLGFEYGMSIESPKLLPLWEAQFGDFFNGAQIIFDTFISGGEAKWLLQSGIVILLPHGYDGAGPDHSSCRIERFLQMCDSAEEGVDGDTVNMFVVHPTTPAQYFHLLRRQMVRNFRKPLIVASPKMLLRLPAAVSTLQEMAPGTTFNPVIGDSSVDPKKVKTLVFCSGKHFYSLVKQRESLGAKKHDFAIIRVEELCPFPLDSLQQEMSKYKHVKDHIWSQEEPQNMGPWSFVSPRFEKQLACKLRLVGRPPLPVPAVGIGTVHLHQHEDILAKTFA

SEQ ID NO: 751909 - protein, 675 aa, Homo sapiens
MRGLSEFPENFSATGDVLSHLTSSVDLYFGAHHPLHVTMLPNPSHLEAVNPVAVGKTRGRQQSRQDGDYSPDNSAQPGDRVICLQVHGDASFCGQGIVPETFTLSNLPHFRIGGSVHLIVNNQLGYTTPAERGRSSLYCSDIGKLVGCAIIHVNGDSPEEVVRATRLAFEYQRQFRKDVIIDLLCYRQWGHNELDEPFYTNPIMYKIIRARKSIPDTYAEHLIAGGLMTQEEVSEIKSSYYAKLNDHLNNMAHYRPPALNLQAHWQGLAQPEAQITTWSTGVPLDLLRFVGMKSVEVPRELQMHSHLLKTHVQSRMEKMMDGIKLDWATAEALALGSLLAQGFNVRLSGQDVGRGTFSQRHAMVVCQETDDTYIPLNHMDPNQKGFLEVSNSPLSEEAVLGFEYGMSIESPKLLPLWEAQFGDFFNGAQIIFDTFISGGEAKWLLQSGIVILLPHGYDGAGPDHSSCRIERFLQMCDSAEEGVDGDTVNMFVVHPTTPAQYFHLLRRQMVRNFRKPLIVASPKMLLRLPAAVSTLQEMAPGTTFNPVIGDSSVDPKKVKTLVFCSGKHFYSLVKQRESLGAKKHDFAIIRVEELCPFPLDSLQQEMSKYKHVKDHIWSQEEPQNMGPWSFVSPRFEKQLACKLRLVGRPPLPVPAVGIGTVHLHQHEDILAKTFA

SEQ ID NO: 751910 - protein, 926 aa, Homo sapiens
VLGTRLGCKSAEAGPVGSPRAPALACWPGHLVNMASATAAAARRGLGRALPLLWRGYQTERGVYGYRPRKPESREPQGALERPPVDHGLARLVTVYCEHGHKAAKINPLFTGQALLENVPEIQALVQTLQGPFHTAGLLNMGKEEASLEEVLVYLNQIYCGQISIETSQLQSQDEKDWFAKRFEELQKETFTTEERKHLSKLMLESQEFDHFLATKFSTVKRYGGEGAESMMGFFHELLKMSAYSGITDVIIGMPHRGRLNLLTGLLQFPPELMFRKMRGLSEFPENFSATGDVLSHLTSSVDLYFGAHHPLHVTMLPNPSHLEAVNPVAVGKTRGRQQSRQDGDYSPDNSAQPGDRVICLQVHGDASFCGQGIVPETFTLSNLPHFRIGGSVHLIVNNQLGYTTPAERGRSSLYCSDIGKLVGCAIIHVNGDSPEEVVRATRLAFEYQRQFRKDVIIDLLCYRQWGHNELDEPFYTNPIMYKIIRARKSIPDTYAEHLIAGGLMTQEEVSEIKSSYYAKLNDHLNNMAHYRPPALNLQAHWQGLAQPEAQITTWSTGVPLDLLRFVGMKSVEVPRELQMHSHLLKTHVQSRMEKMMDGIKLDWATAEALALGSLLAQGFNVRLSGQDVGRGTFSQRHAMVVCQETDDTYIPLNHMDPNQKGFLEVSNSPLSEEAVLGFEYGMSIESPKLLPLWEAQFGDFFNGAQIIFDTFISGGEAKWLLQSGIVILLPHGYDGAGPDHSSCRIERFLQMCDSAEEGVDGDTVNMFVVHPTTPAQYFHLLRRQMVRNFRKPLIVASPKMLLRLPAAVSTLQEMAPGTTFNPVIGDSSVDPKKVKTLVFCSGKHFYSLVKQRESLGAKKHDFAIIRVEELCPFPLDSLQQEMSKYKHVKDHIWSQEEPQNMGPWSFVSPRFEKQLACKVITRFLW

SEQ ID NO: 751911 - protein, 101 aa, Homo sapiens
AYFFSAIGRDPPDCVSSPSCFYDEKCGFVGCALSGISTLFLLLIICWCVSVPTALAENDSAVKLRACSDCGGKVAAILDLPHMLSPTLANLGPTKYKSLGG

SEQ ID NO: 751912 - protein, 732 aa, Homo sapiens
VLGTRLGCKSAEAGPVGSPRAPALACWPGHLVNMASATAAAARRGLGRALPLLWRGYQTERGVYGYRPRKPESREPQGALERPPVDHGLARLVTVYCEHGHKAAKINPLFTGQALLENVPEIQALVQTLQGPFHTAGLLNMGKEEASLEEVLVYLNQIYCGQISIETSQLQSQDEKDWFAKRFEELQKETFTTEERKHLSKLMLESQEFDHFLATKFSTVKRYGGEGAESMMGFFHELLKMSAYSGITDVIIGMPHRGRLNLLTGLLQFPPELMFRKMRGLSEFPENFSATGDVLSHLTSSVDLYFGAHHPLHVTMLPNPSHLEAVNPVAVGKTRGRQQSRQDGDYSPDNSAQPGDRVICLQVHGDASFCGQGIVPETFTLSNLPHFRIGGSVHLIVNNQLGYTTPAERGRSSLYCSDIGKLVGCAIIHVNGDSPEEVVRATRLAFEYQRQFRKDVIIDLLCYRQWGHNELDEPFYTNPIMYKIIRARKSIPDTYAEHLIAGGLMTQEEVSEIKSSYYAKLNDHLNNMAHYRPPALNLQAHWQGLAQPEAQITTWSTGVPLDLLRFVGMKSVEVPRELQMHSHLLKTHVQSRMEKMMDGIKLDWATAEALALGSLLAQGFNVRLSGQDVGRGTFSQRHAMVVCQETDDTYIPLNHMDPNQKGFLEVSNSPLSEEAVLGFEYGMSIESPKLLPLWEAQFGDFFNGAQIIFDTFISGEKPSGSYQAAVQTFNCY

SEQ ID NO: 751913 - protein, 385 aa, Homo sapiens
VLGTRLGCKSAEAGPVGSPRAPALACWPGHLVNMASATAAAARRGLGRALPLLWRGYQTERGVYGYRPRKPESREPQGALERPPVDHGLARLVTVYCEHGHKAAKINPLFTGQALLENVPEIQALVQTLQGPFHTAGLLNMGKEEASLEEVLVYLNQIYCGQISIETSQLQSQDEKDWFAKRFEELQKETFTTEERKHLSKLMLESQEFDHFLATKFSTVKRYGGEGAESMMGFFHELLKMSAYSGITDVIIGMPHRGRLNLLTGLLQFPPELMFRKMRGLSEFPENFSATGDVLSHLTSSVDLYFGAHHPLHVTMLPNPSHLEAVNPVAVGKTRGRQQSRQDGDYSPDNSAQPGDRVICLQVLGASEIEARGGENWEECVGWEG

SEQ ID NO: 751914 - protein, 207 aa, Homo sapiens
SGVCAGLGGACAGPVGSRREPVPRPEPRESSEDSAEAAVSPWASPAAAMGIKFLEVIKPFCAVLPEIQKPERKIQFREKVLWTAITLFIFLVCCQIPLFGIMSSDSADPFYWMRVILASNRGTLMELGISPIVTSGLIMQLLAGAKIIEVGDTPKDRALFNGAQKLFGMIITIGQAIVYVMTGMYGDPAEMGAGICLLIIIQLLLLV

SEQ ID NO: 751915 - protein, 952 aa, Homo sapiens; identical to SEQ ID NO: 751906

SEQ ID NO: 751916 - protein, 952 aa, Homo sapiens; identical to SEQ ID NO: 751906

SEQ ID NO: 751917 - protein, 695 aa, Homo sapiens
VLGTRLGCKSAEAGPVGSPRAPALACWPGHLVNMASATAAAARRGLGRALPLLWRGYQTERGVYGYRPRKPESREPQGALERPPVDHGLARLVTVYCEHGHKAAKINPLFTGQALLENVPEIQALVQTLQGPFHTAGLLNMGKEEASLEEVLVYLNQIYCGQISIETSQLQSQDEKDWFAKRFEELQKETFTTEERKHLSKLMLESQEFDHFLATKFSTVKRYGGEGAESMMGFFHELLKMSAYSGITDVIIGMPHRGRLNLLTGLLQFPPELMFRKMRGLSEFPENFSATGDVLSHLTSSVDLYFGAHHPLHVTMLPNPSHLEAVNPVAVGKTRGRQQSRQDGDYSPDNSAQPGDRVICLQVHGDASFCGQGIVPETFTLSNLPHFRIGGSVHLIVNNQLGYTTPAERGRSSLYCSDIGKLVGCAIIHVNGDSPEEVVRATRLAFEYQRQFRKDVIIDLLCYRQWGHNELDEPFYTNPIMYKIIRARKSIPDTYAEHLIAGGLMTQEEVSEIKSSYYAKLNDHLNNMAHYRPPALNLQAHWQGLAQPEAQITTWSTGVPLDLLRFVGMKSVEVPRELQMHSHLLKTHVQSRMEKMMDGIKLDWATAEALALGSLLAQGFNVRLSGQDVGRGTFSQRHAMVVCQETDDTYIPLNHMDPNQKGFLEERPSGSYKAALSSSFHMATMGLGQTTHPVE

SEQ ID NO: 751918 - protein, 1085 aa, Homo sapiens
VLGTRLGCKSAEAGPVGSPRAPALACWPGHLVNMASATAAAARRGLGRALPLLWRGYQTERGVYGYRPRKPESREPQGALERPPVDHGLARLVTVYCEHGHKAAKINPLFTGQALLENVPEIQALVQTLQGPFHTAGLLNMGKEEASLEEVLVYLNQIYCGQISIETSQLQSQDEKDWFAKRFEELQKETFTTEERKHLSKLMLESQEFDHFLATKFSTVKRYGGEGAESMMGFFHELLKMSAYSGITDVIIGMPHRGRLNLLTGLLQFPPELMFRKMRGLSEFPENFSATGDVLSHLTSSVDLYFGAHHPLHVTMLPNPSHLEAVNPVAVGKTRGRQQSRQDGDYSPDNSAQPGDRVICLQVHGDASFCGQGIVPETFTLSNLPHFRIGGSVHLIVNNQLGYTTPAERGRSSLYCSDIGKLVGCAIIHVNGDSPEEVVRATRLAFEYQRQFRKDVIIDLLCYRQWGHNELDEPFYTNPIMYKIIRARKSIPDTYAEHLIAGGLMTQEEVSEIKSSYYAKLNDHLNNMAHYRPPALNLQAHWQGLAQPEAQITTWSTGVPLDLLRFVGMKSVEVPRELQMHSHLLKTHVQSRMEKMMDGIKLDWATAEALALGSLLAQGFNVRLSGQDVGRGTFSQRHAMVVCQETDDTYIPLNHMDPNQKGFLEVSNSPLSEEAVLGFEYGMSIESPKLLPLWEAQFGDFFNGAQIIFDTFISGGEAKWLLQSGIVILLPHGYDGAGPDHSSCRIERFLQMCDSAEEGVDGDTVNMFVVHPTTPAQYFHLLRRQMVRNFRKPLIVASPKMLLRLPAAVSTLQEMAPGTTFNPVIGDSSVDPKKVKTLVFCSGKHFYSLVKQRESLGAKKHDFAIIRVEELCPFPLDSLQQEMSKYKHVKDHIWSQEEPQNMGPWSFVSPRFEKQLACKSNFVEVIKPFCAVLPEIQKPERKIQFREKVLWTAITLFIFLVCCQIPLFGIMSSDSADPFYWMRVILASNRGTLMELGISPIVTSGLIMQLLAGAKIIEVGDTPKDRALFNGAQKLFGMIITIGQAIVYVMTGMYGDPAEMGAGICLLIIIQVRNPIFSYADNKTV

SEQ ID NO: 751919 - protein, 84 aa, Homo sapiens
NSPSTHVPSRALPSKPAEEEEDDDMKEFGELGWIHVMGSSAGWAQTDCGGLRSEQACACVGDKYVMLSPTLANLGPTKYKSLGG

SEQ ID NO: 751920 - protein, 69 aa, Homo sapiens
GQALLENVPEIQALVQTLQGPFHTAGMASAQQAGARSCTPGQAPASVLEEAASPLELRLPQCEETRGAC

SEQ ID NO: 751921 - protein, 98 aa, Homo sapiens
MLFPINIWIFELERNVSIPIGWSYFIGWLVLILYFTCAILCYFNHKSFWSLILSHPSGAVSCSSSFGSVEESPRAQTITDTPITQEGVLDPEQKDTHV

SEQ ID NO: 751922 - protein, 142 aa, Homo sapiens
LGAGRGQAGIWRPRPGLRGPSRASRGAAAGRGAARRKCPLGRSQSRAAGAAMSSWPGREDARAGGAWWPREPLDQELQRAREQKRRRHDAQQLQQLKRLESFYEKPPPGLIKVGIANGTVTEQATKNALSLSKTTKSYNSSE

SEQ ID NO: 751923 - protein, 128 aa, Homo sapiens
MISAHRDLRLPGWHCKWYGHRTGYKECPFFIKDNQKLQQFRVAHEDFMYDIIRDNKQHEKNVRIQQLKQLLEDSTSGEDRSSSSSSEGKEKHKKKKKKEKHKKRKKEKKKKKKRKHKSSKSNEGSDSE

SEQ ID NO: 751924 - protein, 299 aa, Homo sapiens
TWGRPRAGGHLAAEAGTSGPLPGESRGGGGKGRRTEEVPSWPQPEPRRRCRDVVLAGARGCEGWGRVVAAGAAGSGTAAGPGAEAAAARRPAAAAAQAPGVLVSLEQPSGPQSARRPFSGNRGARRRVGRWAGSSKPPGPRQGCGPVRNLVPATGLLVLTGWGARPARPRRGPGGRGAGGRGPRPGEAAAACAPRPRFGVGVASFGEAKSYWRLLGICGPNRQVQPSTLPPRSTSEFPGPLRHGETPFFSSSAMEKGRGHGSCSVGVARPGRRENGRRGLATALLERVSPVARSGGSRL

SEQ ID NO: 751925 - protein, 120 aa, Homo sapiens
LGAGRGQAGIWRPRPGLRGPSRASRGAAAGRGAARRKCPLGRSQSRAAGAAMSSWPGREDARAGGAWWPREPLDQELQRAREQKRRRHDAQQLQQLKRLESLKGLTCGQERWLTPVIPAL

SEQ ID NO: 751926 - protein, 142 aa, Homo sapiens; identical to SEQ ID NO: 751922

SEQ ID NO: 751927 - protein, 170 aa, Homo sapiens
TWGRPRAGGHLAAEAGTSGPLPGESRGGGGKGRRTEEVPSWPQPEPRRRCRDVVLAGARGCEGWGRVVAAGAAGSGTAAGPGAEAAAARRPAAAAAQAPGVLKGSHLWPGAVAHACNPSTLRGRGGQITSYEKPPPGLIKVGIANGTVTEQATKNALSLSKTTKSYNSSE

SEQ ID NO: 751928 - protein, 299 aa, Homo sapiens; identical to SEQ ID NO: 751924

SEQ ID NO: 751929 - protein, 120 aa, Homo sapiens; identical to SEQ ID NO: 751925

SEQ ID NO: 751930 - protein, 299 aa, Homo sapiens; identical to SEQ ID NO: 751924

SEQ ID NO: 751931 - protein, 299 aa, Homo sapiens; identical to SEQ ID NO: 751924

SEQ ID NO: 751932 - protein, 299 aa, Homo sapiens; identical to SEQ ID NO: 751924

SEQ ID NO: 751933 - protein, 125 aa, Homo sapiens
MRKPAAGFLPSLLKVLLLPLAPAAAQDSTQASTPGSPLSPTEYERFFALLTPTWKAETTCRLRATHGCRNPTLVQLDQYENHGLVPDGEGQTRGETEAPRVFTQTSGQKPLCSCEAGKGMAGTTP

SEQ ID NO: 751934 - protein, 543 aa, Homo sapiens
MRKPAAGFLPSLLKVLLLPLAPAAAQDSTQASTPGSPLSPTEYERFFALLTPTWKAETTCRLRATHGCRNPTLVQLDQYENHGLVPDGAVCSNLPYASWFESFCQFTHYRCSNHVYYAKRVLCSQPVSILSPNTLKEIEASAEVSPTTMTSPISPHFTVTERQTFQPWPERLSNNVEELLQSSLSLGGQEQAPEHKQEQGVEHRQEPTQEHKQEEGQKQEEQEEEQEEEGKQEEGQGTKEGREAVSQLQTDSEPKFHSESLSSNPSSFAPRVREVESTPMIMENIQELIRSAQEIDEMNEIYDENSYWRNQNPGSLLQLPHTEALLVLCYSIVENTCIITPTAKAWKYMEEEILGFGKSVCDSLGRRHMSTCALCDFCSLKLEQCHSEASLQRQQCDTSHKTPFVSPLLASQSLSIGNQVGSPESGRFYGLDLYGGLHMDFWCARLATKGCEDVRVSGWLQTEFLSFQDGDFPTKICDTDYIQYPNYCSFKSQQCLMRNRNRKVSRMRCLQNETYSALSPGKSEDVVLRWSQEFSTLTLGQFG

SEQ ID NO: 751935 - protein, 521 aa, Homo sapiens
MRKPAAGFLPSLLKVLLLPLAPAAAQDSTQASTPGSPLSPTEYERFFALLTPTWKAETTCRLRATHGCRNPTLVQLDQYENHGLVPDGAVCSNLPYASWFESFCQFTHYRCSNHVYYAKRVLCSQPVSILSPNTLKEIEASAEVSPTTMTSPISPHFTVTERQTFQPWPERLSNNVEELLQSSLSLGGQEQAPEHKQEQGVEHRQEPTQEHKQEEGQKQEEQEEEQEEEGKQEEGQGTKEGREAVSQLQTDSEPKFHSESLSSNPSSFAPRVREVESTPMIMENIQELIRSAQEIDEMNEIYDENSYWRNQNPGSLLQLPHTEALLVLCYSIVENTCIITPTAKAWKYMEEEILGFGKSVCDSLGRRHMSTCALCDFCSLKLEQCHSEASLQRQQCDTSHKTPFVSPLLASQSLSIGNQVGSPESGRFYGLDLYGGLHMDFWCARLATKGCEDVRVSGWLQTEFLSFQDGDFPTKICDTDYIQYPNYCSFKSQQCLMRNRNRKSWRKQGPPRQLVDNRGGS

SEQ ID NO: 751936 - protein, 517 aa, Homo sapiens
MRKPAAGFLPSLLKVLLLPLAPAAAQDSTQASTPGSPLSPTEYERFFALLTPTWKAETTCRLRATHGCRNPTLVQLDQYENHGLVPDGAVCSNLPYASWFESFCQFTHYRCSNHVYYAKRVLCSQPVSILSPNTLKEIEASAEVSPTTMTSPISPHFTVTERQTFQPWPERLSNNVEELLQSSLSLGGQEQAPEHKQEQGVEHRQEPTQEHKQEEGQKQEEQEEEQEEEGKQEEGQGTKEGREAVSQLQTDSEPKFHSESLSSNPSSFAPRVREVESTPMIMENIQELIRSAQEIDEMNEIYDENSYWRNQNPGSLLQLPHTEALLVLCYSIVENTCIITPTAKAWKYMEEEILGFGKSVCDSLGRRHMSTCALCDFCSLKLEQCHSEASLQRQQCDTSHKTPFVSPLLASQSLSIGNQVGSPESGRFYGLDLYAGILYDIGIEPGPRERTARTVDCIVPAPERVLYRDRMRMALNARGCRHRVSQGKDADMVVSGQDAELVSAGESRRVGSSSTDM

SEQ ID NO: 751937 - protein, 580 aa, Homo sapiens
MRKPAAGFLPSLLKVLLLPLAPAAAQDSTQASTPGSPLSPTEYERFFALLKVLLLPLAPAAAQDSTQASTPGSPLSPTEYERFFALLTPTWKAETTCRLRATHGCRNPTLVQLDQYENHGLVPDGAVCSNLPYASWFESFCQFTHYRCSNHVYYAKRVLCSQPVSILSPNTLKEIEASAEVSPTTMTSPISPHFTVTERQTFQPWPERLSNNVEELLQSSLSLGGQEQAPEHKQEQGVEHRQEPTQEHKQEEGQKQEEQEEEQEEEGKQEEGQGTKEGREAVSQLQTDSEPKFHSESLSSNPSSFAPRVREVESTPMIMENIQELIRSAQEIDEMNEIYDENSYWRNQNPGSLLQLPHTEALLVLCYSIVENTCIITPTAKAWKYMEEEILGFGKSVCDSLGRRHMSTCALCDFCSLKLEQCHSEASLQRQQCDTSHKTPFVSPLLASQSLSIGNQVGSPESGRFYGLDLYGGLHMDFWCARLATKGCEDVRVSGWLQTEFLSFQDGDFPTKICDTDYIQYPNYCSFKSQQCLMRNRNRKVSRMRCLQNETYSALSPGKSEDVVLRWSQEFSTLTLGQFG

SEQ ID NO: 751938 - protein, 521 aa, Homo sapiens; identical to SEQ ID NO: 751935

SEQ ID NO: 751939 - protein, 518 aa, Homo sapiens
MRKPAAGFLPSLLKVLLLPLAPAAAQDSTQASTPGSPLSPTEYERFFALLTPTWKAETTCRLRATHGCRNPTLVQLDQYENHGLVPDGAVCSNLPYASWFESFCQFTHYRCSNHVYYAKRVLCSQPVSILSPNTLKEIEASAEVSPTTMTSPISPHFTVTERQTFQPWPERLSNNVEELLQSSLSLGGQEQAPEHKQEQGVEHRQEPTQEHKQEEGQKQEEQEEEQEEEGKQEEGQGTKEGREAVSQLQTDSEPKFHSESLSSNPSSFAPRVREVESTPMIMENIQELIRSAQEIDEMNEIYDENSYWRNQNPGSLLQLPHTEALLVLCYSIVENTCIITPTAKAWKYMEEEILGFGKSVCDSLGRRHMSTCALCDFCSLKLEQCHSEASLQRQQCDTSHKTPFVSPLLASQSLSIGNQVGSPESGRFYGLDLYGGLHMDFWCARLATKGCEDVRVSGWLQTEFLSFQDGDFPTKICDTDYIQYPNYCSFKSQQCLMRNRNRKVSTPALPLLLPAPPQ

SEQ ID NO: 751940 - protein, 520 aa, Homo sapiens
AGTGPEFWGSPGSPLSPTEYERFFALLTPTWKAETTCRLRATHGCRNPTLVQLDQYENHGLVPDGAVCSNLPYASWFESFCQFTHYRCSNHVYYAKRVLCSQPVSILSPNTLKEIEASAEVSPTTMTSPISPHFTVTERQTFQPWPERLSNNVEELLQSSLSLGGQEQAPEHKQEQGVEHRQEPTQEHKQEEGQKQEEQEEEQEEEGKQEEGQGTKEGREAVSQLQTDSEPKFHSESLSSNPSSFAPRVREVESTPMIMENIQELIRSAQEIDEMNEIYDENSYWRNQNPGSLLQLPHTEALLVLCYSIVENTCIITPTAKAWKYMEEEILGFGKSVCDSLGRRHMSTCALCDFCSLKLEQCHSEASLQRQQCDTSHKTPFVSPLLASQSLSIGNQVGSPESGRFYGLDLYGGLHMDFWCARLATKGCEDVRVSGWLQTEFLSFQDGDFPTKICDTDYIQYPNYCSFKSQQCLMRNRNRKVSRMRCLQNETYSALSPGKSEDVVLRWSQEFSTLTLGQFG

SEQ ID NO: 751941 - protein, 425 aa, Homo sapiens
MRVLCSQPVSILSPNTLKEIEASAEVSPTTMTSPISPHFTVTERQTFQPWPERLSNNVEELLQSSLSLGGQEQAPEHKQEQGVEHRQEPTQEHKQEEGQKQEEQEEEQEEEGKQEEGQGTKEGREAVSQLQTDSEPKFHSESLSSNPSSFAPRVREVESTPMIMENIQELIRSAQEIDEMNEIYDENSYWRNQNPGSLLQLPHTEALLVLCYSIVENTCIITPTAKAWKYMEEEILGFGKSVCDSLGRRHMSTCALCDFCSLKLEQCHSEASLQRQQCDTSHKTPFVSPLLASQSLSIGNQVGSPESGRFYGLDLYGGLHMDFWCARLATKGCEDVRVSGWLQTEFLSFQDGDFPTKICDTDYIQYPNYCSFKSQQCLMRNRNRKVSRMRCLQNETYSALSPGKSEDVVLRWSQEFSTLTLGQFG

SEQ ID NO: 751942 - protein, 423 aa, Homo sapiens
MAQAVWSRLGRILWLACLLPWAPAGVAAGLYELNLTTDSPATTGAVVTISASLVAKDNGSLALPADAHLYRFHWIHTPLVLTGKMEKGLSSTIRVVGHVPGEFPVSVWVTAADCWMCQPVARGFVVLPITEFLVGDLVVTQNTSLPWPSSYLTKTVLKVSFLLHDPSNFLKTALFLYSWDFGDGTQMVTEDSVVYYNYSIIGTFTVKLKVVAEWEEVEPDATRAVKQKTGDFSASLKLQETLRGIQVLGPTLIQTFQKMTVTLNFLGSPPLTVCWRLKPECLPLEEGECHPVSVASTAYNLTHTFRDPGDYCFSIRAENIISKTHQYHKIQVWPSRIQPAVFAFPCATLITVMLAFIMYMTLRNATQQKDMVENPEPPSGVRCCCQMCCGPFLLETPSEYLEIVRENHGLLPPLYKSVKTYTV

SEQ ID NO: 751943 - protein, 423 aa, Homo sapiens; identical to SEQ ID NO: 751942

SEQ ID NO: 751944 - protein, 373 aa, Homo sapiens
RRASPGEDERARRPHLPAPPALRARRSDRRSSRAPAAFPPRPPHASPAPGPAMAQAVWSRLGRILWLACLLPWAPAGVAAEFLVGDLVVTQNTSLPWPSSYLTKTVLKVSFLLHDPSNFLKTALFLYSWDFGDGTQMVTEDSVVYYNYSIIGTFTVKLKVVAEWEEVEPDATRAVKQKTGDFSASLKLQETLRGIQVLGPTLIQTFQKMTVTLNFLGSPPLTVCWRLKPECLPLEEGECHPVSVASTAYNLTHTFRDPGDYCFSIRAENIISKTHQYHKIQVWPSRIQPAVFAFPCATLITVMLAFIMYMTLRNATQQKDMVENPEPPSGVRCCCQMCCGPFLLETPSEYLEIVRENHGLLPPLYKSVKTYTV

SEQ ID NO: 751945 - protein, 221 aa, Homo sapiens
MLFSLKYLGMTLVEQPKGEELSAAAIKRIVATAKASGKKLQKVTLKVSPRGIILTDNLTNQLIENVSIYRISYCTADKMHDKVFAYIAQSQHNQSLECHAFLCTKRKMAQAVTLTVAQAFKVAFEFWQVSKEEKEKRDKASQEGGDVLGARQDCTPPLKSLVATGNLLDLEETAKAPLSTVSANTTNMDEVPRPQALSGSSVVWVSGCVASRSVILSLTSG

SEQ ID NO: 751946 - protein, 328 aa, Homo sapiens
GKFFLTEFWLRQRRRRPERAMDALKSAGRALIRSPSLAKQSWGGGGRHRKLPENWTDTRETLLEGMLFSLKYLGMTLVEQPKGEELSAAAIKRIVATAKASGKKLQKVTLKVSPRGIILTDNLTNQLIENVSIYRISYCTADKMHDKVFAYIAQSQHNQSLECHAFLCTKRKMAQAVTLTVAQAFKVAFEFWQVSKEEKEKRDKASQEGGDVLGARQDCTPPLKSLVATGNLLDLEETAKAPLSTVSANTTNMDEVPRPQALSGSSVVWELDDGLDEAFSRLAQSRTNPQVLDTGLTAQDMHYAQCLSPVDWDKPDSSGTEQDDLFSF

SEQ ID NO: 751947 - protein, 122 aa, Homo sapiens
MLCLGPAEKEKRDKASQEGGDVLGARQDCTPPLKSLVATGNLLDLEETAKAPLSTVSANTTNMDEVPRPQALSGSSVVWVSGCVASRSACPVSDKPSGPGHWPDSPGHALRPVPLACRLGQA

SEQ ID NO: 751948 - protein, 328 aa, Homo sapiens; identical to SEQ ID NO: 751946

SEQ ID NO: 751949 - protein, 328 aa, Homo sapiens; identical to SEQ ID NO: 751946

SEQ ID NO: 751950 - protein, 221 aa, Homo sapiens; identical to SEQ ID NO: 751945

SEQ ID NO: 751951 - protein, 328 aa, Homo sapiens; identical to SEQ ID NO: 751946

SEQ ID NO: 751952 - protein, 151 aa, Homo sapiens
PHSPLWKTLCSPSSGVCCGFVTLFCNDRFACLFQLTPPPSPAWMTAAASLLASLLPALPPLNLQDAKFVEERRKQLQNYLRSVMNKVIQMVPEFAASPKKETLIQLMPFFVDITPPGEPVNSRPKAASRFPKLSRGQPRETRNVEPQSGDL

SEQ ID NO: 751953 - protein, 182 aa, Homo sapiens
PHSPLWKTLCSPSSGVCCGFVTLFCNDRFACLFQLTPPPSPAWMTAAASLLASLLPALPPLNLQDAKFVEERRKQLQNYLRSVMNKVIQMVPEFAASPKKETLIQLMPFFVYSTAPTDMGRQPCQHFFLGRFGRSGSTAALRDALIAMGPRRTPGAVPGAKVEVGSQRFGASKGMGREQACK

SEQ ID NO: 751954 - protein, 119 aa, Homo sapiens
YTEFRSLHHKLQNKYPQVRAYNFPPKKAIGNKDAKFVEERRKQLQNYLRSVMNKVIQMVPEFAASPKKETLIQLMPFFVDITPPGEPVNSRPKAASRFPKLSRGQPRETRNVEPQSGDL

SEQ ID NO: 751955 - protein, 175 aa, Homo sapiens
PHSPLWKTLCSPSSGVCCGFVTLFCNDRFACLFQLTPPPSPAWMTAAASLLASLLPALPPLNLQDAKFVEERRKQLQNYLRSVMNKVIQMVPEFAASPKKETLIQLMPFFVMGLQVGMYGLFHFGVMMDQPQPSLTRADESPCDRVLSPCAAHRKQRDCCLSWKAEPERFLVKKK

SEQ ID NO: 751956 - protein, 123 aa, Homo sapiens
PIPVGERSESFSGARVWFVVRSSAMSSQQSAVSAKGFSKGSSQGPAPCPAPAPTPAPASSSSCCGSGRGCCGDSGCCGSSSTSCCCFPRRRRRQRSSGCCCCGGGSQRSQRSNNRSSGCCSGC

SEQ ID NO: 751957 - protein, 717 aa, Homo sapiens
CLSSPPVSAVEVATEGRDREVAKVGQRFCDTTSGELRQARDRDCCVRMPAPVGRRSPPSPRSSMAAVALRDSAQGMTFEDVAIYFSQEEWELLDESQRFLYCDVMLENFAHVTSLGYCHGMENEAIASEQSVSIQVRTSKGNTPTQKTHLSEIKMCVPVLKDILPAAEHQTTSPVQKSYLGSTSMRGFCFSADLHQHQKHYNEEEPWKRKVDEATFVTGCRFHVLNYFTCGEAFPAPTDLLQHEATPSGEEPHSSSSKHIQAFFNAKSYYKWGEYRKASSHKHTLVQHQSVCSEGGLYECSKCEKAFTCKNTLVQHQQIHTGQKMFECSECEESFSKKCHLILHKIIHTGERPYECSDREKAFIHKSEFIHHQRRHTGGVRHECGECRKTFSYKSNLIEHQRVHTGERPYECGECGKSFRQSSSLFRHQRVHSGERPYQCCECGKSFRQIFNLIRHRRVHTGEMPYQCSDCGKSFSCKSELIQHQRIHSGERPYECRECGKSFRQFSNLIRHRSIHTGDRPYECSECEKSFSRKFILIQHQRVHTGERPYECSECGKSFTRKSDLIQHRRIHTGTRPYECSECGKSFRQRSGLIQHRRLHTGERPYECSECGKSFSQSASLIQHQRVHTGERPYECSECGKSFSQSSSLIQHQRGHTGERPYECSQCGKPFTHKSDLIQHQRVHTGERPYECSECGKSFSRKSNLIRHRRVHTEERP

SEQ ID NO: 751958 - protein, 121 aa, Homo sapiens
CLSSPPVSAVEVATEGRDREVAKVGQRFCDTTSGELRQARDRDCCVRMPAPVGRRSPPSPRSSMAAVALRDSAQGMTFEDVAIYFSQEEWELLDESQRFLYCDVMLENFAHVTSLDQATNI

SEQ ID NO: 751959 - protein, 603 aa, Homo sapiens
EELGWLEVLGCYKIVRRVSIQVRTSKGNTPTQKTHLSEIKMCVPVLKDILPAAEHQTTSPVQKSYLGSTSMRGFCFSADLHQHQKHYNEEEPWKRKVDEATFVTGCRFHVLNYFTCGEAFPAPTDLLQHEATPSGEEPHSSSSKHIQAFFNAKSYYKWGEYRKASSHKHTLVQHQSVCSEGGLYECSKCEKAFTCKNTLVQHQQIHTGQKMFECSECEESFSKKCHLILHKIIHTGERPYECSDREKAFIHKSEFIHHQRRHTGGVRHECGECRKTFSYKSNLIEHQRVHTGERPYECGECGKSFRQSSSLFRHQRVHSGERPYQCCECGKSFRQIFNLIRHRRVHTGEMPYQCSDCGKSFSCKSELIQHQRIHSGERPYECRECGKSFRQFSNLIRHRSIHTGDRPYECSECEKSFSRKFILIQHQRVHTGERPYECSECGKSFTRKSDLIQHRRIHTGTRPYECSECGKSFRQRSGLIQHRRLHTGERPYECSECGKSFSQSASLIQHQRVHTGERPYECSECGKSFSQSSSLIQHQRGHTGERPYECSQCGKPFTHKSDLIQHQRVHTGERPYECSECGKSFSRKSNLIRHRRVHTEERP

SEQ ID NO: 751960 - protein, 597 aa, Homo sapiens
MENEAIASEQSVSIQVRTSKGNTPTQKTHLSEIKMCVPVLKDILPAAEHQTTSPVQKSYLGSTSMRGFCFSADLHQHQKHYNEEEPWKRKVDEATFVTGCRFHVLNYFTCGEAFPAPTDLLQHEATPSGEEPHSSSSKHIQAFFNAKSYYKWGEYRKASSHKHTLVQHQSVCSEGGLYECSKCEKAFTCKNTLVQHQQIHTGQKMFECSECEESFSKKCHLILHKIIHTGERPYECSDREKAFIHKSEFIHHQRRHTGGVRHECGECRKTFSYKSNLIEHQRVHTGERPYECGECGKSFRQSSSLFRHQRVHSGERPYQCCECGKSFRQIFNLIRHRRVHTGEMPYQCSDCGKSFSCKSELIQHQRIHSGERPYECRECGKSFRQFSNLIRHRSIHTGDRPYECSECEKSFSRKFILIQHQRVHTGERPYECSECGKSFTRKSDLIQHRRIHTGTRPYECSECGKSFRQRSGLIQHRRLHTGERPYECSECGKSFSQSASLIQHQRVHTGERPYECSECGKSFSQSSSLIQHQRGHTGERPYECSQCGKPFTHKSDLIQHQRVHTGERPYECSECGKSFSRKSNLIRHRRVHTEERP

SEQ ID NO: 751961 - protein, 157 aa, Homo sapiens
TYTISLFSVSPLRNYIFLPAKVGGNLCADNTHSSSPIAGFEGNLARNTASESSLPAAAPGRAGGPEPRSLTRVSDPLSLKESENSAQTPWTVQCGREQPRERSTKHSLMSEEEEERSMGRQAFSMAQKRILEASSCIKTGKGHLFQPVYHNKPPTRR

SEQ ID NO: 751962 - protein, 109 aa, Homo sapiens
MQLRARMYFPFEVLLEICALKHGNFGFEGNLARNTASESSLPAAAPGRAGGPEPRSLTRVSDPLSLKESENSAQTPWTVQCGREQPRERSTKHSLMSEEEEERSMGRGI

SEQ ID NO: 751963 - protein, 148 aa, Homo sapiens
MDKNVISVKIMEEKRDESTGVIYRKRIAICQNVVPEILRKVSILKVPNIQLEEESWLNPRERNMAIRSHCLTWTQYASMKEESVFRESMENPNWTEFIQRGRISITGVGFLNCVLETFASTFLRQGAQKGIRIMEMLLKEQCGAPLAE

SEQ ID NO: 751964 - protein, 148 aa, Homo sapiens; identical to SEQ ID NO: 751963

SEQ ID NO: 751965 - protein, 132 aa, Homo sapiens
QLPPLGSRRARGSAVSEDASGCVWLLPASGLMPASTSVKTPCPCILPQPGLSVHERRREGGAVAGGSAESPLATMWGTQEQTPATHRAPVSQHRPCAWLQHSSTVSLPSHCMRRPRPGVCFPLGTSWGGNAG

SEQ ID NO: 751966 - protein, 37 aa, Homo sapiens
MRVGFCYQIRRCTDDVRPQGEAQAWGLQSRGWKPGTG

SEQ ID NO: 751967 - protein, 2816 aa, Homo sapiens
AASRGHAMTLEGLYLARGPLARLLLAWSALLCMAGGQGRWDGALEAAGPGRVRRRGSPGILQGPNVCGSRFHAYCCPGWRTFPGRSQCVVPICRRACGEGFCSQPNLCTCADGTLAPSCGVSRGSGCSVSCMNGGTCRGASCLCQKGYTGTVCGQPICDRGCHNGGRCIGPNRCACVYGFMGPQCERDYRTGPCFGQVGPEGCQHQLTGLVCTKALCCATVGRAWGLPCELCPAQPHPCRRGFIPNIHTGACQDVDECQAVPGLCQGGSCVNMVGSFHCRCPVGHRLSDSSAACEDYRAGACFSVLFGGRCAGDLAGHYTRRQCCCDRGRCWAAGPVPELCPPRGSNEFQQLCAQRLPLLPGHPGLFPGLLGFGSNGMGPPLGPARLNPHGSDARGIPSLGPGNSNIGTATLNQTIDICRHFTNLCLNGRCLPTPSSYRCECNVGYTQDVRGECIDVDECTSSPCHHGDCVNIPGTYHCRCYPGFQATPTRQACVDVDECIVSGGLCHLGRCVNTEGSFQCVCNAGFELSPDGKNCVDHNECATSTMCVNGVCLNEDGSFSCLCKPGFLLAPGGHYCMDIDECQTPGICVNGHCTNTEGSFRCQCLGGLAVGTDGRVCVDTHVRSTCYGAIEKGSCARPFPGTVTKSECCCANPDHGFGEPCQLCPAKNSAEFQALCSSGLGITTDGRDINECALDPEVCANGVCENLRGSYRCVCNLGYEAGASGKDCTDVDECALNSLLCDNGWCQNSPGSYSCSCPPGFHFWQDTEICKDVDECLSSPCVSGVCRNLAGSYTCKCGPGSRLDPSGTFCLDSTKGTCWLKIQESRCEVNLQGASLRSECCATLGAAWGSPCERCEIDPACARGFARMTGVTCDDVNECESFPGVCPNGRCVNTAGSFRCECPEGLMLDASGRLCVDVRLEPCFLRWDEDECGVTLPGKYRMDVCCCSIGAVWGVECEACPDPESLEFASLCPRGLGFASRDFLSGRPFYKDVNECKVFPGLCTHGTCRNTVGSFHCACAGGFALDAQERNCTDIDECRISPDLCGQGTCVNTPGSFECECFPGYESGFMLMKNCMDVDECARDPLLCRGGTCTNTDGSYKCQCPPGHELTAKGTACEDIDECSLSDGLCPHGQCVNVIGAFQCSCHAGFQSTPDRQGCVDINECRVQNGGCDVHCINTEGSYRCSCGQGYSLMPDGRACADVDECEENPRVCDQGHCTNMPGGHRCLCYDGFMATPDMRTCVDVDECDLNPHICLHGDCENTKGSFVCHCQLGYMVRKGATGCSDVDECEVGGHNCDSHASCLNIPGSFSCRCLPGWVGDGFECHDLDECISQEHRCSPRGDCLNVPGSYRCTCRQGFAGDGFFCEDRDECAENVDLCDNGQCLNAPGGYRCECEMGFDPTEDHRACQDVDECAQGNLCAFGSCENLPGMFRCICNGGYELDRGGGNCTDINECADPVNCINGVCINTPGSYLCSCPQDFELNPSGVGCVDTRAGNCFLETHDRGDSGISCSAEIGVGVTRASCCCSLGRAWGNPCELCPMANTTEYRTLCPGGEGFQPNRITVILEDIDECQELPGLCQGGDCVNTFGSFQCECPPGYHLSEHTRICEDIDECSTHSGICGPGTCYNTLGNYTCVCPAEYLQVNGGNNCMDMRKSVCFRHYNGTCQNELAFNVTRKMCCCSYNIGQAWNRPCEACPTPISPDYQILCGNQAPGFLTDIHTGKPLDIDECGEIPAICANGICINQIGSFRCECPAGFNYNSILLACEDVDECGSRESPCQQNADCINIPGSYRCKCTRGYKLSPGGACVGQNECREIPNVCSHGDCMDTEGSYMCLCHRGFQASADQTLCMDIDECDRQPCGNGTCKNIIGSYNCLCFPGFVVTHNGDCVDFDECTTLVGQVCRFGHCLNTAGSFHCLCQDGFELTADGKNCVDTNECLSLAGTCLPGTCQNLEGSFRCICPPGFQVQSDHCIDIDECSEEPNLCLFGTCTNSPGSFQCLCPPGFVLSDNGHRCFDTRQSFCFTRFEAGKCSVPKAFNTTKTRCCCSKRPGEGWGDPCELCPQEGSAAFQELCPFGHGAVPGPDDSREDVNECAENPGVCTNGVCVNTDGSFRCECPFGYSLDFTGINCVDTDECSVGHPCGQGTCTNVIGGFECACADGFEPGLMMTCEDIDECSLNPLLCAFRCHNTEGSYLCTCPAGYTLREDGAMCRDVDECADGQQDCHARGMECKNLIGTFACVCPPGMRPLPGSGEGCTDDNECHAQPDLCVNGRCVNTAGSFRCDCDEGFQPSPTLTECHDIRQGPCFAEVLQTMCRSLSSSSEAVTRAECCCGGGRGWGPRCELCPLPGTSAYRKLCPHGSGYTAEGRDVDECRMLAHLCAHGECINSLGSFRCHCQAGYTPDATATTCLDMDECSQVPKPCTFLCKNTKGSFLCSCPRGYLLEEDGRTCKDLDECTSRQHNCQFLCVNTVGAFTCRCPPGFTQHHQACFDNDECSAQPGPCGAHGHCHNTPGSFRCECHQGFTLVSSGHGCEDVNECDGPHRCQHGCQNQLGGYRCSCPQGFTQHSQWAQCVDENECALSPPTCGSASCRNTLGGFRCVCPSGFDFDQALGGCQDVDECAGRRGPCSYSCANTPGGFLCGCPQGYFRAGQGHCVSGLGFSPGPQDTPDKEELLSSEACYECKINGLSPRDRPRRSAHRDHQVNLATLDSEALLTLGLNLSHLGRAERILELRPALEGLEGRIRYVIVRGNEQGFFRMHHLRGVSSLQLGRRRPGPGTYRLEVVSHMAGPWGVQPEGQPGPWGQALRLKVQLQLL

SEQ ID NO: 751968 - protein, 111 aa, Homo sapiens
GRGAGATEVLPTKATAVHLQPQGLPRPLPGPLCQPRGPPSYSVFPGDSKKLQCAIPLPPQPRSGRGPVVTVSGQSQAFTSVLHCGLPWRGAGGWQDMAMGNWGGHRAYSSE

SEQ ID NO: 751969 - protein, 691 aa, Homo sapiens
MEGICWWCQIRNLATSFHWTPSAPPITPRESDNPSPAVPVVLSLSPCPGARIATGRACPGALSDHTVIAGVGPSPKEPPASWLAQGPFFLLFTDTNECLSLAGTCLPGTCQNLEGSFRCICPPGFQVQSDHCIDIDECSEEPNLCLFGTCTNSPGSFQCLCPPGFVLSDNGHRCFDTRQSFCFTRFEAGKCSVPKAFNTTKTRCCCSKRPGEGWGDPCELCPQEGSAAFQELCPFGHGAVPGPDDSREDVNECAENPGVCTNGVCVNTDGSFRCECPFGYSLDFTGINCVDTDECSVGHPCGQGTCTNVIGGFECACADGFEPGLMMTCEDIDECSLNPLLCAFRCHNTEGSYLCTCPAGYTLREDGAMCRDVDECADGQQDCHARGMECKNLIGTFACVCPPGMRPLPGSGEGCTDDNECHAQPDLCVNGRCVNTAGSFRCDCDEGFQPSPTLTECHDIRQGPCFAEVLQTMCRSLSSSSEAVTRAECCCGGGRGWGPRCELCPLPGTSAYRKLCPHGSGYTAEGRDVDECRMLAHLCAHGECINSLGSFRCHCQAGYTPDATATTCLDMDECSQVPKPCTFLCKNTKGSFLCSCPRGYLLEEDGRTCKDLDECTSRQHNCQFLCVNTVGAFTCRCPPGFTQHHQACFDVNECDGPHRCQHGCQNQLGGYRCSCPQGFTQHSQWAQCVGE

SEQ ID NO: 751970 - protein, 120 aa, Homo sapiens
SAISEDGTCCPQCHWPKTFSITPDALALGSLSFLSPRTLFNVSAGLGCIRDCREYGWSTWVDLHMAILYMCPSASLAASPFVCLFLGSASAGGAGSILNLMESRRPRTQRSRLPCRVFLE

SEQ ID NO: 751971 - protein, 108 aa, Homo sapiens
LYGFFFKIKGLKHDTTSYSFYMQRIKHTDLESPSAVYEHNHVSLRAARLVKYEIRAEALVDGKWQEFRTNQIKQKFGLTTSSCKSHTLKIQTVGIPIYVSFAFIFPAS

SEQ ID NO: 751972 - protein, 563 aa, Homo sapiens
MGSLSNYALLQLTLTAFLTILVQPQHLLAPVFRTLSILTNQSNCWLCEHLDNAEQPELVFVPASASTWWTYSGQWMYERVWYPQAEVQNHSTSSYRKVTWHWEASMEAQGLSFAQVRLLEGNFSLCVENKNGSGPFLGNIPKQYCNQILWFDSTDGTFMPSIDVTNESRNDDDDTSVCLGTRQCSWFAGCTNRTWNSSAVPLIGLPNTQDYKWVDRNSGLTWSGNDTCLYSCQNQTKGLLYQLFRNLFCSYGLTEAHGKWRCADASITNDKGHDGHRTPTWWLTGSNLTLSVNNSGLFFLCGNGVYKGFPPKWSGRCGLGYLVPSLTRYLTLNASQITNLRSFIHKVTPHRCTQGDTDNPPLYCNPKDNSTIRALFPSLGTYDLEKAILNISKAMEQEFSATKQTLEAHQSKVSSLASASRKDHVLDIPTTQRQTACGTVGKQCCLYINYSEEIKSNIQRLHEASENLKNVPLLDWQGIFAKVGDWFRSWGYVLLIVLFCLFIFVLIYVRVFRKSRRSLNSQPLNLALSPQQSAQLLVSETSCQVSNRAMKGLTTHQYDTSLL

SEQ ID NO: 751973 - protein, 104 aa, Homo sapiens
VQARAESSGSEFAIRERDPRSLGPSSLPSCGLPLSSGAAPAAPWRRPREGPAPIRTPDPGGQQRDGPWVPGEETSPSRREYGLDRGHEGGRGREWRVAQLARVV

SEQ ID NO: 751974 - protein, 104 aa, Homo sapiens; identical to SEQ ID NO: 751973

SEQ ID NO: 751975 - protein, 104 aa, Homo sapiens; identical to SEQ ID NO: 751973

SEQ ID NO: 751976 - protein, 104 aa, Homo sapiens; identical to SEQ ID NO: 751973

SEQ ID NO: 751977 - protein, 135 aa, Homo sapiens [sequence omitted]

SEQ ID NO: 751978 - protein, 101 aa, Homo sapiens
FLYFRHGSGMVSLVQLLRRSDLWIEGSRKIKSERIKVQSLQSHKPSVWASKFSLLFFVLRQGLTVSPRLEYSGTVTARCSLNVLGSSDPPSLASQLSLARS

SEQ ID NO: 751979 - protein, 113 aa, Homo sapiens
SCLPKVTRADSGRWPPGWAGPLPPSVRVVLRSSPQPVGGAGGAGETARVGARSGRARPGGRPVGSVARPSLGLQFAFPESANLSMSTSRPCKLRASTLGRVWWSLCHQKCASV

SEQ ID NO: 751980 - protein, 215 aa, Homo sapiens
MHRDAWLPRPAFSLTGLSLFFSLVPPGRSMEVTVPATLNVLNGSDARLPCTFNSCYTVNHKQFSLNWTYQECNNCSEEMFLQFRMKIINLKLERFQDRVEFSGNPSKYDVSVMLRNVQPEDEGIYNCYIMNPPDRHRGHGKIHLQVLMEEPPERDSTVAVIVGASVGGFLAVVILVLMVVKCVRRKKEQKLSTDDLKTEEEGKTDGEGNPDDGAK

SEQ ID NO: 751981 - protein, 448 aa, Homo sapiens
MAHVGDCTQTPWLPVLVVSLMCSARAEYSNCGENEYYNQTTGLCQECPPCGPGEEPYLSCGYGTKDEDYGCVPCPAEKFSKGGYQICRRHKDCEGFFRATVLTPGDMENDAECGPCLPGYYMLENRPRNIYGMVCYSCLLAPPNTKECVGATSGASANFPGTSGSSTLSPFQHAHKELSGQGHLATALIIAMSTIFIMAIAIVLIIMFYILKTKPSAPACCTSHPGKSVEAQVSKDEEKKEAPDNVVMFSEKDEFEKLTATPAKPTKSENDASSENEQLLSRSVDSDEEPAPDKQGSPELCLLSLVHLAREKSATSNKSAGIQSRRKKILDVYANVCGVVEGLSPTELPFDCLEKTSRMLSSTYNSEKAVVKTWRHLAESFGLKRDEIGGMTDGMQLFDRISTAGYSIPELLTKLVQIERLDAVESLCADILEWAGVVPPASQPHAAS

SEQ ID NO: 751982 - protein, 110 aa, Homo sapiens
AQRGSPCSESHSGTCISILTRGLPGSLSHVQGRPTLGQDRGLALPVWTSLLPRWPGIPEDTSMNTLQIAQVMDPCTLKDGLIGPGTVAGDDRHESLWFSHHLGVFKRLPC

SEQ ID NO: 751983 - protein, 769 aa, Homo sapiens
GDPFAYPGAGGLYKRGSVRSLSTYSAAALQSDLEDSLYKAAGGGGPLYGDGYGFRLPPSSPQKLADVAAPPGGPPPPHSPYSGPPSRGSPVRQSFRKDSGSSSVFAESPGGKTRSAGSASTAGAPPSELFPGPGERSLVGFGPPVPAKDTETRERMEAMEKQIASLTGLVQSALLRGSEPETPSEKIEGSNGAATPSAPCGSGGRSSGATPVSGPPPPSASSTPAGQPTAVSRLQMQLHLRGLQNSASDLRGQLQQLRKLQLQNQESVRALLKRTEAELSMRVSEAARRQEDPLQRQRTLVEEERLRYLNDEELITQQLNDLEKSVEKIQRDVSHNHRLVPGPELEEKALVLKQLGETLTELKAHFPGLQSKMRVVLRVEVEAVKFLKEEPQRLDGLLKRCRGVTDTLAQIRRQVDEGVWPPPNNLLSQSPKKVTAETDFNKSVDFEMPPPSPPLNLHELSGPAEGASLTPKGGNPTKGLDTPGKRSVDKAVSVEAAERDWEEKRAALTQYSAKDINRLLEETQAELLKAIPDLDCASKAHPGPAPTPDHKPPKAPHGQKAAPRTEPSGRRGSDELTVPRYRTEKPSKSPPPPPPRRSFPSSHGLTTTRTGEVVVTSKKDSAFIKKAESEELEVQKPQVKLRRAVSEVARPASTPPIMASAIKDEDDEDRIIAELESGGGSVPPMKVVTPGASRLKAAQGQAGSPDKSKHGKQRAEYMRIQAQQQATKPSKEMSGSNETSSPVSEKPSASRTSIPVLTSFGARNSSISF

SEQ ID NO: 751984 - protein, 68 aa, Homo sapiens
YELAPHQAHFSSSSDDLEKSVEKIQRDVSHNHRLVPGPELEEKALVLKQLGETLTELKGGSGACECST

SEQ ID NO: 751985 - protein, 453 aa, Homo sapiens
RIELGYLNIRVPFVSFVSHNHRLVPGPELEEKALVLKQLGETLTELKAHFPGLQSKMRVVLRVEVEAVKFLKEEPQRLDGLLKRCRGVTDTLAQIRRQVDEGVWPPPNNLLSQSPKKVTAETDFNKSVDFEMPPPSPPLNLHELSGPAEGASLTPKGGNPTKGLDTPGKRSVDKAVSVEAAERDWEEKRAALTQYSAKDINRLLEETQAELLKAIPDLDCASKAHPGPAPTPDHKPPKAPHGQKAAPRTEPSGRRGSDELTVPRYRTEKPSKSPPPPPPRRSFPSSHGLTTTRTGEVVVTSKKDSAFIKKAESEELEVQKPQVKLRRAVSEVARPASTPPIMASAIKDEDDEDRIIAELESGGGSVPPMKVVTPGASRLKAAQGQAGSPDKSKHGKQRAEYMRIQAQQQATKPSKEMSGSNETSSPVSEKPSASRTSIPVLTSFGARNSSISF

SEQ ID NO: 751986 - protein, 179 aa, Homo sapiens
GDPFAYPGAGGLYKRGSVRSLSTYSAAALQSDLEDSLYKAAGGGGPLYGDGYGFRLPPSSPQKLADVAAPPGGPPPPHSPYSGPPSRGSPVRQSFRKDSGSSSVFAESPGGKTRSAGSASTAGAPPSELFPGPGERSLVGFGPPVPAKDTETRSAWSLEKQMPLQPVRVPALDHLDHEN

SEQ ID NO: 751987 - protein, 769 aa, Homo sapiens; identical to SEQ ID NO: 751983

SEQ ID NO: 751988 - protein, 115 aa, Homo sapiens
MSVCTLSVPVSSLSPGRRCNTFSDSGILGCVPINSNTDEEDVVEEKMVAEGVNKEAKQPAKKKRKKGLRIKGKRRRKKLILAKKFSKDLGSGRPVADAPALLASNDPEQDEESLF

SEQ ID NO: 751989 - protein, 373 aa, Homo sapiens
MTEVLWPAVPNGTDAAFLAGPGSSWGNSTVASTAAVSSSFKCALTKTGFQFYYLPAVYILVFIIGFLGNSVAIWMFVFHMKPWSGISVYMFNLALADFLYVLTLPALIFYYFNKTDWIFGDAMCKLQRFIFHVNLYGSILFLTCISAHRYSGVVYPLKSLGRLKKKNAICISVLVWLIVVVAISPILFYSGTGVRKNKTITCYDTTSDEYLRSYFIYSMCTTVAMFCVPLVLILGCYGLIVRALIYKDLDNSPLRRKSIYLVIIVLTVFAVSYIPFHVMKTMNLRARLDFQTPAMCAFNDRVYATYQVTRGLASLNSCVDPILYFLAGDTFRRRLSRATRKASRRSEANLQSKSEDMTLNILPEFKQNGDTSL

SEQ ID NO: 751990 - protein, 373 aa, Homo sapiens; identical to SEQ ID NO: 751989

SEQ ID NO: 751991 - protein, 373 aa, Homo sapiens; identical to SEQ ID NO: 751989

SEQ ID NO: 751992 - protein, 35 aa, Homo sapiens
MVLGLTEMLRSCLLYALRPHCCHCHRMPFSIRGHL

SEQ ID NO: 751993 - protein, 105 aa, Homo sapiens
  misc_feature (1)..(1): Xaa can be any naturally occurring amino acid
XALAGHCGAGGEEKPEVLGVPSEICLQFSPSRCENGDKHPGAVSQLHYCLDYGYSYVAPCEVLSVLRGHAMVLGLTEMLRSCLLYALRPHCCHCHRMPFSIRGHL

SEQ ID NO: 751994 - protein, 105 aa, Homo sapiens; identical to SEQ ID NO: 751993
  misc_feature (1)..(1): Xaa can be any naturally occurring amino acid

SEQ ID NO: 751995 - protein, 120 aa, Homo sapiens
LYSNLTLSLFFFIKHSIYVVEDSHRGEEKPEVLGVPSEICLQFSPSRCENGDKHPGAVSQLHYCLDYGYSYVAPCEVLSVLRGHAMVLGLTEMLRSCLLYALRPHCCHCHRMPFSIRGHL

SEQ ID NO: 751996 - protein, 35 aa, Homo sapiens; identical to SEQ ID NO: 751992

SEQ ID NO: 751997 - protein, 35 aa, Homo sapiens; identical to SEQ ID NO: 751992

SEQ ID NO: 751998 - protein, 35 aa, Homo sapiens; identical to SEQ ID NO: 751992

SEQ ID NO: 751999 - protein, 101 aa, Homo sapiens
MERSQVQELLYLGVGVCHPPGTWMSCCTFLSASTCSVIQKSSESILLGVFLRLGFGLNQARVQWHNLIAHYSLNLLDSSSLPTFASQSEPLCPAPFGFFFF

SEQ ID NO: 752000 - protein, 44 aa, Homo sapiens
RDLVLGKARRLVKAALLGRPESCTNVLSTFFSCWGSARQDESVG

SEQ ID NO: 752001 - protein, 118 aa, Homo sapiens [sequence omitted]

SEQ ID NO: 752002 - protein, 223 aa, Homo sapiens
MGTASRSNIARHLQTNLILFCVGAVGACTLSVTQPWYLEVDYTHEAVTIKCTFSATGCPSEQPTCLWFRYGAHQPENLCLDGCKSEADKFTVREALKEICGIAFPSVPEARAKQTGGGTTLVVREIKLLSKELRSFLTALVSLLSVYVTGVCVAFILLSKSKSNPLRNKEIKEDSQKKKSARRIFQEIAQELYHKRHVETNQQSEKDNNTYENRRVLSNYERP

SEQ ID NO: 752003 - protein, 241 aa, Homo sapiens
MGTASRSNIARHLQTNLILFCVGAVGACTLSVTQPWYLEVDYTHEAVTIKCTFSATGCPSEQPTCLWFRYGAHQPENLCLDGCKSEADKFTVREALKENQVSLTVNRVTSNDSAIYICGIAFPSVPEARAKQTGGGTTLVVREIKLLSKELRSFLTALVSLLSVYVTGVCVAFILLSKSKSNPLRNKEIKEDSQKKKSARRIFQEIAQELYHKRHVETNQQSEKDNNTYENRRVLSNYERP

SEQ ID NO: 752004 - protein, 185 aa, Homo sapiens
MGTASRSNIARHLQTNLILFCVGAVGACTLSVTQPWYLEVDYTHEAVTIKCTFSATGCPSEQPTCLWFRYGAHQPENLCLDGCKSEADKFTVREALKENQVSLTVNRVTSNDSAIYICGIAFPSVPEARAKQTGGGTTLVVREIKLLSKELRSFLTALVSLLSVYVTGVCVAFILLSKSRARRIF

SEQ ID NO: 752005 - protein, 411 aa, Homo sapiens
TLSSARELRGAGRGAEAGLSSGGAAQEAPQADPRPWLARMKYLRHRRPNATLILAIGAFTLLLFSLLVSPPTCKVQEQPPAIPEALAWPTPPTRPAPAPCHANTSMVTHPDFATQPQHVQNFLLYRHCRHFPLLQDVPPSKCAQPVFLLLVIKSSPSNYVRRELLRRTWGRERKVRGLQLRLLFLVGTASNPHEARKVNRLLELEAQTHGDILQWDFHDSFFNLTLKQVLFLQWQETRCANASFVLNGDDDVFAHTDNMVFYLQDHDPGRHLFVGQLIQNVGPIRAFWSKYYVPEVVTQNERYPPYCGGGGFLLSRFTAAALRRAAHVLDIFPIDDVFLGMCLELEGLKPASHSGIRTSGVRAPSQHLSSFDPCFYRDLLLVHRFLPYEMLLMWDALNQPNLTCGNQTQIY

SEQ ID NO: 752006 - protein, 397 aa, Homo sapiens
SLAAGQTQGAAQEAPQADPRPWLARMKYLRHRRPNATLILAIGAFTLLLFSLLVSPPTCKVQEQPPAIPEALAWPTPPTRPAPAPCHANTSMVTHPDFATQPQHVQNFLLYRHCRHFPLLQDVPPSKCAQPVFLLLVIKSSPSNYVRRELLRRTWGRERKVRGLQLRLLFLVGTASNPHEARKVNRLLELEAQTHGDILQWDFHDSFFNLTLKQVLFLQWQETRCANASFVLNGDDDVFAHTDNMVFYLQDHDPGRHLFVGQLIQNVGPIRAFWSKYYVPEVVTQNERYPPYCGGGGFLLSRFTAAALRRAAHVLDIFPIDDVFLGMCLELEGLKPASHSGIRTSGVRAPSQHLSSFDPCFYRDLLLVHRFLPYEMLLMWDALNQPNLTCGNQTQIY

SEQ ID NO: 752007 - protein, 397 aa, Homo sapiens; identical to SEQ ID NO: 752006

SEQ ID NO: 752008 - protein, 397 aa, Homo sapiens; identical to SEQ ID NO: 752006

SEQ ID NO: 752009 - protein, 191 aa, Homo sapiens [sequence omitted]

SEQ ID NO: 752010 - protein, 419 aa, Homo sapiens
SLAAGQTQGAAQEAPQADPRPWLARMKYLRHRRPNATLILAIGAFTLLLFSLLVSPPTCKVQEQPPAIPEALAWPTPPTRPAPAPCHANTSMVTHPDFATQPQHVQNFLLYRHCRHFPLLQDVPPSKCAQPVFLLLVIKSSPSNYVRRELLRRTWGRERKVRGLQLRLLFLVGTASNPHEARKVNRLLELEAQTHGDILQWDFHDSFFNLTLKQVLFLQWQETRCANASFVLNGDDDVFAHTDNMVFYLQDHDPGRHLFVGQLIQNVGPIRAFWSKYYVPEVVTQNERYPPYCGGGGFLLSRFTAAALRRAAHVLDIFPIDDVFLGMCLELEGLKPASHSGIRTSGVRAPSQHLSSLGAPIPVFPKNSENSTGAGMIFNGPKANRHMPHYCLEKGEIQVLQQPPSPSMFYRLRGDRVSQ

SEQ ID NO: 752011 - protein, 221 aa, Homo sapiens
SLAAGQTQGAAQEAPQADPRPWLARMKYLRHRRPNATLILAIGAFTLLLFSLLVSPPTCKVQEQPPAIPEALAWPTPPTRPAPAPCHANTSMVTHPDFATQPQHVQNFLLYRHCRHFPLLQDVPPSKCAQPVFLLLVIKSSPSNYVRRELLRRTWGRERKVRGLQLRLLFLVGTASNPHEARKVNRLLELEAQTHGDILQWDFHDSFFNLTLKQVRWTGVT

SEQ ID NO: 752012 - protein, 849 aa, Homo sapiens
VALTTSMCCNKQVIVIDKIKSASIADRCGALHVGDHILSIDGTSMEYCTLAEATQFLANTTDQVKLEILPHHQTRLALKGPDHVKIQRSDRQLTWDSWASNHSSLHTNHHYNTYHPDHCRVPALTFPKAPPPNSPPALVSSSFSPTSMSAYSLSSLNMGTLPRSLYSTSPRGTMMRRRLKKKDFKSSLSLASSTVGLAGQVVHTETTEVVLTADPVTGFGIQLQGSVFATETLSSPPLISYIEADSPAERCGVLQIGDRVMAINGIPTEDSTFEEASQLLRDSSITSKVTLEIEFDVAESVIPSSGTFHVKLPKKHNVELGITISSPSSRKPGDPLVISDIKKGSVAHRTGTLELGDKLLAIDNIRLDNCSMEDAVQILQQCEDLVKLKIRKDEDNSDEQESSGAIIYTVELKRYGGPLGITISGTEEPFDPIIISSLTKGGLAERTGAIHIGDRILAINSSSLKGKPLSEAIHLLQMAGETVTLKIKKQTDAQSASSPKKFPISSHLSDLGDVEEDSSPAQKPGKLSDMYPSTVPSVDSAVDSWDGSAIDTSYGTEGTSFQASGYNFNTYDWRSPKQRGSLSPVTKPRSQTYPDVGLSYEDWDRSTASGFAGAADSAETEQEENFWSQALEDLETCGQSGILRELEATIMSGSTMSLNHEAPTPRSQLGRQASFQERSSSRPHYSQTTRSNTLPSDVGRKSVTLRKMKQEIKEIMSPTPVELHKVTLYKDSDMEDFGFSVADGLLEKGVYVKNIRPAGPGDLGGLKPYDRLLQVNHVRTRDFDCCLVVPLIAESGNKLDLVISRNPLASQKSIDQQSLPGDWSEQNSAFFQQPSHGGNLETREPTNTL

SEQ ID NO: 752013 - protein, 864 aa, Homo sapiens
VALTTSMCCNKQVIVIDKIKSASIADRCGALHVGDHILSIDGTSMEYCTLAEATQFLANTTDQVKLEILPHHQTRLALKGPDHVKIQRSDRQLTWDSWASNHSSLHTNHHYNTYHPDHCRVPALTFPKAPPPNSPPALVSSSFSPTSMSAYSLSSLNMGTLPRSLYSTSPRGTMMRRRLKKKDFKSSLSLASSTVGLAGQVVHTETTEVVLTADPVTGFGIQLQGSVFATETLSSPPLISYIEADSPAERCGVLQIGDRVMAINGIPTEDSTFEEASQLLRDSSITSKVTLEIEFDVAESVIPSSGTFHVKLPKKHNVELGITISSPSSRKPGDPLVISDIKKGSVAHRTGTLELGDKLLAIDNIRLDNCSMEDAVQILQQCEDLVKLKIRKDEDNSDEQESSGAIIYTVELKRYGGPLGITISGTEEPFDPIIISSLTKGGLAERTGAIHIGDRILAINSSSLKGKPLSEAIHLLQMAGETVTLKIKKQTDAQSASSPKKFPISSHLSDLGDVEEDSSPAQKPGKLSDMYPSTVPSVDSAVDSWDGSAIDTSYGTEGTSFQASGYNFNTYDWRSPKQRGSLSPVTKPRSQTYPDVGLSYEDWDRSTASGFAGAADSAETEQEENFWSQALEDLETCGQSGILRELEEKADRRVSLRNMTLLATIMSGSTMSLNHEAPTPRSQLGRQASFQERSSSRPHYSQTTRSNTLPSDVGRKSVTLRKMKQEIKEIMSPTPVELHKVTLYKDSDMEDFGFSVADGLLEKGVYVKNIRPAGPGDLGGLKPYDRLLQVNHVRTRDFDCCLVVPLIAESGNKLDLVISRNPLASQKSIDQQSLPGDWSEQNSAFFQQPSHGGNLETREPTNTL

SEQ ID NO: 752014 - protein, 205 aa, Homo sapiens
MPQATIMSGSTMSLNHEAPTPRSQLGRQASFQERSSSRPHYSQTTRSNTLPSDVGRKSVTLRKMKQEIKEIMSPTPVELHKVTLYKDSDMEDFGFSVADGLLEKGVYVKNIRPAGPGDLGGLKPYDRLLQVNHVRTRDFDCCLVVPLIAESGNKLDLVISRNPLASQKSIDQQSLPGDWSEQNSAFFQQPSHGGNLETREPTNTL

SEQ ID NO: 752015 - protein, 226 aa, Homo sapiens
MRTEVRVLSPHKRICLIPVLRQEFKGSTVVELMKKEGTTLGLTVSGGIDKDGKPRVSNLRQGGIAARSDQLDVGDYIKAVNGINLAKFRHDEIISLLKNVGERVVLEVEYELPPVSVQGSSVIFRTVEVTLHKEGNTFGFVIRGGAHDDRNKSRPVVITCVRPGGPADREGTIKPGDRLLSVDGIRLLGTTHAEAMSILKQCGQEAALLIEYDVSVMGESCPNQRL

SEQ ID NO: 752016 - protein, 110 aa, Homo sapiens
MSCQQNQQQCQPPPKCPPKCTPKCPPKCPPKCLPQCPAPCSPAVSSCCGPISGGCCGPSSGGCCNSGAGGCCLSHHRPRLFHRRRHQSPDCCESEPSGGSGCCHSSGGCC

SEQ ID NO: 752017 - protein, 542 aa, Homo sapiens
GDGALTGGAAAARARRAIGYRPRQRQLGDPACAGPAGRAGVTWAAAMEEQREALRKIIKTLAVKNEEIQSFIYSLKQMLLNVEANSAKVQEDLEAEFQSLFSLLEELKEGMLMKIKQDRASRTYELQNQLAACTRALESSEELLETANQTLQAMDSEDFPQAAKQIKDGVTMAPAFRLSLKAKVSDNMSHLMVDFAQERQMLQALKFLPVPSAPVIDLAESLVADNCVTLVWRMPDEDSKIDHYVLEYRRTNFEGPPRLKEDQPWMVIEGIRQTEYTLTGLKFDMKYMNFRVKACNKAVAGEFSEPVTLETPAFMFRLDASTSHQNLRVDDLSVEWDAMGGKVQDIKAREKDGKGRTASPINSPARGTPSPKRMPSGRGGRDRFTAESYTVLGDTLIDGGEHYWEVRYEPDSKAFGVGVAYRSLGRFEQLGKTAASWCLHVNNWLQVSFTAKHANKVKVLDAPVPDCLGVHCDFHQGLLSFYNARTKQVLHTFKTRFTQPLLPAFTVWCGSFQVTTGLQVPSAVRCLQKRGSATSSSNTSLT

SEQ ID NO: 752018 - protein, 534 aa, Homo sapiens
GDGALTGGAAAARARRAIGYRPRQRQLGDPACAGPAGRAGVTWAAAMEEQREALRKIIKTLAVKNEEIQSFIYSLKQMLLNVEANSAKVQEDLEAEFQSLFSLLEELKEGMLMKIKQDRASRTYELQNQLAACTRALESSEELLETANQTLQAMDSEDFPQAAKQIKDGVTMAPAFRLSLKAKVSDNMSHLMVDFAQERQMLQALKFLPVPSAPVIDLAESLVADNCVTLVWRMPDEDSKIDHYVLEYRRTNFEGPPRLKEDQPWMVIEGIRQTEYTLTGLKFDMKYMNFRVKACNKAVAGEFSEPVTLETPAFMFRLDASTSHQNLRVDDLSVEWDAMGGKVQDIKAREKDGKGRTASPINSPARGTPSPKRMPSGRGGRDRFTAESYTVLGDTLIDGGEHYWEVRYEPDSKAFGVGVAYRSLGRFEQLGKTAASWCLHVNNWLQVSFTAKHANKVKVLDAPVPDCLGLLSFYNARTKQVLHTFKTRFTQPLLPAFTVWCGSFQVTTGLQVPSAVRCLQKRGSATSSSNTSLT

SEQ ID NO: 752019 - protein, 317 aa, Homo sapiens
GDGALTGGAAAARARRAIGYRPRQRQLGDPACAGPAGRAGVTWAAAMEEQREALRKIIKTLAVKNEEIQSFIYSLKQMLLNVEANSAKVQEDLEAEFQSLFSLLEELKEGMLMKIKQDRASRTYELQNQLAACTRALESSEELLETANQTLQAMDSEDFPQAAKQIKDGVTMAPAFRLSLKAKVSDNMSHLMVDFAQERQMLQALKFLPVPSAPVIDLAESLVADNCVTLVWRMPDEDSKIDHYVLEYRRTNFEGPPRLKEDQPWMVIEGIRQTEYTLTGLKFDMKYMNFRVKACNKAVAGEFSEPVTLETPEPAGG

SEQ ID NO: 752020 - protein, 222 aa, Homo sapiens
GDGALTGGAAAARARRAIGYRPRQRQLGDPACAGPAGRAGVTWAAAMEEQREALRKIIKTLAVKNEEIQSFIYSLKQMLLNVEWEVRYEPDSKAFGVGVAYRSLGRFEQLGKTAASWCLHVNNWLQVSFTAKHANKVKVLDAPVPDCLGVHCDFHQGLLSFYNARTKQVLHTFKTRFTQPLLPAFTVWCGSFQVTTGLQVPSAVRCLQKRGSATSSSNTSLT

SEQ ID NO: 752021 - protein, 483 aa, Homo sapiens
GDGALTGGAAAARARRAIGYRPRQRQLGDPACAGPAGRAGVTWAAAMEEQREALRKIIKTLAVKNEEIQSFIYSLKQMLLNVEANSAKVQEDLEAEFQSLFSLLEELKEGMLMKIKQDRASRTYELQNQLAACTRALESSEELLETANQTLQAMDSEDFPQAAKQIKDGVTMAPAFRLSLKAKVSDNMSHLMVDFAQERQMLQALKFLPVPSAPVIDLAESLVADNCVTLVWRMPDEDSKIDHYVLEYRRTNFEGPPRLKEDQPWMVIEGIRQTEYTLTGLKFDMKYMNFRVKACNKAVAGEFSEPVTLETPAFMFRLDASTSHQNLRVDDLSVEWDAMGGKVQDIKAREKDGKGRTASPINSPARGTPSPKRMPSGRGGRDRFTAESYTVLGDTLIDGGEHYWEVRYEPDSKAFGVGVAYRSLGRFEQLGKTAASWCLHVNNWLQASCPSTMPAPNKCCTLSRPGSHSRCCLLSRYGVAASR

SEQ ID NO: 752022 - protein, 375 aa, Homo sapiens
MEPLCGHAPKIVQHVVGQPCSKPPGPLNQAQNPDPLSFPSWSVPSAPVIDLAESLVADNCVTLVWRMPDEDSKIDHYVLEYRRTNFEGPPRLKEDQPWMVIEGIRQTEYTLTGLKFDMKYMNFRVKACNKAVAGEFSEPVTLETPAFMFRLDASTSHQNLRVDDLSVEWDAMGGKVQDIKAREKDGKGRTASPINSPARGTPSPKRMPSGRGGRDRFTAESYTVLGDTLIDGGEHYWEVRYEPDSKAFGVGVAYRSLGRFEQLGKTAASWCLHVNNWLQVSFTAKHANKVKVLDAPVPDCLGVHCDFHQGLLSFYNARTKQVLHTFKTRFTQPLLPAFTVWCGSFQVTTGLQVPSAVRCLQKRGSATSSSNTSLT

SEQ ID NO: 752023 - protein, 95 aa, Homo sapiens
VKNEEIQSFIYSLKQMLLNVERRWGSPGEVRGGEEAGGCSLRNWPIAVDACGRSQVPSLNTGFGRFWLFRPRRTRRRCRRTSKQSSSPSSPSWRS

SEQ ID NO: 752024 - protein, 107 aa, Homo sapiens
MKLQGADVTGLHSREGEGKREHITETAQNKQPMKNNLEKEAKNEQQTGPCFLQQEAPTHCWSQPAVWTCRLRDEVGLQGTRGFWLLLVVAFLLTLCSPQNREGHPSG

SEQ ID NO: 752025 - protein, 136 aa, Homo sapiens
HPKPACILPPPSADPMSVWQLPHSLSLERSLPPRHRRPTLPGVVRPGTGSFGFLDAWPGLGKTRCLPCCPHLGDSAPCAPSFLMVSRLVPLACSLLVPTPHGSLRQLHDNPTRAEDLGQRSNHRSSPPFPFLRRQD

SEQ ID NO: 752026 - protein, 205 aa, Homo sapiens
MCPSGWSRRRPCGGHRLGGQSPRNSEPCGFWKRSRAARSRRLQGAERGAARGRECSRPSTQMLTLQNAPRVLEPWGSRRCSPETAAAGAGRSPAGATRVRSRPRTTRRPRPRRDSFSVPISQGAKEAEGAPDSLGSDPDPSLLQGGVLLPEKPRRSFGRPRDTRGHHLPLTGAPRGDFTQCPVSSRWDPPAPEGRPCPPAPQGRE

SEQ ID NO: 752027 - protein, 80 aa, Homo sapiens
VSWRYLKCTRFPALQESLKEGLTVQERLKLFESRDLKKDWCVPSKLSTRLPQLAAAHPKRCFSPVPLFYYYYYYCCCCHR

SEQ ID NO: 752028 - protein, 492 aa, Homo sapiens
MKMTFYGHFVAGEDQESIQPLLRHYRAFGVSAILDYGVEEDLSPEEAEHKEMESCTSAAERDGSGTNKRDKQYQAHRAFGDRRNGVISARTYFYANEAKCDSHMETFLRCIEASGRVSDDGFIAIKLTALGRPQFLLQFSEVLAKWRCFFHQMAVEQGQAGLAAMDTKLEVAVLQESVAKLGIASRAEIEDWFTAETLGVSGTMDLLDWSSLIDSRTKLSKHLVVPNAQTGQLEPLLSRFTEEEELQMTRMLQRMDVLAKKATEMGVRLMVDAEQTYFQPAISRLTLEMQRKFNVEKPLIFNTYQCYLKDAYDNVTLDVELARREGWCFGAKLVRGAYLAQERARAAEIGYEDPINPTYEATNAMYHRCLDYVLEELKHNAKAKVMVASHNEDTVRFALRRMEELGLHPADHQVYFGQLLGMCDQISFPLGQAGYPVYKYVPYGPVMEVLPYLSRRALENSSLMKGTHRERQLLWLELLRRLRTGNLFHRPA

SEQ ID NO: 752029 - protein, 600 aa, Homo sapiens [sequence omitted]

SEQ ID NO: 752030 - protein, 117 aa, Homo sapiens
MDLLDWSSLIDSRTKLSKHLVVPNAQTGQLEPLLSRFTEEEELQMTRMLQRMDVLAKVSCPARAEGTWDSWRRGHLPHLSNSCSHSPTPCASQKATEMGVRLMVDAESAALDPLDTS

SEQ ID NO: 752031 - protein, 278 aa, Homo sapiens
MLQRMDVLAKVSCPARAEGTWDSWRRGHLPHLSNSCSHSPTPCASQKATEMGVRLMVDAEQTYFQPAISRLTLEMQRKFNVEKPLIFNTYQCYLKDAYDNVTLDVELARREGWCFGAKLVRGAYLAQERARAAEIGYEDPINPTYEATNAMYHRCLDYVLEELKHNAKAKVMVASHNEDTVRFALRRMEELGLHPADHQVYFGQLLGMCDQISFPLGQAGYPVYKYVPYGPVMEVLPYLSRRALENSSLMKGTHRERQLLWLELLRRLRTGNLFHRPA

SEQ ID NO: 752032 - protein, 325 aa, Homo sapiens
MDLLDWSSLIDSRTKLSKHLVVPNAQTGQLEPLLSRFTEEEELQMTRMLQRMDVLAKVSCPARAEGTWDSWRRGHLPHLSNSCSHSPTPCASQKATEMGVRLMVDAEQTYFQPAISRLTLEMQRKFNVEKPLIFNTYQCYLKDAYDNVTLDVELARREGWCFGAKLVRGAYLAQERARAAEIGYEDPINPTYEATNAMYHRCLDYVLEELKHNAKAKVMVASHNEDTVRFALRRMEELGLHPADHQVYFGQLLGMCDQISFPLGQAGYPVYKYVPYGPVMEVLPYLSRRALENSSLMKGTHRERQLLWLELLRRLRTGNLFHRPA

SEQ ID NO: 752033 - protein, 353 aa, Homo sapiens
MALRRALPALRPCIPRFVQLSTAPASREQPAAGPAAVPGGGSATAVRPPVPAVDFGNAQEAYRSRRTWELARSLLVLRLCAWPALLARHEQLLYVSRKLLGQRLFNKLMKMTFYGHFVAGEDQESIQPLLRHYRAFGVSAILDYGVEEDLSPEEAEHKEMESCTSAAERDGSGTNKRDKQYQAHRAFGDRRNGVISARTYFYANEAKCDSHMETFLRCIEASGRVSDDGFIAIKLTALGRPQFLLQFSEVLAKWRCFFHQMAVEQGQAGLAAMDTKLEVAVLQESVAKLGIASRAEIEDWFTAETLGVSGTMDLLDWSSLIDSRTKLSKHLVVPNAQVTPPLLSEAQLSRALR

SEQ ID NO: 752034 - protein, 245 aa, Homo sapiens [sequence omitted]

SEQ ID NO: 752035 - protein, 353 aa, Homo sapiens; identical to SEQ ID NO: 752033

SEQ ID NO: 752036 - protein, 278 aa, Homo sapiens; identical to SEQ ID NO: 752031

SEQ ID NO: 752037 - protein, 357 aa, Homo sapiens
MALRRALPALRPCIPRFVQLSTAPASREQPAAGPAAVPGGGSATAVRPPVPAVDFGNAQEAYRSRRTWELARSLLVLRLCAWPALLARHEQLLYVSRKLLGQRLFNKLMKMTFYGHFVAGEDQESIQPLLRHYRAFGVSAILDYGVEEDLSPEEAEHKEMESCTSAAERDGSGTNKRDKQYQAHRAFGDRRNGVISARTYFYANEAKCDSHMETFLRCIEASGRVSDDGFIAIKLTALGRPQFLLQFSEVLAKWRCFFHQMAVEQGQAGLAAMDTKLEVAVLQESVAKLGIASRAEIEDWFTAETLGVSGTMDLLDWSSLIDSRTKLSKHLVVPNAQTGQLSPAVPFTEGSSVNGTD

SEQ ID NO: 752038 - protein, 113 aa, Homo sapiens
MQTPSCWCAGKESRRSPDEAQHFTDRQWSRGIQLTLWLNFRKPPMRSCKGDGENMAECQQEQSGERTLVRGPKNRRCEPREGPARPMLQAIWRLNLRLSRINCCMRCGVWEKA

SEQ ID NO: 752039 - protein, 75 aa, Homo sapiens
RKFIPVLQGVCFQNGAHFGGGKAWLSSFKATSNFSLLFDFLQILSCAGGNKGCTSLFTYTGETCSEDSRSKLGQS

SEQ ID NO: 752040 - protein, 177 aa, Homo sapiens
STVSRDDHIPGIPSLTDCLQWFTRPEHLGSSAKIKCNSCQSYQESTKQLTMKKLPIVACFHLKRFEHVGKQRRKINTFISFPLELDMTPFLASTKESRMKEGQPPTDCVPNENKYSLFAVINHHGTLESGHYTSFIRQQKDQWFSCDDAIITKATIEDLLYSEGYLLFYHKQGLEKD

SEQ ID NO: 752041 - protein, 856 aa, Homo sapiens
MKSARAKTPRKPTVKKGSQTNLKDPVGVYCRVRPLGFPDQECCIEVINNTTVQLHTPEGYRLNRNGDYKETQYSFKQVFGTHTTQKELFDVVANPLVNDLIHGKNGLLFTYGVTGSGKTHTMTGSPGEGGLLPRCLDMIFNSIGSFQAKRYVFKSNDRNSMDIQCEVDALLERQKREAMPNPKTSSSKRQVDPEFADMITVQEFCKAEEVDEDSVYGVFVSYIEIYNNYIYDLLEEVPFDPIKPKPPQSKLLREDKNHNMYVAGCTEVEVKSTEEAFEVFWRGQKKRRIANTHLNRESSRSHSVFNIKLVQAPLDADGDNVLQEKEQITISQLSLVDLAGSERTNRTRAEGNRLREAGNINQSLMTLRTCMDVLRENQMYGTNKMVPYRDSKLTHLFKNYFDGEGKVRMIVCVNPKAEDYEENLQVMRFAEVTQEVEVARPVDKAICGLTPGRRYRNQPRGPVGNEPLVTDVVLQSFPPLPSCEILDINDEQTLPRLIEALEKRHNLRQMMIDEFNKQSNAFKALLQEFDNAVLSKENHMQGKLNEKEKMISGQKLEIERLEKKNKTLEYKIEILEKTTTIYEEDKRNLQQELETQNQKLQRQFSDKRRLEARLQGMVTETTMKWEKECERRVAAKQLEMQNKLWVKDEKLKQLKAIVTEPKTEKPERPSRERDREKVTQRSVSPSPVPLLFQPDQNAPPIRLRHRRSRSAGDRWVDHKPASNMQTETVMQPHVPHAITVSVANEKALAKCEKYMLTHQELASDGEIETKLIKGDIYKTRGGGQSVQFTDIETLKQESPNGSRKRRSSTVAPAQPDGAESEWTDVETRCSVAVEMRAGSQLGPGYQHHAQPKRKKP

SEQ ID NO: 752042 - protein, 960 aa, Homo sapiens
MKSARAKTPRKPTVKKGSQTNLKDPVGVYCRVRPLGFPDQECCIEVINNTTVQLHTPEGYRLNRNGDYKETQYSFKQVFGTHTTQKELFDVVANPLVNDLIHGKNGLLFTYGVTGSGKTHTMTGSPGEGGLLPRCLDMIFNSIGSFQAKRYVFKSNDRNSMDIQCEVDALLERQKREAMPNPKTSSSKRQVDPEFADMITVQEFCKAEEVDEDSVYGVFVSYIEIYNNYIYDLLEEVPFDPIKPKPPQSKLLREDKNHNMYVAGCTEVEVKSTEEAFEVFWRGQKKRRIANTHLNRESSRSHSVFNIKLVQAPLDADGDNVLQEKEQITISQLSLVDLAGSERTNRTRAEGNRLREAGNINQSLMTLRTCMDVLRENQMYGTNKMVPYRDSKLTHLFKNYFDGEGKVRMIVCVNPKAEDYEENLQVMRFAEVTQEVEVARPVDKAICGLTPGRRYRNQPRGPVGNEPLVTDVVLQSFPPLPSCEILDINDEQTLPRLIEALEKRHNLRQMMIDEFNKQSNAFKALLQEFDNAVLSKENHMQGKLNEKEKMISGQKLEIERLEKKNKTLEYKIEILEKTTTIYEEDKRNLQQELETQNQKLQRQFSDKRRLEARLQGMVTETTMKWEKECERRVAAKQLEMQNKLWVKDEKLKQLKAIVTEPKTEKPERPSRERDREKVTQRSVSPSPVPLSSNYIAQISNGQQLMSQPQLHRRSNSCSSISVASCISEWEQKIPTYNTPLKVTSIARRRQQEPGQSKTCIVSDRRRGMYWTEGREVVPTFRNEIEIEEDHCGRLLFQPDQNAPPIRLRHRRSRSAGDRWVDHKPASNMQTETVMQPHVPHAITVSVANEKALAKCEKYMLTHQELASDGEIETKLIKGDIYKTRGGGQSVQFTDIETLKQESPNGSRKRRSSTVAPAQPDGAESEWTDVETRCSVAVEMRAGSQLGPGYQHHAQPKRKKP

SEQ ID NO: 752043 - protein, 656 aa, Homo sapiens
WYGPEPLVSWMQMRDNVLQEKEQITISQLSLVDLAGSERTNRTRAEGNRLREAGNINQSLMTLRTCMDVLRENQMYGTNKMVPYRDSKLTHLFKNYFDGEGKVRMIVCVNPKAEDYEENLQVMRFAEVTQEVEVARPVDKAICGLTPGRRYRNQPRGPVGNEPLVTDVVLQSFPPLPSCEILDINDEQTLPRLIEALEKRHNLRQMMIDEFNKQSNAFKALLQEFDNAVLSKENHMQGKLNEKEKMISGQKLEIERLEKKNKTLEYKIEILEKTTTIYEEDKRNLQQELETQNQKLQRQFSDKRRLEARLQGMVTETTMKWEKECERRVAAKQLEMQNKLWVKDEKLKQLKAIVTEPKTEKPERPSRERDREKVTQRSVSPSPVPLSSNYIAQISNGQQLMSQPQLHRRSNSCSSISVASCISEWEQKIPTYNTPLKVTSIARRRQQEPGQSKTCIVSDRRRGMYWTEGREVVPTFRNEIEIEEDHCGRLLFQPDQNAPPIRLRHRRSRSAGDRWVDHKPASNMQTETVMQPHVPHAITVSVANEKALAKCEKYMLTHQELASDGEIETKLIKGDIYKTRGGGQSVQFTDIETLKQESPNGSRKRRSSTVAPAQPDGAESEWTDVETRCSVAVEMRAGSQLGPGYQHHAQPKRKKP

SEQ ID NO: 752044 - protein, 596 aa, Homo sapiens
MTLRTCMDVLRENQMYGTNKMVPYRDSKLTHLFKNYFDGEGKVRMIVCVNPKAEDYEENLQVMRFAEVTQEVEVARPVDKAICGLTPGRRYRNQPRGPVGNEPLVTDVVLQSFPPLPSCEILDINDEQTLPRLIEALEKRHNLRQMMIDEFNKQSNAFKALLQEFDNAVLSKENHMQGKLNEKEKMISGQKLEIERLEKKNKTLEYKIEILEKTTTIYEEDKRNLQQELETQNQKLQRQFSDKRRLEARLQGMVTETTMKWEKECERRVAAKQLEMQNKLWVKDEKLKQLKAIVTEPKTEKPERPSRERDREKVTQRSVSPSPVPLSSNYIAQISNGQQLMSQPQLHRRSNSCSSISVASCISEWEQKIPTYNTPLKVTSIARRRQQEPGQSKTCIVSDRRRGMYWTEGREVVPTFRNEIEIEEDHCGRLLFQPDQNAPPIRLRHRRSRSAGDRWVDHKPASNMQTETVMQPHVPHAITVSVANEKALAKCEKYMLTHQELASDGEIETKLIKGDIYKTRGGGQSVQFTDIETLKQESPNGSRKRRSSTVAPAQPDGAESEWTDVETRCSVAVEMRAGSQLGPGYQHHAQPKRKKP

SEQ ID NO: 752045 - protein, 960 aa, Homo sapiens; identical to SEQ ID NO: 752042

SEQ ID NO: 752046 - protein, 880 aa, Homo sapiens
MKSARAKTPRKPTVKKGSQTNLKDPVGVYCRVRPLGFPDQECCIEVINNTTVQLHTPEGYRLNRNGDYKETQYSFKQVFGTHTTQKELFDVVANPLVNDLIHGKNGLLFTYGVTGSGKTHTMTGSPGEGGLLPRCLDMIFNSIGSFQAKRYVFKSNDRNSMDIQCEVDALLERQKREAMPNPKTSSSKRQVDPEFADMITVQEFCKAEEVDEDSVYGVFVSYIEIYNNYIYDLLEEVPFDPIKPKPPQSKLLREDKNHNMYVAGCTEVEVKSTEEAFEVFWRGQKKRRIANTHLNRESSRSHSVFNIKLVQAPLDADGDNVLQEKEQITISQLSLVDLAGSERTNRTRAEGNRLREAGNINQSLMTLRTCMDVLRENQMYGTNKMVPYRDSKLTHLFKNYFDGEGKVRMIVCVNPKAEDYEENLQVMRFAEVTQEVEVARPVDKAICGLTPGRRYRNQPRGPVGNEPLVTDVVLQSFPPLPSCEILDINDEQTLPRLIEALEKRHNLRQMMIDEFNKQSNAFKALLQEFDNAVLSKENHMQGKLNEKEKMISGQKLEIERLEKKNKTLEYKIEILEKTTTIYEEDKRNLQQELETQNQKLQRQFSDKRRLEARLQGMVTETTMKWEKECERRVAAKQLEMQNKLWVKDEKLKQLKAIVTEPKTEKPERPSRERDREKVTQRSVSPSPVPLSSNYIAQISNGQQLMSQPQLHRRSNSCSSISVASCISEWEQKIPTYNTPLKVTSIARRRQQEPGQSKTCIVSDRRRGMYWTEGREVVPTFRNEIEIEEDHCGRLLFQPDQNAPPIRLRHRRSRSAGDRWVDHKPASNMQTETVMQPHVPHAITVSVANEKALAKCEKYMLTHQELASDGEIETKLIKVKN

SEQ ID NO: 752047 - protein, 876 aa, Homo sapiens
VLLNHSPNDWNKRKKKKKKAMKSARAKTPRKPTVKKGSQTNLKDPVGVYCRVRPLGFPDQECCIEVINNTTVQLHTPEGYRLNRNGDYKETQYSFKQVFGTHTTQKELFDVVANPLVNDLIHGKNGLLFTYGVTGSGKTHTMTGSPGEGGLLPRCLDMIFNSIGSFQAKRYVFKSNDRNSMDIQCEVDALLERQKREAMPNPKTSSSKRQVDPEFADMITVQEFCKAEEVDEDSVYGVFVSYIEIYNNYIYDLLEEVPFDPIKPKPPQSKLLREDKNHNMYVAGCTEVEVKSTEEAFEVFWRGQKKRRIANTHLNRESSRSHSVFNIKLVQAPLDADGDNVLQEKEQITISQLSLVDLAGSERTNRTRAEGNRLREAGNINQSLMTLRTCMDVLRENQMYGTNKMVPYRDSKLTHLFKNYFDGEGKVRMIVCVNPKAEDYEENLQVMRFAEVTQEVEVARPVDKAICGLTPGRRYRNQPRGPVGNEPLVTDVVLQSFPPLPSCEILDINDEQTLPRLIEALEKRHNLRQMMIDEFNKQSNAFKALLQEFDNAVLSKENHMQGKLNEKEKMISGQKLEIERLEKKNKTLEYKIEILEKTTTIYEEDKRNLQQELETQNQKLQRQFSDKRRLEARLQGMVTETTMKWEKECERRVAAKQLEMQNKLWVKDEKLKQLKAIVTEPKTEKPERPSRERDREKVTQRSVSPSPVPLLFQPDQNAPPIRLRHRRSRSAGDRWVDHKPASNMQTETVMQPHVPHAITVSVANEKALAKCEKYMLTHQELASDGEIETKLIKGDIYKTRGGGQSVQFTDIETLKQESPNGSRKRRSSTVAPAQPDGAESEWTDVETRCSVAVEMRAGSQLGPGYQHHAQPKRKKP

SEQ ID NO: 752048 - protein, 596 aa, Homo sapiens; identical to SEQ ID NO: 752044

SEQ ID NO: 752049 - protein, 960 aa, Homo sapiens; identical to SEQ ID NO: 752042

SEQ ID NO: 752050 - protein, 960 aa, Homo sapiens; identical to SEQ ID NO: 752042

SEQ ID NO: 752051 - protein, 243 aa, Homo sapiens
SLYNGVLKHQFFSGLLKNLNIQARCGGSLPAIPTFWEAKAGRFLELEFENRLCNSDGFIGALPLVPEFLILNMSETAPAAPAAAPPAEKAPVKKKAAKKAGGTPRKASGPPVSELITKAVAASKERSGVSLAALKKALAAAGYDVEKNNSRIKLGLKSLVSKGTLVQTKGTGASGSFKLNKKAASGEAKPKVKKAGGTKPKKPVGAAKKPKKAAGGATPKKSAKKTPKKAKKAGRGHCNQESG

SEQ ID NO: 752052 - protein, 243 aa, Homo sapiens; identical to SEQ ID NO: 752051

SEQ ID NO: 752053 - protein, 243 aa, Homo sapiens; identical to SEQ ID NO: 752051

SEQ ID NO: 752054 - protein, 109 aa, Homo sapiens
DSTEEVDSTEAGTEEVDSWTAHGQHRGGGQHMDSTEEVDSTEEVDSTEEVAAQWWPLTGRRMQCCRLFCFLLQNCLFPFPLHLIQHDPCELVLTISWDWAEAGASLYSP

SEQ ID NO: 752055 - protein, 68 aa, Homo sapiens
VSATIFMKNMICGWEGGYGKRRKLAGIADISALAPLRSLSVVEQGSPSQPQELFFLNFITSLFRFQSS

SEQ ID NO: 752056 - protein, 102 aa, Homo sapiens
TTTKFAAASTFSRIPKTMHWSGQELSHIPLQTGHSMFSVTVRTSQASAVPFLPLQHTHLSGREEMSFQPQEWRLPHPNIVSIEKEAVCIYDYISVHLYIFDM

SEQ ID NO: 752057 - protein, 129 aa, Homo sapiens
MTSPPQLPQCDVPACHPVLQPRAPLGSARTADLQSRPVSGAAWSFRGVTLWGSWPPASWKHPLEPRLGQHCMALLCFLPGAISLILCLREFCLSSLERPLPLFLYRGAASFFLPPSFLPIKFLLLKTKR

SEQ ID NO: 752058 - protein, 99 aa, Homo sapiens
MPCCDSVVDWAPLGDSPAAASRWWLGLESTQCRTGLGSHADGIFTRVWGSWTAEGLLSIAVSALPSSIPVASSHRAPLDALTACWSLGSQTPSMVCGFP

SEQ ID NO: 752059 - protein, 74 aa, Homo sapiens
HLLLPVQLLLPGLLRVPPLPPRKLPPGLLQPLLRQEVQLLSAQSLSPADCVFAAKQDSPVSGAPGVLRIHQLHQ

SEQ ID NO: 752060 - protein, 265 aa, Homo sapiens
STEQTAQLGTELFIVRQLLQIVKQKTNQNSVDTTLKFTLSALWNLTDESPTTCRHFIENQGLELFMRVLESFPTESSIQQKVLGLLNNIAEVQELHSELMWKDFIDHISSLLHSVEVEVSYFAAGIIAHLISRGEQAWTLSRSQRNSLLDDLHSAILKWPTPECEMVAYRSFNPFFPLLGCFTTPGVQLWAVWAMQHVCSKNPSRYCSMLIEEGGLQHLYNIKDHEHTDPHVQQIAVAILDSLEKHIVRHGRPPPCKKQPQARLN

SEQ ID NO: 752061 - protein, 295 aa, Homo sapiens
STEQTAQLGTELFIVRQLLQIVKQKTNQNSVDTTLKFTLSALWNLTDESPTTCRHFIENQGLELFMRVLESFPTESSIQQKVLGLLCGSADDEFFSFCLTENIFTYTFVFERYFYQNNIAEVQELHSELMWKDFIDHISSLLHSVEVEVSYFAAGIIAHLISRGEQAWTLSRSQRNSLLDDLHSAILKWPTPECEMVAYRSFNPFFPLLGCFTTPGVQLWAVWAMQHVCSKNPSRYCSMLIEEGGLQHLYNIKDHEHTDPHVQQIAVAILDSLEKHIVRHGRPPPCKKQPQARLN

SEQ ID NO: 752062 - protein, 166 aa, Homo sapiens
MWKDFIDHISSLLHSVEVEVSYFAAGIIAHLISRGEQAWTLSRSQRNSLLDDLHSAILKWPTPECEMVAYRSFNPFFPLLGCFTTPGVQLWAVWAMQHVCSKNPSRYCSMLIEEGGLQHLYNIKDHEHTDPHVQQIAVAILDSLEKHIVRHGRPPPCKKQPQARLN

SEQ ID NO: 752063 - protein, 562 aa, Homo sapiens
SLFSELACDLLLQPDNLACKPFWKPRNLNISQHGSDMQVSFDHAPHNFGFRFFYLHYKLKHEGPFKRKTCKQEQTTETTSCLLQNVSPGDYIIELVDDTNTTRKVMHYALKPVHSPWAGPIRAVAITVPLVVISAFATLFTVMCRKKQQENIYSHLDEESSESSTYTAALPRERLRPRPKVFLCYSSKDGQNHMNVVQCFAYFLQDFCGCEVALDLWEDFSLCREGQREWVIQKIHESQFIIVVCSKGMKYFVDKKNYKHKGGGRGSGKGELFLVAVSAIAEKLRQAKQSSSAALSKFIAVYFDYSCEGDVPGILDLSTKYRLMDNLPQLCSHLHSRDHGLQEPGQHTRQGSRRNYFRSKSGRSLYVAICNMHQFIDEEPDWFEKQFVPFHPPPLRYREPVLEKFDSGLVLNDVMCKPGPESDFCLKVEAAVLGATGPADSQHESQHGGLDQDGEARPALDGSAALQPLLHTVKAGSPSDMPRDSGIYDSSVPSSELSLPLMEGLSTDQTETSSLTESVSSSSGLGEEEPPALPSKLLSSGSCKADLGCRSYTDELHAVAPL

SEQ ID NO: 752064 - protein, 562 aa, Homo sapiens; identical to SEQ ID NO: 752063

SEQ ID NO: 752065 - protein, 599 aa, Homo sapiens [sequence omitted]

SEQ ID NO: 752066 - protein, 691 aa, Homo sapiens [sequence omitted]

SEQ ID NO: 752067 - protein, 247 aa, Homo sapiens [sequence omitted]

SEQ ID NO: 752068 - protein, 766 aa, Homo sapiens
MYSEWRSLHLVIQNDQGHTSVLHSYPESVGREVANAVVRPLGQVLGTPSVAGSENLLKTDKEVKWTMEVICYGLTLPLDGETVKYCVDVYTDWIMALVLPKDSIPLPVIKEPNQYVQTILKHLQNLFVPRQEQGSSQIRLCLQVLRAIQKLARESSLMARETWEVLLLFLLQINDILLAPPTVQGGIAENLAEKLIGVLFEVWLLACTRCFPTPPYWKTAKEMVANWRHHPAVVEQWSKVICALTSRLLRFTYGPSFPAFKVPDEDASLIPPEMDNECVAQTWFRFLHMLSNPVDLSNPAIISSTPKFQEQFLNVSGMPQELNQYPCLKHLPQIFFRAMRGISCLVDAFLGISRPRSDSAPPTPVNRLSMPQSAAVSTTPPHNRRHRAVTVNKATMKTSTVSTAHASKVQHQTSSTSPLSSPNQTSSEPRPLPAPRRPKVNSILNLFGSWLFDAAFVHCKLHNGINRDSSMTAITTQASMEFRRKGSQMSTDTMVSNPMFDASEFPDNYEAGRAEACGTLCRIFCSKKTGEEILPAYLSRFYMLLIQGLQINDYVCHPVLASVILNSPPLFCCDLKGIDVVVPYFISALETILPDRELSKFKSYVNPTELRRSSINILLSLLPLPHHFGTVKSEVVLEGKFSNDDSSSYDKPITFLSLKLRLVNILIGALQTETDPNNTQMILGAMLNIVQDSALLEAIGCQMEMGGGENNLKSHSRTNSGISSASGGSTEPTTPDSERPAQALLRDYALNTDSAAGLLIRSIHLV

SEQ ID NO: 752069 - protein, 84 aa, Homo sapiens
MLCAFHGLPPGPARAVSFWNALLAALWAVRLTRIQQDLTDLPRECGGSCGNRVSPHSSEFLEGRIGAEPLLVFRRYFQCLAQRQ

SEQ ID NO: 752070 - protein, 110 aa, Homo sapiens
PPQHPQVPWPQGQSSSQPQLGHPCSLCPGCAPPAPSGPSTTQPRPPSVQPSGGGGGGSGGGGSSSSSNSSAGGGAGKQNGATSYSSVVADSPAEVALSSSGGNNASSQAL

SEQ ID NO: 752071 - protein, 121 aa, Homo sapiens
MEWAACGVLSRWKRYHIKVHLADEALLLPLTVRPRDTLSDLRAQLVGQGVSSWKRAFYYNARRLDDHQTVRDARLQDGSVLLLVSDPSEAQRLTPAIPALWEAEASRSLESRSSRPAWPTW

SEQ ID NO: 752072 - protein, 181 aa, Homo sapiens
MKPWPDQLMHTASDTPAGAPVPDKDLGHFCSCPAYREGALSLSALLCDFEVVAPLLGPWVPCLQWKALCHLGKLPWAARGHRKKRKHRRGRRDTQRHFRSCPGHSPSHTFAQAVPPAWSTFQPLLCSSNTPGIAVSSRKSSQIPSFPAREHLAFFGAPTGPLCSEQPWLGVQPVVSELSND

SEQ ID NO: 752073 - protein, 61 aa, Homo sapiens
LRAQLVGQGVSSWKRAFYYNARRLDDHQTVRDARLQDGSVLLLVSDPRWPRGSGWGGAGAA

SEQ ID NO: 752074 - protein, 118 aa, Homo sapiens
AAGAGGQASRAGARGARGPGPELEPEPGGRHGVGCGGVLSRWKRYHIKVHLADEALLLPLTVRPRDTLSDLRAQLVGQGVSSWKRAFYYNARRLDDHQTVRDARLQDGSVLLLVSDPR

SEQ ID NO: 752075 - protein, 118 aa, Homo sapiens; identical to SEQ ID NO: 752074

SEQ ID NO: 752076 - protein, 108 aa, Homo sapiens
ASRVGTWPWCLISFWTNTWTRAVLPLTCWVTLGKLLLLSGLCYLSPYNKGLSFDLALLHSLPAIPVTAIRWQKTAKFQENRLNPGVRGYSEPKSRHCTPAWRQSRTLS

SEQ ID NO: 752077 - protein, 163 aa, Homo sapiens
MVVSAGPWSGEKAEMNILEINKKSRPQLAENKQQFRNLKQKCLVTQVAYFLANRQNNYDYEDCKDLIKSMLRDERLLTEEKLAEELGQAEELRQYKVLVHSQERELTQLREKLQEGRDASRSLNQHLQALLTPDEPDNSQGRDLREQLAEGCRLAQHLVQKLS

SEQ ID NO: 752078 - protein, 219 aa, Homo sapiens
MPLTPTVQGFQWTLRGPDVETSPFGAPRAASHGVGRHQELRDPTVPGPTSSATNVSMVVSAGPWSGEKAEMNILEINKKSRPQLAENKQQFRNLKQKCLVTQVAYFLANRQNNYDYEDCKDLIKSMLRDERLLTEEKLAEELGQAEELRQYKVLVHSQERELTQLREKLQEGRDASRSLNQHLQALLTPDEPDNSQGRDLREQLAEGCRLAQHLVQKLS

SEQ ID NO: 752079 - protein, 163 aa, Homo sapiens; identical to SEQ ID NO: 752077

SEQ ID NO: 752080 - protein, 106 aa, Homo sapiens
MVWADIKSCEIQQGALGGARITDGIGQCMEMVQQDEVSLEDSVECRETCFEMGLIQSSFLHYHMNAGQPRITLTAPSTQASPAANLRRPGLQNSLPSSRLTKPRWG

SEQ ID NO: 752081 - protein, 42 aa, Homo sapiens
MPRTRTNSEDENAALCQDWLPSPVSVPHWFLKLFEFETAGVT

SEQ ID NO: 752082 - protein, 113 aa, Homo sapiens
EWTNGLLKTHLTKLSHQLKKDWTILLPLALLRIRACLRNATGYSPFELLYRCSFLLGPSLIPDTRPTWTAPPKTCHPYYLLSSHTPIHHSQLLIHALLLFTLPVYTVSPSHHS

SEQ ID NO: 752083 - protein, 243 aa, Homo sapiens
MESGKMASPKSMPKDAQMMAQILKDLGITEYEPRLINQMLEFAFRYVTTILDDAKIYSSHAKKATVDADDVQLAIQFHADQSFTSLPPRDFLLDIARQRNQTPFPLIKPYSGPRLPPDRYCLTAPNYRLKSLQKKASTSTGRVTVPQLSVGSVASRPSTPTLGTPTPQTMSVSTKVGTPVSFTGQRFTVQMPTSQSPAVKSSIPATSAVQNVLINPSLIGSKSFLLPLIRCYHKILPMNHQMH

SEQ ID NO: 752084 - protein, 159 aa, Homo sapiens
CWYYRCEPLHPSKSFFSSRFQEASFPVLKDGAKFSNVPHAVPTKSSFSFLFWASLGPCTCCHLCLGFSSAGLSRPSLHPLPSLPRPLPVLAGATAWTSLAYLLLVSCHLPCLNVSSLRTRTPSCVLNPARLQPFISGWCGAVFGRLLEGPSRLCEGPSC

SEQ ID NO: 752085 - protein, 213 aa, Homo sapiens
QGLIVMSTSLEEIFNCIFDAHVPPLWGKAYPSQKPLAAWTRDLAMRVEQFELWASRARPPVIFWLSGFTFPTGFLTAVLQSSARQNNVSVDSLSWEFIVSTVDDSNLVYPPKDGVWVRGLYLEGAGWDRKNSCLVEAEPMQLVCLMPTIHFRPAESRKKSAKGMYSCPCYYYPNRAGSSDRASFVIGIDLRSGAMTPDHWIKRGTALLMSLDS

SEQ ID NO: 752086 - protein, 75 aa, Homo sapiens
HELGVYYLPDAEGAFRRGPGLNLTSGQYRAPVAGFYALAATLHVALGEPPRRGPPRPRDHLRLLICIQSRCQRNA

SEQ ID NO: 752087 - protein, 81 aa, Homo sapiens
EDGTWPIPKPGGHHLRLLVPLSVPAATSCEPGQGKASSEHCLAWARGALDKGLWGTVSLGPASSSNVCKINSLCIHWAQIF

SEQ ID NO: 752088 - protein, 237 aa, Homo sapiens
HELGVYYLPDAEGAFRRGPGLNLTSGQYRAPVAGFYALAATLHVALGEPPRRGPPRPRDHLRLLICIQSRCQRNASLEAIMGLESSSELFTISVNGVLYLQVSVLSSWACERPPQALPPQGQMEHRSRQCVDSVRVAVATWRRRPTRNSAHTGHCSSAHRATAGRPTDVTRTLVVPEPGLIQDTILDSFLACSAPAQMASASFLCPAPPFPPLFMFSWSAKCTSQGPYLGEGQLTQG

SEQ ID NO: 752089 - protein, 265 aa, Homo sapiens
GGSRGDHPCPSQPDAEGAFRRGPGLNLTSGQYRAPVAGFYALAATLHVALGEPPRRGPPRPRDHLRLLICIQSRCQRNASLEAIMGLESSSELFTISVNGVLYLQVWGSGPPCSWTTPAAAPSQCAVAPTSVLSSWACERPPQALPLRGKWSTDLDNVLDSVRVAVATWRRRPTRNSAHTGHCSSAHRATAGRPTDVTRTLVVPEPGLIQDTILDSFLACSAPAQMASASFLCPAPPFPPLFMFSWSAKCTSQGPYLGEGQLTQG

SEQ ID NO: 752090 - protein, 72 aa, Homo sapiens
RGVRPGGSRGDHPCPSQPDAEGAFRRGPGLNLTSGQYRAPVAGFYALAATLHVGEARGVGGSPALSPTPPPA

SEQ ID NO: 752091 - protein, 85 aa, Homo sapiens
RAESVLSLLASRLSRLLRVFIRLLGDLSREGGCAFIRSRPGLGRLLPGAQKPQGRGGAGLCLRPGQSGAGTAQGALFPGRLISAS

SEQ ID NO: 752092 - protein, 392 aa, Homo sapiens
MGVNQSVGFPPVTGPHLVGCGDVMEGQNLQGSFFRLFYPCQKAEETMEQPLWIPRYEYCTGLAEYLQFNKRCGGLLFNLAVGSCRLPVSWNGPFKTKDSGYPLIIFSHGLGAFRTLYSAFCMELASRGFVVAVPEHRDRSAATTYFCKQAPEENQPTNESLQEEWIPFRRVEEGEKEFHVRNPQVHQRVSECLRVLKILQEVTAGQTVFNILPGGLDLMTLKGNIDMSRVAVMGHSFGGATAILALAKETQFRCAVALDAWMFPLERDFYPKARGPVFFINTEKFQTMESVNLMKKICAQHEQSRIITVLGSVHRSQTDFAFVTGNLIGKFFSTETRGSLDPYEGQEVMVRAMLAFLQKHLDLKEDYNQWNNLIEGIGPSLTPGAPHHLSSL

SEQ ID NO: 752093 - protein, 432 aa, Homo sapiens
ITHFRQQEAERKPASGCCSVFPHPASKFSSGKSFDSPGDEMGVNQSVGFPPVTGPHLVGCGDVMEGQNLQGSFFRLFYPCQKAEETMEQPLWIPRYEYCTGLAEYLQFNKRCGGLLFNLAVGSCRLPVSWNGPFKTKDSGYPLIIFSHGLGAFRTLYSAFCMELASRGFVVAVPEHRDRSAATTYFCKQAPEENQPTNESLQEEWIPFRRVEEGEKEFHVRNPQVHQRVSECLRVLKILQEVTAGQTVFNILPGGLDLMTLKGNIDMSRVAVMGHSFGGATAILALAKETQFRCAVALDAWMFPLERDFYPKARGPVFFINTEKFQTMESVNLMKKICAQHEQSRIITVLGSVHRSQTDFAFVTGNLIGKFFSTETRGSLDPYEGQEVMVRAMLAFLQKHLDLKEDYNQWNNLIEGIGPSLTPGAPHHLSSL

SEQ ID NO: 752094 - protein, 392 aa, Homo sapiens; identical to SEQ ID NO: 752092

SEQ ID NO: 752095 - protein, 392 aa, Homo sapiens; identical to SEQ ID NO: 752092

SEQ ID NO: 752096 - protein, 276 aa, Homo sapiens
ITHFRQQEAERKPASGCCSVFPHPASKFSSGKSFDSPGDEMGVNQSVGFPPVTGPHLVGCGDVMEGQNLQGSFFRLFYPCQKAEETMEQPLWIPRYEYCTGLAEYLQFNKRCGGLLFNLAVGSCRLPVSWNGPFKTKDSGYPLIIFSHGLGAFRTLYSAFCMELASRGFVVAVPEHRDRSAATTYFCKQAPEENQPTNESLQEEWIPFRRVEEGEKEFHVRNPQVHQRVSECLRVLKILQEVTAGQTVFNILPGGLDLMTLKVCGGSGCLDVSSGT

SEQ ID NO: 752097 - protein, 178 aa, Homo sapiens
MCLTFTSLSQGMDYLGSRQYVHRDLAARNVLVESEHQSECAVALDAWMFPLERDFYPKARGPVFFINTEKFQTMESVNLMKKICAQHEQSRIITVLGSVHRSQTDFAFVTGNLIGKFFSTETRGSLDPYEGQEVMVRAMLAFLQKHLDLKEDYNQWNNLIEGIGPSLTPGAPHHLSSL

SEQ ID NO: 752098 - protein, 103 aa, Homo sapiens
MFQLLLFLLHQPGSSHRPWQSYFDLILVDARKPLFFGEGTVLRQVDTKTGKLKIGTYTGPLQHGIVYSGGKSQTSLYLMSLLRPHSESFGNLSAKCHIYCLVV

SEQ ID NO: 752099 - protein, 561 aa, Homo sapiens
MSTSWSDRLQNAADMPANMDKHALKKYRREAYHRVFVNRSLAMEKIKCFGFDMDYTLAVYKSPEYESLGFELTVERLVSIGYPQELLSFAYDSTFPTRGLVFDTLYGNLLKVDAYGNLLVCAHGFNFIRGPETREQYPNKFIQRDDTERFYILNTLFNLPETYLLACLVDFFTNCPRYTSCETGFKDGDLFMSYRSMFQDVRDAVDWVHYKGSLKEKTVENLEKYVVKDGKLPLLLSRMKEVGKVFLATNSDYKYTDKIMTYLFDFPHGPKPGSSHRPWQSYFDLILVDARKPLFFGEGTVLRQVDTKTGKLKIGTYTGPLQHGIVYSGGSSDTICDLLGAKGKDILYIGDHIFGDILKSKKRQGWRTFLVIPELAQELHVWTDKSSLFEELQSLDIFLAELYKHLDSSSNERPDISSIQRRIKKVTHDMDMCYGMMGSLFRSGSRQTLFASQVMRYADLYAASFINLLYYPFSYLFRAAHVLMPHESTVEHTHVDINEMESPLATRNRTSVDFKDTDYKRHQLTRSISEIKPPNLFPLAPQEITHCHDEDDDEEEEEEEE

SEQ ID NO: 752100 - protein, 561 aa, Homo sapiens; identical to SEQ ID NO: 752099

SEQ ID NO: 752101 - protein, 561 aa, Homo sapiens; identical to SEQ ID NO: 752099

SEQ ID NO: 752102 - protein, 365 aa, Homo sapiens
MFQDVRDAVDWVHYKGSLKEKTVENLEKYVVKDGKLPLLLSRMKEVGKVFLATNSDYKYTDKIMTYLFDFPHGPKPGSSHRPWQSYFDLILVDARKPLFFGEGTVLRQVDTKTGKLKIGTYTGPLQHGIVYSGGSSDTICDLLGAKGKDILYIGDHIFGDILKSKKRQGWRTFLVIPELAQELHVWTDKSSLFEELQSLDIFLAELYKHLDSSSNERPDISSIQRRIKKVTHDMDMCYGMMGSLFRSGSRQTLFASQVMRYADLYAASFINLLYYPFSYLFRAAHVLMPHESTVEHTHVDINEMESPLATRNRTSVDFKDTDYKRHQLTRSISEIKPPNLFPLAPQEITHCHDEDDDEEEEEEEE

SEQ ID NO: 752103 - protein, 536 aa, Homo sapiens
MSTSWSDRLQNAADMPANMDKHALKKYRREAYHRVFVNRSLAMEKIKCFGFDMDYTLAVYKSPEYESLGFELTVERLVSIGYPQELLSFAYDSTFPTRGLVFDTLYGNLLKVDAYGNLLVCAHGFNFIRGPETREQYPNKFIQRDDTERFYILNTLFNLPETYLLACLVDFFTNCPRYTSCETGFKDGDLFMSYRSMFQDVRDAVDWVHYKGSLKEKTVENLEKYVVKDGKLPLLLSRMKEVGKVFLATNSDYKYTDFDLILVDARKPLFFGEGTVLRQVDTKTGKLKIGTYTGPLQHGIVYSGGSSDTICDLLGAKGKDILYIGDHIFGDILKSKKRQGWRTFLVIPELAQELHVWTDKSSLFEELQSLDIFLAELYKHLDSSSNERPDISSIQRRIKKVTHDMDMCYGMMGSLFRSGSRQTLFASQVMRYADLYAASFINLLYYPFSYLFRAAHVLMPHESTVEHTHVDINEMESPLATRNRTSVDFKDTDYKRHQLTRSISEIKPPNLFPLAPQEITHCHDEDDDEEEEEEEE

SEQ ID NO: 752104 - protein, 569 aa, Homo sapiens
MSTSWSDRLQNAADMPANMDKHALKKYRREAYHRVFVNRSLAMEKIKCFGFDMDYTLAVYKSPEYESLGFELTVERLVSIGYPQELLSFAYDSTFPTRGLVFDTLYGNLLKVDAYGNLLVCAHGFNFIRGSQVAVQKRPETREQYPNKFIQRDDTERFYILNTLFNLPETYLLACLVDFFTNCPRYTSCETGFKDGDLFMSYRSMFQDVRDAVDWVHYKGSLKEKTVENLEKYVVKDGKLPLLLSRMKEVGKVFLATNSDYKYTDKIMTYLFDFPHGPKPGSSHRPWQSYFDLILVDARKPLFFGEGTVLRQVDTKTGKLKIGTYTGPLQHGIVYSGGSSDTICDLLGAKGKDILYIGDHIFGDILKSKKRQGWRTFLVIPELAQELHVWTDKSSLFEELQSLDIFLAELYKHLDSSSNERPDISSIQRRIKKVTHDMDMCYGMMGSLFRSGSRQTLFASQVMRYADLYAASFINLLYYPFSYLFRAAHVLMPHESTVEHTHVDINEMESPLATRNRTSVDFKDTDYKRHQLTRSISEIKPPNLFPLAPQEITHCHDEDDDEEEEEEEE

SEQ ID NO: 752105 - protein, 510 aa, Homo sapiens
ARGGSLGVYKSPEYESLGFELTVERLVSIGYPQELLSFAYDSTFPTRGLVFDTLYGNLLKVDAYGNLLVCAHGFNFIRGPETREQYPNKFIQRDDTERFYILNTLFNLPETYLLACLVDFFTNCPRYTSCETGFKDGDLFMSYRSMFQDVRDAVDWVHYKGSLKEKTVENLEKYVVKDGKLPLLLSRMKEVGKVFLATNSDYKYTDKIMTYLFDFPHGPKPGSSHRPWQSYFDLILVDARKPLFFGEGTVLRQVDTKTGKLKIGTYTGPLQHGIVYSGGSSDTICDLLGAKGKDILYIGDHIFGDILKSKKRQGWRTFLVIPELAQELHVWTDKSSLFEELQSLDIFLAELYKHLDSSSNERPDISSIQRRIKKVTHDMDMCYGMMGSLFRSGSRQTLFASQVMRYADLYAASFINLLYYPFSYLFRAAHVLMPHESTVEHTHVDINEMESPLATRNRTSVDFKDTDYKRHQLTRSISEIKPPNLFPLAPQEITHCHDEDDDEEEEEEEE

SEQ ID NO: 752106 - protein, 365 aa, Homo sapiens; identical to SEQ ID NO: 752102

SEQ ID NO: 752107 - protein, 365 aa, Homo sapiens; identical to SEQ ID NO: 752102

SEQ ID NO: 752108 - protein, 268 aa, Homo sapiens
ELRTIRRVLCQVDTKTGKLKIGTYTGPLQHGIVYSGGSSDTICDLLGAKGKDILYIGDHIFGDILKSKKRQGWRTFLVIPELAQELHVWTDKSSLFEELQSLDIFLAELYKHLDSSSNERPDISSIQRRIKKVTHDMDMCYGMMGSLFRSGSRQTLFASQVMRYADLYAASFINLLYYPFSYLFRAAHVLMPHESTVEHTHVDINEMESPLATRNRTSVDFKDTDYKRHQLTRSISEIKPPNLFPLAPQEITHCHDEDDDEEEEEEEE

SEQ ID NO: 752109 - protein, 301 aa, Homo sapiens [sequence omitted]

SEQ ID NO: 752110 - protein, 132 aa, Homo sapiens
MDMCYGMMGSLFRSGSRQTLFASQVMRYADLYAASFINLLYYPFSYLFRAAHVLMPHESTVEHTHVDINEMESPLATRNRTSVDFKDTDYKRHQLTRSISEIKPPNLFPLAPQEITHCHDEDDDEEEEEEEE

SEQ ID NO: 752111 - protein, 561 aa, Homo sapiens; identical to SEQ ID NO: 752099

SEQ ID NO: 752112 - protein, 251 aa, Homo sapiens
MSTSWSDRLQNAADMPANMDKHALKKYRREAYHRVFVNRSLAMEKIKCFGFDMDYTLAVYKSPEYESLGFELTVERLVSIGYPQELLSFAYDSTFPTRGLVFDTLYGNLLKVDAYGNLLVCAHGFNFIRGSQVAVQKRPETREQYPNKFIQRDDTERFYILNTLFNLPETYLLACLVDFFTNCPRYTSCETGFKDGDLFMSYRSMFQDVRDAVDWVHYKGSLKEKTVENLEKYVVKDSKSSRIQYFLKVLW

SEQ ID NO: 752113 - protein, 239 aa, Homo sapiens [sequence omitted]

SEQ ID NO: 752114 - protein, 108 aa, Homo sapiens
GAGRMPRDGDPQKGKAGVPSFEDLQTRGTDRRSAVRERRLRRTLRRSWGTEQRAGPWPGASRGAARGGAGRRGRGGRALRRLRQLRAGIVAVRWSRVSLCCPGWSTVM

SEQ ID NO: 752115 - protein, 206 aa, Homo sapiens
MSTSWSDRLQNAADMPANMDKHALKKYRREAYHRVFVNRSLAMEKIKCFGFDMDYTLAVYKSPEYESLGFELTVERLVSIGYPQELLSFAYDSTFPTRGLVFDTLYGNLLKVDAYGNLLVCAHGFNFIRGPETREQYPNKFIQRDDTERFYILNTLFNLPETYLLACLVDFFTNCPRYTSEFSASERCHIANLRDGTAPAAPCRLS

SEQ ID NO: 752116 - protein, 561 aa, Homo sapiens; identical to SEQ ID NO: 752099

SEQ ID NO: 752117 - protein, 561 aa, Homo sapiens; identical to SEQ ID NO: 752099

SEQ ID NO: 752118 - protein, 561 aa, Homo sapiens; identical to SEQ ID NO: 752099

SEQ ID NO: 752119 - protein, 561 aa, Homo sapiens; identical to SEQ ID NO: 752099

SEQ ID NO: 752120 - protein, 561 aa, Homo sapiens; identical to SEQ ID NO: 752099

SEQ ID NO: 752121 - protein, 365 aa, Homo sapiens; identical to SEQ ID NO: 752102

SEQ ID NO: 752122 - protein, 365 aa, Homo sapiens; identical to SEQ ID NO: 752102

SEQ ID NO: 752123 - protein, 502 aa, Homo sapiens
MSTSWSDRLQNAADMPANMDKHALKKYRREAYHRVFVNRSLAMEKIKCFGFDMDYTLAVYKSPEYESLGFELTVERLVSIGYPQELLSFAYDSTFPTRGLVFDTLYGNLLKVDAYGNLLVCAHGFNFIRGPETREQYPNKFIQRDDTERFYILNTLFNLPETYLLACLVDFFTNCPRYTSCETGFKDGDLFMSYRSMFQDVRDAVDWVHYKGSLKEKTVENLEKYVVKDGKLPLLLSRMKEVGKVFLATNSDYKYTDKIMTYLFDFPHGPKPGSSHRPWQSYFDLILVDARKPLFFGEGTVLRQVDTKTGKLKIGTYTGPLQHGIVYSGGSSDTICDLLGAKGKDILYIGDHIFGDILKSKKRQGWRTFLVIPELAQELHVWTDKSSLFEELQSLDIFLAELYKHLDSSSNERPDISSIQRRIKMPHESTVEHTHVDINEMESPLATRNRTSVDFKDTDYKRHQLTRSISEIKPPNLFPLAPQEITHCHDEDDDEEEEEEEE

SEQ ID NO: 752124 - protein, 266 aa, Homo sapiens
MIKYYKIHILHKKTGKLKIGTYTGPLQHGIVYSGGSSDTICDLLGAKGKDILYIGDHIFGDILKSKKRQGWRTFLVIPELAQELHVWTDKSSLFEELQSLDIFLAELYKHLDSSSNERPDISSIQRRIKKVTHDMDMCYGMMGSLFRSGSRQTLFASQVMRYADLYAASFINLLYYPFSYLFRAAHVLMPHESTVEHTHVDINEMESPLATRNRTSVDFKDTDYKRHQLTRSISEIKPPNLFPLAPQEITHCHDEDDDEEEEEEEE

SEQ ID NO: 752125 - protein, 95 aa, Homo sapiens
GDLEDLLLLPLQGLPCLMPHESTVEHTHVDINEMESPLATRNRTSVDFKDTDYKRHQLTRSISEIKPPNLFPLAPQEITHCHDEDDDEEEEEEEE

SEQ ID NO: 752126 - protein, 243 aa, Homo sapiens
MSTSWSDRLQNAADMPANMDKHALKKYRREAYHRVFVNRSLAMEKIKCFGFDMDYTLAVYKSPEYESLGFELTVERLVSIGYPQELLSFAYDSTFPTRGLVFDTLYGNLLKVDAYGNLLVCAHGFNFIRGPETREQYPNKFIQRDDTERFYILNTLFNLPETYLLACLVDFFTNCPRYTSCETGFKDGDLFMSYRSMFQDVRDAVDWVHYKGSLKEKTVENLEKYVVKDSKSSRIQYFLKVLW

SEQ ID NO: 752127 - protein, 287 aa, Homo sapiens
MSTSWSDRLQNAADMPANMDKHALKKYRREAYHRVFVNRSLAMEKIKCFGFDMDYTLAVYKSPEYESLGFELTVERLVSIGYPQELLSFAYDSTFPTRGLVFDTLYGNLLKVDAYGNLLVCAHGFNFIRGPETREQYPNKFIQRDDTERFYILNTLFNLPETYLLACLVDFFTNCPRYTSCETGFKDGDLFMSYRSMFQDVRDAVDWVHYKGSLKEKTVENLEKYVVKDGKLPLLLSRMKEVGKVFLATNSDYKYTDNNFMTLPVWISHMGPSLGAPIRTMGSPYLT

SEQ ID NO: 752128 - protein, 69 aa, Homo sapiens
VRCNPKLTCVKLYQTSRFSQPVSIPVAHEKTSFPQRLHHEIQSNLIFFKNLFWLGVVVHACNPIIYSGG

SEQ ID NO: 752129 - protein, 108 aa, Homo sapiens; identical to SEQ ID NO: 752114

SEQ ID NO: 752130 - protein, 225 aa, Homo sapiens
MGAFPSSVQIGGLFIRNTDQEYTAFRLAIFLHNTSPNASEAPFNLVPHVDNIETANSFAVTNAFCSQYSRGVFAIFGLYDKRSVHTLTSFCSALHISLITPSFPTEGESQFVLQLRPSLRGALLSLLDHYEWNCFVFLYDTDRGYSILQAIMEKAGQNGWHVSAICVENFNDVSYRQLLEELDRRQEKKFVIDCEIERLQNILEQVSPRFYIFNLDPIQKNLTFD

SEQ ID NO: 752131 - protein, 902 aa, Homo sapiens
MRIISRQIVLLFSGFWGLAMGAFPSSVQIGGLFIRNTDQEYTAFRLAIFLHNTSPNASEAPFNLVPHVDNIETANSFAVTNAFCSQYSRGVFAIFGLYDKRSVHTLTSFCSALHISLITPSFPTEGESQFVLQLRPSLRGALLSLLDHYEWNCFVFLYDTDRGYSILQAIMEKAGQNGWHVSAICVENFNDVSYRQLLEELDRRQEKKFVIDCEIERLQNILEQIVSVGKHVKGYHYIIANLGFKDISLERFIHGGANVTGFQLVDFNTPMVIKLMDRWKKLDQREYPGSETPPKYTSALTYDGVLVMAETFRSLRRQKIDISRRGNAGDCLANPAAPWGQGIDMERTLKQVRIQGLTGNVQFDHYGRRVNYTMDVFELKSTGPRKVGYWNDMDKLVLIQDVPTLGNDTAAIENRTVVVTTIMESPYVMYKKNHEMFEGNDKYEGYCVDLASEIAKHIGIKYKIAIVPDGKYGARDADTKIWNGMVGELVYGKAEIAIAPLTITLVREEVIDFSKPFMSLGISIMIKKPQKSKPGVFSFLDPLAYEIWMCIVFAYIGVSVVLFLVSRFSPYEWHTEEPEDGKEGPSDQPPNEFGIFNSLWFSLGAFMQQGCDISPRSLSGRIVGGVWWFFTLIIISSYTANLAAFLTVERMVSPIESAEDLAKQTEIAYGTLDSGSTKEFFRRSKIAVYEKMWTYMRSAEPSVFTRTTAEGVARVRKSKGKFAFLLESTMNDNIEQRKPCDTMKVGGNLDSKGYGVATPKGSSLRTPVNLAVLKLSEAGVLDKLKNKWWYDKGECGPKDSGSKDKTSALSLSNVAGVFYILVGGLGLAMLVALIEFCYKSRAEAKRMKLTFSEAIRNKARLSITGSVGENGRVLTPDCPKAVHTGTAIRQSSGLAVIASDLP

SEQ ID NO: 752132 - protein, 902 aa, Homo sapiens; identical to SEQ ID NO: 752131

SEQ ID NO: 752133 - protein, 732 aa, Homo sapiens
MEKAGQNGWHVSAICVENFNDVSYRQLLEELDRRQEKKFVIDCEIERLQNILEQIVSVGKHVKGYHYIIANLGFKDISLERFIHGGANVTGFQLVDFNTPMVIKLMDRWKKLDQREYPGSETPPKYTSALTYDGVLVMAETFRSLRRQKIDISRRGNAGDCLANPAAPWGQGIDMERTLKQVRIQGLTGNVQFDHYGRRVNYTMDVFELKSTGPRKVGYWNDMDKLVLIQDVPTLGNDTAAIENRTVVVTTIMESPYVMYKKNHEMFEGNDKYEGYCVDLASEIAKHIGIKYKIAIVPDGKYGARDADTKIWNGMVGELVYGKAEIAIAPLTITLVREEVIDFSKPFMSLGISIMIKKPQKSKPGVFSFLDPLAYEIWMCIVFAYIGVSVVLFLVSRFSPYEWHTEEPEDGKEGPSDQPPNEFGIFNSLWFSLGAFMQQGCDISPRSLSGRIVGGVWWFFTLIIISSYTANLAAFLTVERMVSPIESAEDLAKQTEIAYGTLDSGSTKEFFRRSKIAVYEKMWTYMRSAEPSVFTRTTAEGVARVRKSKGKFAFLLESTMNDNIEQRKPCDTMKVGGNLDSKGYGVATPKGSSLRTPVNLAVLKLSEAGVLDKLKNKWWYDKGECGPKDSGSKDKTSALSLSNVAGVFYILVGGLGLAMLVALIEFCYKSRAEAKRMKLTFSEAIRNKARLSITGSVGENGRVLTPDCPKAVHTGTAIRQSSGLAVIASDLP

SEQ ID NO: 752134 - protein, 78 aa, Homo sapiens
RHRLQCFSEQPLGRVREKERERAPGRGEKKMRIISRQIVLLFSGFWGLAMGAFPSSVQIGKVCSDGVCMWLVVADIRK

SEQ ID NO: 752135 - protein, 107 aa, Homo sapiens
EAEMDYSNWEPDAPSSHFNGVVVVELQRKERPPVRFLPLPGPLYHSKSQGQLAVFTTLLMFFWRHQLNHSHHRSEGAGPSLLPAGSSPSSLPSSLIPPRSWNGPEFQ

SEQ ID NO: 752136 - protein, 430 aa, Homo sapiens
MSFTTRSTFSTNYRSLGSVQAPSYGARPVSSAASVYAGAGGSGSRISVSRSTSFRGGMGSGGLATGIAGGLAGMGGIQNEKETMQSLNDRLASYLDRVRSLETENRRLESKIREHLEKKGPQVRDWSHYFKIIEDLRAQIFANTVDNARIVLQIDNARLAADDFRVKYETELAMRQSVENDIHGLRKVIDDTNITRLQLETEIEALKEELLFMKKNHEEEVKGLQAQIASSGLTVEVDAPKSQDLAKIMADIRAQYDELARKNREELDKYWSQQIEESTTVVTTQSAEVGAAETTLTELRRTVQSLEIDLDSMRNLKASLENSLREVEARYALQMEQLNGILLHLESELAQTRAEGQRQAQEYEALLNIKVKLEAEIATYRRLLEDGEDFNLGDALDSSNSMQTIQKTTTRRIVDGKVVSETNDTKVLRH

SEQ ID NO: 752137 - protein, 354 aa, Homo sapiens
MSFTTRSTFSTNYRSLGSVQAPSYGARPVSSAASVYAGAGGSGSRISVSRSTSFRGGMGSGGLATGIAGGLAGMGGIQNEKETMQSLNDRLASYLDRVRSLETENRRLESKIREHLEKKGPQVRDWSHYFKEELLFMKKNHEEEVKGLQAQIASSGLTVEVDAPKSQDLAKIMADIRAQYDELARKNREELDKYWSQQIEESTTVVTTQSAEVGAAETTLTELRRTVQSLEIDLDSMRNLKASLENSLREVEARYALQMEQLNGILLHLESELAQTRAEGQRQAQEYEALLNIKVKLEAEIATYRRLLEDGEDFNLGDALDSSNSMQTIQKTTTRRIVDGKVVSETNDTKVLRH

SEQ ID NO: 752138 - protein, 124 aa, Homo sapiens
RDGRVSPCPGLSLSGTLPVRAEPGGTRLMVGALGRKLCWELEGALDPEVRCGWREWTQTSLFSTTWARRSVCVQFLTSPSPFLPFCLPEDTGPRDAPGEKGNRERGASISYETELFIRLGPVPL

SEQ ID NO: 752139 - protein, 111 aa, Homo sapiens
MYFVFIQLLSSGSAWFAIILMVVTCLFLDIIKKVFDEHLHPTSTEKAQMYSNTVALSDEFIALQPLSRARNQLSKLSLLKQMQVSSAWTPCAVSRKEKQRVHLLEECWNEL

SEQ ID NO: 752140 - protein, 874 aa, Homo sapiens
STILKYTWQAEEKWDEPWYNQKTEHQRNSSKILRFISDFLAFLVLYNFIIPISLYVTVEMQKFLGSFFIGWDLDLYHEESDQKAQVNTSDLNEELGQVEYVFTDKTGTLTENEMQFRECSINGMKYQEINGRLVPEGPTPDSSEGNLSYLSSLSHLNNLSHLTTSSSFRTSPENETELIKEHDLFFKAVSLCHTVQISNVQTDCTGDGPWQSNLAPSQLEYYASSPDEKALVEAAARIGIVFIGNSEETMEVKTLGKLERYKLLHILEFDSDRRRMSVIVQAPSGEKLLFAKGAESSILPKCIGGEIEKTRIHVDEFALKGLRTLCIAYRKFTSKEYEEIDKRIFEARTALQQREEKLAAVFQFIEKDLILLGATAVEDRLQDKVRETIEALRMAGIKVWVLTGDKHETAVSVSLSCGHFHRTMNILELINQKSDSECAEQLRQLARRITEDHVIQHGLVVDGTSLSLALREHEKLFMEVCRNCSAVLCCRMAPLQKAKVIRLIKISPEKPITLAVGDGANDVSMIQEAHVGIGIMGKEGRQAARNSDYAIARFKFLSKLLFVHGHFYYIRIATLVQYFFYKNVCFITPQFLYQFYCLFSQQTLYDSVYLTLYNICFTSLPILIYSLLEQHVDPHVLQNKPTLYRDISKNRLLSIKTFLYWTILGFSHAFIFFFGSYLLIGKDTSLLGNGQMFGNWTFGTLVFTVMVITVTVKMALETHFWTWINHLVTWGSIIFYFVFSLFYGGILWPFLGSQNMYFVFIQLLSSGSAWFAIILMVVTCLFLDIIKKVFDRHLHPTSTEKAQLTETNAGIKCLDSMCCFPEGEAACASVGRMLERVIGRCSPTHISRSWSASDPFYTNDRSILTLSTMDSSTC

SEQ ID NO: 752141 - protein, 874 aa, Homo sapiens; identical to SEQ ID NO: 752140

SEQ ID NO: 752142 - protein, 874 aa, Homo sapiens; identical to SEQ ID NO: 752140

SEQ ID NO: 752143 - protein, 874 aa, Homo sapiens; identical to SEQ ID NO: 752140

SEQ ID NO: 752144 - protein, 874 aa, Homo sapiens; identical to SEQ ID NO: 752140

SEQ ID NO: 752145 - protein, 874 aa, Homo sapiens; identical to SEQ ID NO: 752140

SEQ ID NO: 752146 - protein, 859 aa, Homo sapiens
STILKYTWQAEEKWDEPWYNQKTEHQRNSSKILRFISDFLAFLVLYNFIIPISLYVTVEMQKFLGSFFIGWDLDLYHEESDQKAQVNTSDLNEELGQVEYVFTDKTGTLTENEMQFRECSINGMKYQEINGRLVPEGPTPDSSEGNLSYLSSLSHLNNLSHLTTSSSFRTSPENETELIKEHDLFFKAVSLCHTVQISNVQTDCTGDGPWQSNLAPSQLEYYASSPDEKALVEAAARIGIVFIGNSEETMEVKTLGKLERYKLLHILEFDSDRRRMSVIVQAPSGEKLLFAKGAESSILPKCIGGEIEKTRIHVDEFALKGLRTLCIAYRKFTSKEYEEIDKRIFEARTALQQREEKLAAVFQFIEKDLILLGATAVEDRLQDKVRETIEALRMAGIKVWVLTGDKHETAVSVSLSCGHFHRTMNILELINQKSDSECAEQLRQLARRITEDHVIQHGLVVDGTSLSLALREHEKLFMEVCRNCSAVLCCRMAPLQKAKVIRLIKISPEKPITLAVGDGANDVSMIQEAHVGIGIMGKEGRQAARNSDYAIARFKFLSKLLFVHGHFYYIRIATLVQYFFYKNVCFITPQFLYQFYCLFSQQTLYDSVYLTLYNICFTSLPILIYSLLEQHVDPHVLQNKPTLYRDISKNRLLSIKTFLYWTILGFSHAFIFFFGSYLLIGKDTSLLGNGQMFGNWTFGTLVFTVMVITVTVKMALETHFWTWINHLVTWGSIIFYFVFSLFYGGILWPFLGSQNMYFVFIQLLSSGSAWFAIILMVVTCLFLDIIKKVFDRHLHPTSTEKAQLTETNAGIKCLDSMCCFPEGEAACASVGRMLERVIGRCSPTHISRCEISLSSLCCR

SEQ ID NO: 752147 - protein, 79 aa, Homo sapiens
QNMYFVFIQLLSSGSAWFAIILMVVTCLFLDIIKKVFDEHLHPTSTEKAQMYSNTVALSDEFIALQPLSRARNQLSKLR

SEQ ID NO: 752148 - protein, 537 aa, Homo sapiens
MLARETYEEDREYESQAKRLKTEEGEIDYSAEEGENRREATPRGGGDGGGGGRSFSQPEAGGSHHKVSVSPVVHVRGLCESVVEADLVEALEKFGTICYVMMMPFKRQALVEFENIDSAKECVTFAADEPVYIAGQQAFFNYSTSKRITRPGNTDDPSGGNKVLLLSIQNPLYPITVDVLYTVCNPVGKVQRIVIFKRNGIQAMVEFESVLCAQKAKAALNGADIYAGCCTLKIEYARPTRLNVIRNDNDSWDYTKPYLGRRDRGKGRQRQAILGEHPSSFRHDGYGSHGPLLPLPSRYRMGSRDTPELVAYPLPQASSSYMHGGNPSGSVVMVSGLHQLKMNCSRVFNLFCLYGNIEKVKFMKTIPGTALVEMGDEYAVERAVTHLNNVKLFGKRLNVCVSKQHSVVPSQIFELEDGTSSYKDFAMSKNNRFTSAGQASKNIIQPPSCVLHYYNVPLCVTEETFTKLCNDHEVLTFIKYKVFDAKPSAKTLSGLLEWECKTDAVEALTALNHYQIRVPNGSNPYTLKLCFSTSSHL

SEQ ID NO: 752149 - protein, 542 aa, Homo sapiens
MSSSSSSPRETYEEDREYESQAKRLKTEEGEIDYSAEEGENRREATPRGGGDGGGGGRSFSQPEAGGSHHKVSVSPVVHVRGLCESVVEADLVEALEKFGTICYVMMMPFKRQALVEFENIDSAKECVTFAADEPVYIAGQQAFFNYSTSKRITRPGNTDDPSGGNKVLLLSIQNPLYPITVDVLYTVCNPVGKVQRIVIFKRNGIQAMVEFESVLCAQKAKAALNGADIYAGCCTLKIEYARPTRLNVIRNDNDSWDYTKPYLGRRDRGKGRQRQAILGEHPSSFRHDGYGSHGPLLPLPSRYRMGSRDTPELVAYPLPQASSSYMHGGNPSGSVVMVSGLHQLKMNCSRVFNLFCLYGNIEKVKFMKTIPGTALVEMGDEYAVERAVTHLNNVKLFGKRLNVCVSKQHSVVPSQIFELEDGTSSYKDFAMSKNNRFTSAGQASKNIIQPPSCVLHYYNVPLCVTEETFTKLCNDHEVLTFIKYKVFDAKPSAKTLSGLLEWECKTDAVEALTALNHYQIRVPNGSNPYTLKLCFSTSSHL

SEQ ID NO: 752150 - protein, 542 aa, Homo sapiens; identical to SEQ ID NO: 752149

SEQ ID NO: 752151 - protein, 570 aa, Homo sapiens
MSSSSSSPRETYEEDREYESQAKRLKTEEGEIDYSAEEGENRREATPRGGGDGGGGGRSFSQPEAGGSHHKVSVSPVVHVRGLCESVVEADLVEALEKFGTICYVMMMPFKRQALVEFENIDSAKECVTFAADEPVYIAGQQAFFNYSTSKRITRPGNTDDPSGGNKVLLLSIQNPLYPITVDVLYTVCNPVGKVQRIVIFKRNGIQAMVEFESVLCAQKAKAALNGADIYAGCCTLKIEYARPTRLNVIRNDNDSWDYTKPYLGRRGCCWLMLKLLERSPLGKCVAVEANEYDSDRGKGRQRQAILGEHPSSFRHDGYGSHGPLLPLPSRYRMGSRDTPELVAYPLPQASSSYMHGGNPSGSVVMVSGLHQLKMNCSRVFNLFCLYGNIEKVKFMKTIPGTALVEMGDEYAVERAVTHLNNVKLFGKRLNVCVSKQHSVVPSQIFELEDGTSSYKDFAMSKNNRFTSAGQASKNIIQPPSCVLHYYNVPLCVTEETFTKLCNDHEVLTFIKYKVFDAKPSAKTLSGLLEWECKTDAVEALTALNHYQIRVPNGSNPYTLKLCFSTSSHL

SEQ ID NO: 752152 - protein, 435 aa, Homo sapiens
MPFKRQALVEFENIDSAKECVTFAADEPVYIAGQQAFFNYSTSKRITRPGNTDDPSGGNKVLLLSIQNPLYPITVDVLYTVCNPVGKVQRIVIFKRNGIQAMVEFESVLCAQKAKAALNGADIYAGCCTLKIEYARPTRLNVIRNDNDSWDYTKPYLGRRDRGKGRQRQAILGEHPSSFRHDGYGSHGPLLPLPSRYRMGSRDTPELVAYPLPQASSSYMHGGNPSGSVVMVSGLHQLKMNCSRVFNLFCLYGNIEKVKFMKTIPGTALVEMGDEYAVERAVTHLNNVKLFGKRLNVCVSKQHSVVPSQIFELEDGTSSYKDFAMSKNNRFTSAGQASKNIIQPPSCVLHYYNVPLCVTEETFTKLCNDHEVLTFIKYKVFDAKPSAKTLSGLLEWECKTDAVEALTALNHYQIRVPNGSNPYTLKLCFSTSSHL

SEQ ID NO: 752153 - protein, 542 aa, Homo sapiens; identical to SEQ ID NO: 752149

SEQ ID NO: 752154 - protein, 524 aa, Homo sapiens
MSSSSSSPRETYEEDREYESQAKRLKTEEGEIDYSAEEGENRREATPRGGGDGGGGGRSFSQPEAGGSHHKVSVSPVVHVRGLCESVVEADLVEALEKFGTICYVMMMPFKRQALVEFENIDSAKECVTFAADEPVYIAGQQAFFNYSTSKRITRPGNTDDPSGGNKVLLLSIQNPLYPITVDVLYTVCNPVGKVQRIVIFKRNGIQAMVEFESVLCAQKAKAALNGADIYAGCCTLSWDYTKPYLGRRDRGKGRQRQAILGEHPSSFRHDGYGSHGPLLPLPSRYRMGSRDTPELVAYPLPQASSSYMHGGNPSGSVVMVSGLHQLKMNCSRVFNLFCLYGNIEKVKFMKTIPGTALVEMGDEYAVERAVTHLNNVKLFGKRLNVCVSKQHSVVPSQIFELEDGTSSYKDFAMSKNNRFTSAGQASKNIIQPPSCVLHYYNVPLCVTEETFTKLCNDHEVLTFIKYKVFDAKPSAKTLSGLLEWECKTDAVEALTALNHYQIRVPNGSNPYTLKLCFSTSSHL

SEQ ID NO: 752155 - protein, 556 aa, Homo sapiens
MSSSSSSPRETYEEDREYESQAKRLKTEEGEIDYSAEEGENRREATPRGGGDGGGGGRSFSQPEAGGSHHKVSVSPVVHVRGLCESVVEADLVEALEKFGTICYVMMMPFKRQALVEFENIDSAKECVTFAADEPVYIAGQQAFFNYSTSKRITRPGNTDDPSGGNKVLLLSIQNPLYPITVDVLYTVCNPVGKVQRIVIFKRNGIQAMVEFESVLCAQKAKAALNGADIYAGCCTLKIEYARPTRLNVIRNDNDSWDYTKPYLGRRDRGKGRQRQAILGEHPSSFRHDGYGSHGPLLPLPSRYRMGSRDTPELVAYPLPQASSSYMHGGNPSGSVVMVSGLHQLKMNCSRVFNLFCLYGNIEKVKFMKTIPGTALVEMGDEYAVERAVTHLNNVKLFGKRLNVCVSKQHSVVPSQIFELEDGTSSYKDFAMSKNNRFTSAGQASKNIIQPPSCVLHYYNVPLCVTEETFTKLCNDHEVLTFIKYKVFDAKPSAKTLSGLLEWECKTDAVEALTALNHYQIRVPKTGFHHVGQAGLELLDLMICPPPPSEVLGLQA

SEQ ID NO: 752156 - protein, 275 aa, Homo sapiens
MLARETYEEDREYESQAKRLKTEEGEIDYSAEEGENRREATPRGGGDGGGGGRSFSQPEAGGSHHKVSVSPVVHVRGLCESVVEADLVEALEKFGTICYVMMMPFKRQALVEFENIDSAKECVTFAADEPVYIAGQQAFFNYSTSKRITRPGNTDDPSGGNKVLLLSIQNPLYPITVDVLYTVCNPVGKVQRIVIFKRNGIQAMVEFESVLCAQKAKAALNGADIYAGCCTLKIEYARPTRLNVIRNDNDSWDYTKPYLGRRGRYFIHFRMYLIC

SEQ ID NO: 752157 - protein, 280 aa, Homo sapiens [sequence omitted]

SEQ ID NO: 752158 - protein, 667 aa, Homo sapiens
MGSPVDFPAPANREQNPGRGGRFPQAAAGFDPARRPRRRGRRLGLRGWERLRGGGKTGSHGCVPILRFAPPGRERRRRRRRERLNVGSVIERSGRSRASSRGAPLSPSALLSRQSPGRAVPADGRAAETLAEEALPAARTGRRHPRRAPHRHPHPPASRSEAGGSHHKVSVSPVVHVRGLCESVVEADLVEALEKFGTICYVMMMPFKRQALVEFENIDSAKECVTFAADEPVYIAGQQAFFNYSTSKRITRPGNTDDPSGGNKVLLLSIQNPLYPITVDVLYTVCNPVGKVQRIVIFKRNGIQAMVEFESVLCAQKAKAALNGADIYAGCCTLKIEYARPTRLNVIRNDNDSWDYTKPYLGRRGCCWLMLKLLERSPLGKCVAVEANEYDSDRGKGRQRQAILGEHPSSFRHDGYGSHGPLLPLPSRYRMGSRDTPELVAYPLPQASSSYMHGGNPSGSVVMVSGLHQLKMNCSRVFNLFCLYGNIEKVKFMKTIPGTALVEMGDEYAVERAVTHLNNVKLFGKRLNVCVSKQHSVVPSQIFELEDGTSSYKDFAMSKNNRFTSAGQASKNIIQPPSCVLHYYNVPLCVTEETFTKLCNDHEVLTFIKYKVFDAKPSAKTLSGLLEWECKTDAVEALTALNHYQIRVPNGSNPYTLKLCFSTSSHL

SEQ ID NO: 752159 - protein, 542 aa, Homo sapiens; identical to SEQ ID NO: 752149

SEQ ID NO: 752160 - protein, 526 aa, Homo sapiens
MSSSSSSPRETYEEDREYESQAKRLKTEEGEIDYSAEEGENRREATPRGGGDGGGGGRSFSQPEAGGSHHKVSVSPVVHVRGLCESVVEADLVEALEKFGTICYVMMMPFKRQALVEFENIDSAKECVTFAADEPVYIAGQQAFFNYSTSKRITRPGNTDDPSGGNKVLLLSIQNPLYPITVDVLYTVCNPVGKVQRIVIFKRNGIQAMVEFESVLCAQKAKAALNGADIYAGCCTLKIEYARPTRLNVIRNDNDSWDYTKPYLGRRDRGKGRQRQAILGEHPSSFRHDGYGSHGPLLPLPSRYRMGSRDTPELVAYPLPQASSSYMHGGNPSGSVVMVSGLHQLKMNCSRVFNLFCLYGNIEKVKFMKTIPGTALVEMGDEYAVERAVTHLNNVKLFGKRLNVCVSKQHSVVPSQIFELEDGTSSYKDFAMSKNNRFTSAGQASKNIIQPPSCVLHYYNVPLCVTEETFTKLCNDHEVLTFIKYKVFDAKPSAKTLSGLLEWECKTDAVEALTALNHYQIRVPSK

SEQ ID NO: 752161 - protein, 565 aa, Homo sapiens
MSSSSSSPRETYEEDREYESQAKRLKTEEGEIDYSAEEGENRREATPRGGGDGGGGGRSFSQPEAGGSHHKVSVSPVVHVRGLCESVVEADLVEALEKFGTICYVMMMPFKRQALVEFENIDSAKECVTFAADEPVYIAGQQAFFNYSTSKRITRPGNTDDPSGGNKVLLLSIQNPLYPITVDVLYTVCNPVGKVQRIVIFKRNGIQAMVEFESVLCAQKAKAALNGADIYAGCCTLKIEYARPTRLNVIRNDNDSWDYTKPYLGRRDRGKGRQRQAILGEHPSSFRHDGYGSHGPLLPLPSRYRMGSRDTPELVAYPLPQASSSYMHGGNPSGSVVMVSGLHQLKMNCSRVFNLFCLYGNIEKVKFMKTIPGTALVEMGDEYAVERAVTHLNNVKLFGKRLNVCVSKQHSVVPSQIFELEDGTSSYKDFAMSKNNRFTSAGQASKNIIQPPSCVLHYYNVPLCVTEETFTKLCNDHEVLTFIKYKVFDAKPSAKTLSGLLEWECKTDAVEALTALNHYQIRVPNGSNPYTMKCSFEIVIKVNINSNMLFSSYKWDDVEKQSFNV

SEQ ID NO: 752162 - protein, 262 aa, Homo sapiens
MSSSSSSPRETYEEDREYESQAKRLKTEEGEIDYSAEEGENRREATPRGGGDGGGGGRSFSQPEAGGSHHKVSVSPVVHVRGLCESVVEADLVEALEKFGTICYVMMMPFKRQALVEFENIDSAKECVTFAADEPVYIAGQQAFFNYSTSKRITRPGNTDDPSGGNKVLLLSIQNPLYPITVDVLYTVCNPVGKVQRIVIFKRNGIQAMVEFESVLCAQKAKAALNGADIYAGCCTLKIEYARVNIFFNTLPKKYLCFGYAV

SEQ ID NO: 752163 - protein, 83 aa, Homo sapiens
MSMAFLTCCLLKCVKKSKRRRSNRSAQLWSQLKDEDLETVQAAYLGLKHFNKPVSGPSQAHDNHSFTTPVCKLGATTRDLLAS

SEQ ID NO: 752164 - protein, 242 aa, Homo sapiens
MKNIGLVMEWEIPEIICTCAKLRLPPQATFQVLRGNGASVGTVLMFRCPSNHQMVGSGLLTCTWKGSIAEWSSGSPVCKLVPPHETFGFKVAVIASIVSCAIILLMSMAFLTCCLLKCVKKSKRRRSNRSAQLWSQLKDEDLETVQAAYLGLKHFNKPVSGPSQAHDNHSFTTDHGESTSKLASVTRSVDKDPGIPRALSLSGSSSSPQAQVMVHMANPRQPLPASGLATGMPQQPAAYALG

SEQ ID NO: 752165 - protein, 286 aa, Homo sapiens
PPLTQAQAQAPPPQAGLTRLADPAKRLGARRMRWAAATLRGKARPRGRAGVTTPAPGNRTGTCAKLRLPPQATFQVLRGNGASVGTVLMFRCPSNHQMVGSGLLTCTWKGSIAEWSSGSPVCKLVPPHETFGFKVAVIASIVSCAIILLMSMAFLTCCLLKCVKKSKRRRSNRSAQLWSQLKDEDLETVQAAYLGLKHFNKPVSGPSQAHDNHSFTTDHGESTSKLASVTRSVDKDPGIPRALSLSGSSSSPQAQVMVHMANPRQPLPASGLATGMPQQPAAYALG

SEQ ID NO: 752166 - protein, 286 aa, Homo sapiens; identical to SEQ ID NO: 752165

SEQ ID NO: 752167 - protein, 286 aa, Homo sapiens; identical to SEQ ID NO: 752165

SEQ ID NO: 752168 - protein, 209 aa, Homo sapiens
PPLTQAQAQAPPPQAGLIAWQTPPSASERAGCAGRPPPSVARRGPGGGPGSPRLPQGTAQVRAGAEWPRAGLCAHFTDGKAEGRGSRGRTAVGGGHSNDLPRGRTSSTLRRPSRRPSGAEAWQRAVRNQAAARSSPRARSRVAAAPWSRASADSAAGQASPRRRLRAPPRPSRGSRNRPHLAGGWRGGGRGEPGALSAPEGGVIFTIPW

SEQ ID NO: 752169 - protein, 233 aa, Homo sapiens
MPQCLREGTCAKLRLPPQATFQVLRGNGASVGTVLMFRCPSNHQMVGSGLLTCTWKGSIAEWSSGSPVCKLVPPHETFGFKVAVIASIVSCAIILLMSMAFLTCCLLKCVKKSKRRRSNRSAQLWSQLKDEDLETVQAAYLGLKHFNKPVSGPSQAHDNHSFTTDHGESTSKLASVTRSVDKDPGIPRALSLSGSSSSPQAQVMVHMANPRQPLPASGLATGMPQQPAAYALG

SEQ ID NO: 752170 - protein, 223 aa, Homo sapiens
PPLTQAQAQAPPPQAGLTRLADPAKRLGARRMRWAAATLRGKARPRGRAGVTTPAPGNRTVVPPHETFGFKVAVIASIVSCAIILLMSMAFLTCCLLKCVKKSKRRRSNRSAQLWSQLKDEDLETVQAAYLGLKHFNKPVSGPSQAHDNHSFTTDHGESTSKLASVTRSVDKDPGIPRALSLSGSSSSPQAQVMVHMANPRQPLPASGLATGMPQQPAAYALG

SEQ ID NO: 752171 - protein, 286 aa, Homo sapiens; identical to SEQ ID NO: 752165

SEQ ID NO: 752172 - protein, 286 aa, Homo sapiens; identical to SEQ ID NO: 752165

SEQ ID NO: 752173 - protein, 116 aa, Homo sapiens
MESLAQGLVWKETVQYYSRKKEDSHLCLGDKAMYDITQNLKDAPPTKQFLHGILESLERGLNTTSFEKEEKIQKSEVDHVDQDPTPSRLESSPKTDHTFLSTPYIGHKEMLKVIRD

SEQ ID NO: 752174 - protein, 78 aa, Homo sapiens
MFWLSLVQVAGGAGGLCSLPGFGPLDRLHLPLIVAPLAGCLPPQSHAALGTLPLPGTGAGAGAAVFMGVLPVLGTALS

SEQ ID NO: 752175 - protein, 421 aa, Homo sapiens
APRSSRGAQAAACHTSHHSAGSRPGGHLGGQAVGTPNCVPVEGPGCTKEEDVLASSACVSTDGGSLHCHNPSGPSDVPARQPHPEQEGWPPGTGDFPSQVPKQVLDVSQELLQSGVVTLPGTRDRHGRAVVQVRTRSLLWTREHSSCAELTRLLLYFHSIPRKEVRDLGLVVLVDARRSPAAPAVSQALSGLQNNTSPIIHSILLLVDKESAFRPDKDAIIQCEVVSSLKAVHKFVDSCQLTADLDGSFPYSHGDWICFRQRLEHFAANCEEAIIFLQNSFCSLNTHRTPRTAQEVAELIDQHETMMKLVLEDPLLVSLRLEGGTVLARLRREELGTEDSRDTLEAATSLYDRVDEEVHRLVLTSNNRLQQLEHLRELASLLEGNDQVRAAGGRRPGQHPLQARLAKATLSPSHCVFRALI

SEQ ID NO: 752176 - protein, 207 aa, Homo sapiens
APRSSRGAQAAACHTSHHSAGSRPGGHLGGQAVGTPNCVPVEGPGCTKEEDVLASSACVSTDGGSLHCHNPSGPSDVPARQPHPEQEGWPPGTGDFPSQVPKQVLDVSQELLQSGVVTLPGTRDRHGRAVVQVRTRSLLWTREHSSCAELTRLLLYFHSIPRKEVRDLGLVVLVDARRSPAAPAVSQALSGLQVRQGCHIPWVCRAS

SEQ ID NO: 752177 - protein, 355 aa, Homo sapiens
MDQFPESVTENFEYDDLAEACYIGDIVVFGTVFLSIFYSVIFAIGLVGNLLVVFALTNSKKPKSVTDIYLLNLALSDLLFVATLPFWTHYLINEKGLHNAMCKFTTAFFFIGFFGSIFFITVISIDRYLAIVLAANSMNNRTVQHGVTISLGVWAAAILVAAPQFMFTKQKENECLGDYPEVLQEIWPVLRNVETNFLGFLLPLLIMSYCYFRIIQTLFSCKNHKKAKAIKLILLVVIVFFLFWTPYNVMIFLETLKLYDFFPSCDMRKDLRLALSVTETVAFSHCCLNPLIYAFAGEKFRRYLYHLYGKCLAVLCGRSVHVDFSSSESQRSRHGSVLSSNFTYHTSDGDALLLL

SEQ ID NO: 752178 - protein, 53 aa, Homo sapiens
IPEGQRFSIIEPGKFACTLDTNMLKQQGMFGHEVEEFGLQVHCNGIPSLLPHG

SEQ ID NO: 752179 - protein, 111 aa, Homo sapiens
FGTIVITYSMKAGIQTEEHPNPGKRYPGIQRTAYLPDNKEGRKVLKLLYRAFDQKLIFTVGYSRVLGVSDVITWNDIHHKTSRFGGPEMYGYPDPSYLKRVKEELKAKGIE

SEQ ID NO: 752180 - protein, 109 aa, Homo sapiens
AGGGWGESAPRFHKIVCLTQVASKPAEGYLPPKSLAEAGVRKPFLESLLLIWKTELLSFIAFSLKRQVLTILPCLSREDIKTGLELLGSSHPPTLASRVDGIIGMCHGA

SEQ ID NO: 752181 - protein, 183 aa, Homo sapiens [sequence omitted]

SEQ ID NO: 752182 - protein, 438 aa, Homo sapiens
MALRGVSVRLLSRGPGLHVLRTWVSSAAQTEKGGRTQSQLAKSSRPEFDWQDPLVLEEQLTTDEILIRDTFRTYCQERLMPRILLANRNEVFHREIISEMGELGVLGPTIKGYGCAGVSSVAYGLLARELERVDSGYRSAMSVQSSLVMHPIYAYGSEEQRQKYLPQLAKGELLGCFGLTEPNSGSDPSSMETRAHYNSSNKSYTLNGTKTWITNSPMADLFVVWARCEDGCIRGFLLEKGMRGLSAPRIQGKFSLRASATGMIIMDGVEVPEENVLPGASSLGGPFGCLNNARYGIAWGVLGASEFCLHTARQYALDRMQFGVPLARNQLIQKKLADMLTEITLGLHACLQLGRLKDQDKAAPEMVSLLKRNNCGKALDIARQARDMLGGNGISDEYHVIRHAMNLEAVNTYEGTHDIHALILGRAITGIQAFTASK

SEQ ID NO: 752183 - protein, 203 aa, Homo sapiens
MALRGVSVRLLSRGPGLHVLRTWVSSAAQTEKGGRTQSQLAKSSRPEFDWQDPLVLEEQLTTDEILIRDTFRTYCQERLMPRILLANRNEVFHREIISEMGELGVLGPTIKGYGCAGVSSVAYGLLARELERVDSGYRSAMSVQSSLVMHPIYAYGSEEQRQKYLPQLGEWLPMGPGGRKTVSEVWNSRVGLSPEPILSLSQR

SEQ ID NO: 752184 - protein, 438 aa, Homo sapiens; identical to SEQ ID NO: 752182

SEQ ID NO: 752185 - protein, 405 aa, Homo sapiens
MDRGEFPFPASRPEFDWQDPLVLEEQLTTDEILIRDTFRTYCQERLMPRILLANRNEVFHREIISEMGELGVLGPTIKGYGCAGVSSVAYGLLARELERVDSGYRSAMSVQSSLVMHPIYAYGSEEQRQKYLPQLAKGELLGCFGLTEPNSGSDPSSMETRAHYNSSNKSYTLNGTKTWITNSPMADLFVVWARCEDGCIRGFLLEKGMRGLSAPRIQGKFSLRASATGMIIMDGVEVPEENVLPGASSLGGPFGCLNNARYGIAWGVLGASEFCLHTARQYALDRMQFGVPLARNQLIQKKLADMLTEITLGLHACLQLGRLKDQDKAAPEMVSLLKRNNCGKALDIARQARDMLGGNGISDEYHVIRHAMNLEAVNTYEGTHDIHALILGRAITGIQAFTASK

SEQ ID NO: 752186 - protein, 426 aa, Homo sapiens
MALRGVSVRLLSRGPGLHVLRTWVSSAAQTASRPEFDWQDPLVLEEQLTTDEILIRDTFRTYCQERLMPRILLANRNEVFHREIISEMGELGVLGPTIKGYGCAGVSSVAYGLLARELERVDSGYRSAMSVQSSLVMHPIYAYGSEEQRQKYLPQLAKGELLGCFGLTEPNSGSDPSSMETRAHYNSSNKSYTLNGTKTWITNSPMADLFVVWARCEDGCIRGFLLEKGMRGLSAPRIQGKFSLRASATGMIIMDGVEVPEENVLPGASSLGGPFGCLNNARYGIAWGVLGASEFCLHTARQYALDRMQFGVPLARNQLIQKKLADMLTEITLGLHACLQLGRLKDQDKAAPEMVSLLKRNNCGKALDIARQARDMLGGNGISDEYHVIRHAMNLEAVNTYEGTHDIHALILGRAITGIQAFTASK

SEQ ID NO: 752187 - protein, 258 aa, Homo sapiens
MPMAARNSGRSTCPSWPRGSSWAASGSQSPTAEVTPAAWRPEPTTTHPTRATPSMGPRPVWARCEDGCIRGFLLEKGMRGLSAPRIQGKFSLRASATGMIIMDGVEVPEENVLPGASSLGVLGASEFCLHTARQYALDRMQFGVPLARNQLIQKKLADMLTEITLGLHACLQLGRLKDQDKAAPEMVSLLKRNNCGKALDIARQARDMLGGNGISDEYHVIRHAMNLEAVNTYEGTHDIHALILGRAITGIQAFTASK

SEQ ID NO: 752188 - protein, 428 aa, Homo sapiens [sequence omitted]

SEQ ID NO: 752189 - protein, 361 aa, Homo sapiens
MALRGVSVRLLSRGPGLHVLRTWVSSAAQTEKGGRTQSQLAKSSRPEFDWQDPLVLEEQLTTDEILIRDTFRTYCQERLMPRILLANRNEVFHREIISEMGELGVLGPTIKGYGCAGVSSVAYGLLARELERVDSGYRSAMSVQSSLVMHPIYAYGSEEQRQKYLPQLAKGELLGCFGLTEPNSGSDPSSMETRAHYNSSNKSYTLNGTKTWITNSPMADLFVVWARCEDGCIRGFLLEKGMRGLSAPRIQGKFSLRASATGMIIMDGVEVPEENVLPGASSLGGPFGCLNNARYGIAWGVLGASEFCLHTARQYALDRMQFGVPLARNQLIQKKLADMLTEITLGLHACLQLGRLKDQDK

SEQ ID NO: 752190 - protein, 273 aa, Homo sapiens
MALRGVSVRLLSRGPGLHVLRTWVSSAAQTEKGGRTQSQLAKSSRPEFDWQDPLVLEEQLTTDEILIRDTFRTYCQERLMPRILLANRNEVFHREIISEMGELGVLGPTIKGYGCAGVSSVAYGLLARELERVDSGYRSAMSVQSSLVMHPIYAYGSEEQRQKYLPQLAKGELLGCFGLTEPNSGSDPSSMETRAHYNSSNKSYTLNGTKTWITNSPMADLFVVWARCEDGCIRGFLLEKGMRGLSAPRIQGKFSLRASATGMIFTPACSSAA

SEQ ID NO: 752191 - protein, 446 aa, Homo sapiens
MALRGVSVRLLSRGPGLHVLRTWVSSAAQTEKGGRTQSQLAKSSRPEFDWQDPLVLEEQLTTDEILIRDTFRTYCQERLMPRILLANRNEVFHREIISEMGELGVLGPTIKGYGCAGVSSVAYGLLARELERVDSGYRSAMSVQSSLVMHPIYAYGSEEQRQKYLPQLAKGELLGCFGLTEPNSGSDPSSMETRAHYNSSNKSYTLNGTKTWITNSPMADLFVVWARCEDGCIRGFLLEKGMRGLSAPRIQGKFSLRASATGMIIMDGVEVPEENVLPGASSLGGPFGCLNNARYGIAWGVLGASEFCLHTARQYALDRMQFGVPLARNQLIQKKLADMLTEITLGLHACLQLGRLKDQDKAAPEMVSLLKRNNCGKALDIARQARDMLGGNGISDEYHVIRHAMNLEAVNTYEGELIHSTAAAETMTPTEPSPDPHPTPSSGSES

SEQ ID NO: 752192 - protein, 278 aa, Homo sapiens
MALRGVSVRLLSRGPGLHVLRTWVSSAAQTEKGGRTQSQLAKSSRPEFDWQDPLVLEEQLTTDEILIRDTFRTYCQERLMPRILLANRNEVFHREIISEMGELGVLGPTIKGYGCAGVSSVAYGLLARELERVDSGYRSAMSVQSSLVMHPIYAYGSEEQRQKYLPQLAKGELLGCFGLTEPNSGSDPSSMETRAHYNSSWELLYKVLGVLFFAIACFLYKPLSESSDGLETCLPSQSSAPDSATDSQLQSSVLTTARAHPATAGTQHFLMTEQCRSQ

SEQ ID NO: 752193 - protein, 92 aa, Homo sapiens [sequence omitted]

SEQ ID NO: 752194 - protein, 187 aa, Homo sapiens
MSDRYLEQRISIKFCVKLNKSASETHHLLKEAYGDEVMSRARVFDWHKRFKEGREDVRDDARSGRPVTHRTDDNIQKVKDLVCSNRQLTVRMMAEELNLDKETVRLILKENLNMRKISAKVISGVLKGEPKPRKLDFRSDLSKETRKNSSCLRKKRRNLTMLPRLVSNSLSQGILPPWPPKALGLSA

SEQ ID NO: 752195 - protein, 161 aa, Homo sapiens
MSDRYLEQRISIKFCVKLNKSASETHHLLKEAYGDEVMSRARVFDWHKRFKEGREDVRDDARSGRPVTHRTDDNIQKVKDLVCSNRQLTVRMMAEELNLDKETVRLILKENLNMRKISAKVISGVLKGEPKPRKLDFRSDLSKETRKNSSCLRKKDVFLLY

SEQ ID NO: 752196 - protein, 68 aa, Homo sapiens
GRRNRNEEGEAAEISKLSLQGIVDARWMEVCLSVCQGAGEYFPVCESSITPGVVAPPPRPGQGTRPSR

SEQ ID NO: 752197 - protein, 108 aa, Homo sapiens
HNVSPMLGPSLTPGHPSLARGVPGQLCPWECPTRAGHSQPRWAKGCLSGGKGDGVGSQGQFWTCTMLVTALGFCSQSLNMDAASCATVCHPPWPPFPVPDPSSGGSCD

SEQ ID NO: 752198 - protein, 902 aa, Homo sapiens
GFLEPPPLAGFCLTPLSFPCRLSSADGPGAGMADSSEGPRAGPGEVAELPGDESGTPGGEAFPLSSLANLFEGEDGSLSPSPADASRPAGPGDGRPNLRMKFQGAFRKGVPNPIDLLESTLYESSVVPGPKKAPMDSLFDYGTYRHHSSDNKRWRKKIIEKQPQSPKAPAPQPPPILKVFNRPILFDIVSRGSTADLDGLLPFLLTHKKRLTDEEFREPSTGKTCLPKALLNLSNGRNDTIPVLLDIAERTGNMREFINSPFRDIYYRGQTALHIAIERRCKHYVELLVAQGADVHAQARGRFFQPKDEGGYFYFGELPLSLAACTNQPHIVNYLTENPHKKADMRRQDSRGNTVLHALVAIADNTRENTKFVTKMYDLLLLKCARLFPDSNLEAVLNNDGLSPLMMAAKTGKIGIFQHIIRREVTDEDTRHLSRKFKDWAYGPVYSSLYDLSSLDTCGEEASVLEILVYNSKIENRHEMLAVEPINELLRDKWRKFGAVSFYINVVSYLCAMVIFTLTAYYQPLEGTPPYPYRTTVDYLRLAGEVITLFTGVLFFFTNIKDLFMKKCPGVNSLFIDGSFQLLYFIYSVLVIVSAALYLAGIEAYLAVMVFALVLGWMNALYFTRGLKLTGTYSIMIQKILFKDLFRFLLVYLLFMIGYASALVSLLNPCANMKVCNEDQTNCTVPTYPSCRDSETFSTFLLDLFKLTIGMGDLEMLSSTKYPVVFIILLVTYIILTFVLLLNMLIALMGETVGQVSKESKHIWKLQWATTILDIERSFPVFLRKAFRSGEMVTVGKSSDGTPDRRWCFRVDEVNWSHWNQNLGIINEDPGKNETYQYYGFSHTVGRLRRDRWSSVVPRVVELNKNSNPDEVVVPLDSMGNPRCDGHQQGYPRKWRTDDAPL

SEQ ID NO: 752199 - protein, 215 aa, Homo sapiens
VYAMTVTSFLLPSVEARASVSGQIMSLLIPHRGSLFYYHSSVLVTYIILTFVLLLNMLIALMGETVGQVSKESKHIWKLQWATTILDIERSFPVFLRKAFRSGEMVTVGKSSDGTPDRRWCFRVDEVNWSHWNQNLGIINEDPGKNETYQYYGFSHTVGRLRRDRWSSVVPRVVELNKNSNPDEVVVPLDSMGNPRCDGHQQGYPRKWRTDDAPL

SEQ ID NO: 752200 - protein, 902 aa, Homo sapiens; identical to SEQ ID NO: 752198

SEQ ID NO: 752201 - protein, 134 aa, Homo sapiens
SLLFGLVFAFFHLTTTSCPFWSLGCCWGLPGMLIPRPCLPPPPPASPVSAAASWALSRVLSAQQPPPCWFATQPQGSHPNRAQVGCPRPGRAIGLSSDPGAKGLPGGCAHMLFSLCRLGWGAVAQSRLTATSTS

SEQ ID NO: 752202 - protein, 399 aa, Homo sapiens
MGRKSLYLLIVGILIAYYIYTPLPDNVEEPWRMMWINAHLKTIQNLATFVELLGLHHFMDSFKVVGSFDEVPPTSDENVTVTETKFNNILVRVYVPKRKSEALRRGLFYIHGGGWCVGSAALSGYDLLSRWTADRLDAVVVSTNYRLAPKYHFPIQFEDVYNALRWFLRKKVLAKYGVNPERIGISGDSAGGNLAAAVTQQLLDDPDVKIKLKIQSLIYPALQPLDVDLPSYQENSNFLFLSKSLMVRFWSEYFTTDRSLEKAMLSRQHVPVESSHLFKFINWSSLLPERFIKGHVYNNPNYGSSELAKKYPGFLDVRAAPLLADDNKLRGLPLTYVITCQYDLLRDDGLMYVTRLRNTGVQVTHNHVEDGFHGAFSFLGLKISHRLINQYIEWLKENL

SEQ ID NO: 752203 - protein, 399 aa, Homo sapiens; identical to SEQ ID NO: 752202

SEQ ID NO: 752204 - protein, 381 aa, Homo sapiens
MGRKSLYLLIVGILIAYYIYTPLPDNVEEPWRMMWINAHLKTIQNLATFVELLGLHHFMDSFKVVGSFDEVPPTSDENVTVTETKFNNILVRVYVPKRKSEALRRGLFYIHGGGWCVGSAALSGYDLLSRWTADRLDAVVVSTNYRLAPKYHFPIQFEDVYNALRWFLRNSAGGNLAAAVTQQLLDDPDVKIKLKIQSLIYPALQPLDVDLPSYQENSNFLFLSKSLMVRFWSEYFTTDRSLEKAMLSRQHVPVESSHLFKFINWSSLLPERFIKGHVYNNPNYGSSELAKKYPGFLDVRAAPLLADDNKLRGLPLTYVITCQYDLLRDDGLMYVTRLRNTGVQVTHNHVEDGFHGAFSFLGLKISHRLINQYIEWLKENL

SEQ ID NO: 752205 - protein, 204 aa, Homo sapiens
MGRKSLYLLIVGILIAYYIYTPLPDNVEEPWRMMWINAHLKTIQNLATFVELLGLHHFMDSFKVVGSFDEVPPTSDENVTVTETKFNNILVRVYVPKRKSEALRRGLFYIHGGGWCVGSAALSGYDLLSRWTADRLDAVVVSTNYRLAPKYHFPIQFEDVYNALRWFLRKKVLAKYGVNPERIGISGDSAGGNLAAAVTQQVCS

SEQ ID NO: 752206 - protein, 381 aa, Homo sapiens
MGRKSLYLLIVGILIAYYIYTPLPDNVEEPWRMMWINAHLKTIQNLATFVELLGLHHFMDSFKVVGSFDEVPPTSDENVTVTETLRRGLFYIHGGGWCVGSAALSGYDLLSRWTADRLDAVVVSTNYRLAPKYHFPIQFEDVYNALRWFLRKKVLAKYGVNPERIGISGDSAGGNLAAAVTQQLLDDPDVKIKLKIQSLIYPALQPLDVDLPSYQENSNFLFLSKSLMVRFWSEYFTTDRSLEKAMLSRQHVPVESSHLFKFINWSSLLPERFIKGHVYNNPNYGSSELAKKYPGFLDVRAAPLLADDNKLRGLPLTYVITCQYDLLRDDGLMYVTRLRNTGVQVTHNHVEDGFHGAFSFLGLKISHRLINQYIEWLKENL

SEQ ID NO: 752207 - protein, 67 aa, Homo sapiens
YRRPANEEWTFSYVCLHGASPAPLTGVPLPPVNKTVTDRWTLEAGRCADALILSTVKKNSQSPRTSL

SEQ ID NO: 752208 - protein, 87 aa, Homo sapiens
QLVQGMARQQKAWHPPLLRLPCGWGTLMVGSVYSRPPQKAMQSGPPSPSARLGSSLAGEGLQSWPELSHCQESLNVSTRTTSALVGL

SEQ ID NO: 752209 - protein, 135 aa, Homo sapiens
MLKFLLVSLTAFRREPKHLNLAFSVFQDLKIILIGLKSGICFAFVCRLIALAPGEAVGGYEKEDPDTSTHPAHPRVWSKPSKWLDSQAIRQPVLFALEMKNKGPESGWGLPKVAQQVGSRAGARNHFQLRVQGCS

SEQ ID NO: 752210 - protein, 103 aa, Homo sapiens
MPRPASARARCAHPLTCAHCLALPSEMNPVPQMEMQKSPVFCVAHAGSCRPELIRPSWLLRSLYESNQDGDLTGFYSFIDTHELYQTSGSFSEMFTWKAPGAH

SEQ ID NO: 752211 - protein, 115 aa, Homo sapiens
AVAMFIGVLDLFFIILSYIFILQAVLQLSSQEARYKAFGTCVSHIGAILAFYTPSVISSVMHRVARCAAPHVHILLANFYLLFPPMVNPIIYGVKTKQIRDSLGSIPEKGCVNRE

SEQ ID NO: 752212 - protein, 83 aa, Homo sapiens
STAGLCAGTLTWSGASLGLSPANSLSRVFKLSGYLLVKMSDKPDLSEVEKFDRSKLKKTNTEEKNTLPSKETIQQEKECVQTS

SEQ ID NO: 752213 - protein, 83 aa, Homo sapiens; identical to SEQ ID NO: 752212

SEQ ID NO: 752214 - protein, 460 aa, Homo sapiens
PRTAQAAAFRPPLSPAGGPSPVASRRPSARGDMAGGHSLLLENAQQVVLVCARGERFLARDALRSLAVLEGASLVVGKDGFIKAIGPADVIQRQFSGETFEEIIDCSGKCILPGLVDAHTHPVWAGERVHEFAMKLAGATYMEIHQAGGGIHFTVERTRQATEEELFRSLQQRLQCMMRAGTTLVECKSGYGLDLETELKMLRVIERARRELDIGISATYCGAHSVPKKSGKTATEAADDIINNHLPKLKELGRNGEIHVDNIDVFCEKGVFDLDSTRRILQRGKDIGLQINFHGDELHPMKAAELGAELGAQAISHLEEVSDEGIVAMATARCSAILLPTTAYMLRLKQPRARKMLDEGVIVALGSDFNPNAYCFSMPMVMHLACVNMRMSMPEALAAATINAAYALGKSHTHGSLEVGKQGDLIIINSSRWEHLIYQFGGHHELIEYVIAKGKLIYKT

SEQ ID NO: 752215 - protein, 439 aa, Homo sapiens
PRTAQAAAFRPPLSPAGGPSPVASRRPSARGDMAGGHSLLLENAQQVVLVCARGERFLARDALRSLAVLEGASLVVGKDGFIKAIGPADVIQRQFSGETFEEIIDCSGKCILPGLVDAHTHPVWAGERVHEFAMKLAGATYMEIHQAGGGIHFTVERTRQATEEELFRSLQQRLQCMMRAGTTLVECKSGYGLDLETELKMLRVIERARRELDIGISATYCGAHSVPKKSGKTATEAADDIINNHLPKLKELGRNGEIHVDNIDVFCEKGVFDLDSTRRILQRGLGLNWELQAISHLEEVSDEGIVAMATARCSAILLPTTAYMLRLKQPRARKMLDEGVIVALGSDFNPNAYCFSMPMVMHLACVNMRMSMPEALAAATINAAYALGKSHTHGSLEVGKQGDLIIINSSRWEHLIYQFGGHHELIEYVIAKGKLIYKT

SEQ ID NO: 752216 - protein, 228 aa, Homo sapiens
PRTAQAAAFRPPLSPAGGPSPVASRRPSARGDMAGGHSLLLENAQQVVLVCARGERFLARDALRSLAVLEGASLVVGKDGFIKAIGPADVIQRQFSGETFEEIIDCSGKCILPGLVDAHTHPVWAGERVHEFAMKLAGATYMEIHQAGGGIHFTVERTRQATEEELFRSLQQRLQCMMRAGTTLVECKSGYGLDLETELKMLRVIERARRELDIGISATYCGAHSVPK

SEQ ID NO: 752217 - protein, 460 aa, Homo sapiens; identical to SEQ ID NO: 752214

SEQ ID NO: 752218 - protein, 405 aa, Homo sapiens
PRTAQAAAFRPPLSPAGGPSPVASRRPSARGDMAGGHSLLLENAQQVVLVCARGERFLARDALRSLAVLEGASLVVGKDGFIKAIGPADVIQRQFSGETFEEIIDCSGKCILPGLVDAHTHPVWAGERVHEFAMKLAGATYMEIHQAGGGIHFTVERTRQATEEELFRSLQQRLQCMMRAGTTLVECKSGYGLDLETELKMLRVIERARRELDIGISATYCGAHSVPKKSGKTATEAADDIINNHLPKLKELGRNGEIHVDNIDVFCEKGVFDLDSTRRILQRGKDIGLQINFHGDELHPMKAAELGAELGAQAISHLEEVSDEGIPTTAYMLRLKQPRARKMLDEGVIVALGSDFNPNAYCFSMTHHLYTGTGAFLKWVHFYQLQSCNFFGNFLKFSILYITIG

SEQ ID NO: 752219 - protein, 130 aa, Homo sapiens
QKRHCNTTRHSKPTDKPTGNSKTIDHKSSTDNHEAPPTSEENSSNQGKDPMIRNQRSVDPADSTTTHKESAGKKHITPAPKSKINCRKSTTGKSTVTRKSDKTGRPLEKSMSTLDKTSTSSHKTTTSFHN

SEQ ID NO: 752220 - protein, 103 aa, Homo sapiens
MPGGAQACLFQRNSWGPGACLGAWGIHTLTWAWLRRSLNPHHPGLGGWNHLASSDASPNELGREGRCPIGPSRTPAWKAAAPTPGPGARLQPQVGSQGPATAA

SEQ ID NO: 752221 - protein, 142 aa, Homo sapiens
LAHLAPWLSTAGKSPYQAACCGWFSSPRLPVSWKSYRVPVGQNSQAPCCRQSKTKTPGSRIPCPSLQFGFTKGGAVIPGWRRECWFFVFVFLTCMKLTSSQILFHPPLEAPITHPCYGHHTYARPPPPPQSHSGVCPCCGKE

SEQ ID NO: 752222 - protein, 168 aa, Homo sapiens
SSDDHTHFASLSCPELLRLISAKCTGIFMLRIKDHDRLSGPRKYFPFATQMPSHPSRVQDFSRKKNHLIKGKLCLIPTTRRCNHLPGHSHFFPFFLTPSYVCVVGQGIRGIISLQYKKCVALYRGSQRAFFLLCEDTRGIQQSAIWKITLPEPNHAGTLILNFQPPEL

SEQ ID NO: 752223 - protein, 279 aa, Homo sapiens
MPCRREEEEEAGEEAEGEEEEEDSFLLLQQSVALGSSGEVDRLVAQIGETLQLDAAQHSPASPCGPPGAPLRAPGPLAAAVPADKARSPAVPLLLPPALAETVGPAPPGVLRCALGDRGRVRGRAAPYCVAELATGPSALSPLPPQADLDGPPGAGKQGIPQPLSGPCRRGWLRGAAASRRLQQRRGSQPETRTGDDDPHRLLQQLVLSGNLIKEAVRRLHSRRLQLRAKLPQRPLLGPLSAPVHEPPSPRSPRAACSDPGASGRAQLRTGDGVLVPGS

SEQ ID NO: 752224 - protein, 279 aa, Homo sapiens; identical to SEQ ID NO: 752223

SEQ ID NO: 752225 - protein, 279 aa, Homo sapiens; identical to SEQ ID NO: 752223

SEQ ID NO: 752226 - protein, 106 aa, Homo sapiens
MKLPWIPSLPISRPSVLAVMVTMTLKVGAPPMLFIQRSVVNSPSCSSESRTTVYFWPPSVSPFMTKLDQSLPTRTPTSAGVMLRKVFPGTVAQMEGGSLLPTMAVS

SEQ ID NO: 752227 - protein, 78 aa, Homo sapiens
SGSGLTYKTAKDSFRWATGEHQAFTSFAFGQPDNHGFGNCVELQASAAFNWNDQRCKTRNRYICQFAQEHISRWGPGS

SEQ ID NO: 752228 - protein, 78 aa, Homo sapiens; identical to SEQ ID NO: 752227

SEQ ID NO: 752229 - protein, 61 aa, Homo sapiens
MLRILYNGPEITKEEEACQELLRSKLLQRCQWQVEANGVISPALTPSPSPLPLTIEEDREF

SEQ ID NO: 752230 - protein, 127 aa, Homo sapiens
SLNFKVEGDTVTFSFEMRSGREHNTPDKAMWGLCLHSSRSGVFGGCLRRLALSGRPGFRSVCVSLFHVKNPVQWTRNYQRRRSLSGAIAVQTFTKVPVAGGGQWRDLPCPYSEPLSTASDHRGRQRI

SEQ ID NO: 752231 - protein, 79 aa, Homo sapiens
TRRGRRQHVRFTEYVKDGLKHTCVKFYIEGSEPGKQGTVYAQVKENPGSGEYDFRYIFVEIESYPRRTIIIEDNRSQDD

SEQ ID NO: 752232 - protein, 79 aa, Homo sapiens; identical to SEQ ID NO: 752231

SEQ ID NO: 752233 - protein, 79 aa, Homo sapiens; identical to SEQ ID NO: 752231

SEQ ID NO: 752234 - protein, 79 aa, Homo sapiens; identical to SEQ ID NO: 752231

SEQ ID NO: 752235 - protein, 355 aa, Homo sapiens
IVFLLYLETCLEVMDDKPNPEALSDSSERLFSFGVIADVQFADLEDGFNFQGTRRRYYRHSLLHLQGAIEDWNNESSMPCCVLQLGDIIDGYNAQYNASKKSLELVMDMFKRLKVPVHHTWGNHEFYNFSREYLTHSKLNTKFLEDQIVHHPETMPSEDYYAYHFVPFPKFRFILLDAYDLSVLGVDQSSPKYEQCMKILREHNPNTELNSPQGLSEPQFVQFNGGFSQEQLNWLNEVLTFSDTNQEKVVIVSHLPIYPDASDNVCLAWNYRDALAVIWSHECVVCFFAGHTHDGGYSEDPFGVYHVNLEGVIETAPDSQAFGTVHVYPDKMMLKGRGRVPDRIMNYKKERAFHC

SEQ ID NO: 752236 - protein, 205 aa, Homo sapiens
MDDKPNPEALSDSSERLFSFGVIADVQFADLEDGFNFQGTRRRYYRHSLLHLQGAIEDWNNESSMPCCVLQLGDIIDGYNAQYNASKKSLELVMDMFKRLKVPVHHTWGNHEFYNFSREYLTHSKLNTKFLEDQIVHHPETMPSEDYYAYHFVPFPKFRFILLDAYDLSVLGVDQSSPKYEQCMKILREHNPNTELNSPQGELFL

SEQ ID NO: 752237 - protein, 205 aa, Homo sapiens; identical to SEQ ID NO: 752236

SEQ ID NO: 752238 - protein, 205 aa, Homo sapiens; identical to SEQ ID NO: 752236

SEQ ID NO: 752239 - protein, 205 aa, Homo sapiens; identical to SEQ ID NO: 752236

SEQ ID NO: 752240 - protein, 331 aa, Homo sapiens
IVFLLYLETCLEVMDDKPNPEALSDSSERLFSFGVIADVQFADLEDGFNFQGTRRRYYRHSLLHLQGAIEDWNNESSMPCCVLQLGDIIDGYNAQYNASKKSLELVMDMFKRLKVPVHHTWGNHEFYNFSREYLTHSKLNTKFLEDQIVHHPETMPSEDYYAYHFVPFPKFRFILLDAYDLSVLGVDQSSPKYEQCMKILREHNPNTELNSPQGLSEPQFVQFNGGFSQEQLNWLNEVLTFSDTNQEKVVIVSHLPIYPDASDNVCLAWNYRDALAVIWSHECVVCFFAGHTHDGGYSEDPFGVSFSTFTALLKSLFLVFSFYHFLAIFTF

SEQ ID NO: 752241 - protein, 198 aa, Homo sapiens
GCRGAEGWGGCRGCRALVQAPPRSLAAGPGDRVPGRRRQPRGPQRGGGGPWRREDSAARGTPGQAPGSPRLGLCGPTALGGDGGAGAYARGQPGETEAVNGPGPALVIPEPGRERPVSRDRSRRSLNSSPPSRMRSAALPSCPCHRCFPTPGRRRDGQTARPVPEACEREARGALRSRERGAGAGDRQRRGRRRGEDK

SEQ ID NO: 752242 - protein, 127 aa, Homo sapiens
MFQAAGAAQATPSHDAKGGGSSTVQRSKSFSLRAQVKETCAACQKTVYPMERLVADKLIFHNSCFCCKHCHTKLSLGSYAALHGEFYCKPHFQQLFKSKGNYDEGFGRKQHKELWAHKEVDPGTKTA

SEQ ID NO: 752243 - protein, 127 aa, Homo sapiens; identical to SEQ ID NO: 752242

SEQ ID NO: 752244 - protein, 127 aa, Homo sapiens; identical to SEQ ID NO: 752242

SEQ ID NO: 752245 - protein, 127 aa, Homo sapiens; identical to SEQ ID NO: 752242

SEQ ID NO: 752246 - protein, 127 aa, Homo sapiens; identical to SEQ ID NO: 752242

SEQ ID NO: 752247 - protein, 127 aa, Homo sapiens; identical to SEQ ID NO: 752242

SEQ ID NO: 752248 - protein, 127 aa, Homo sapiens; identical to SEQ ID NO: 752242

SEQ ID NO: 752249 - protein, 259 aa, Homo sapiens
GGGGGGSGSTGSGSSSRPRPPRTRAPPETDPAPRPRPGLVRAAGGGAASGSGTGRGAEGCGVRAARGVPASLRAALARGAQARVLVSGPAPGWAEPRPAGGARGVGVWGPVLAGPEPSGCRFSTRGFHLQRAMFQAAGAAQATPSHDAKGGGSSTVQRSKSFSLRAQVKETCAACQKTVYPMERLVADKLIFHNSCFCCKHCHTKLSLGSYAALHGEFYCKPHFQQLFKSKGNYDEGFGRKQHKELWAHKEVDPGTKTA

SEQ ID NO: 752250 - protein, 127 aa, Homo sapiens; identical to SEQ ID NO: 752242

SEQ ID NO: 752251 - protein, 157 aa, Homo sapiens
MFQAAGAAQATPSHDAKGGGSSTVQRSKVGAWGRVCGRRGVRERDEQLGQHLAELPAQSFSLRAQVKETCAACQKTVYPMERLVADKLIFHNSCFCCKHCHTKLSLGSYAALHGEFYCKPHFQQLFKSKGNYDEGFGRKQHKELWAHKEVDPGTKTA

SEQ ID NO: 752252 - protein, 285 aa, Homo sapiens
GGGGGGSGSTGSGSSSRPRPPRTRAPPETDPAPRPRPGLNPAGAASPPEASTSNEPCSRLQEPPRPPPLMTPKAAAAARCSAPSTVTPSSAWAATPRCTGSSTANPTSSSCLRAKATTTRGLAASSTRSSGPTRRWTPAPRRPEASVTFHPLCGRPGAGRGKVGRRSSWACVGARWEGDEACSGVGDQGRALLQDSFLLPSPAAGEGLETRIGVCPPPCFLLRSASLPTSPQDPLGGPQAQLPYLGAFSPARSQHAPLRVPSSLTATGDCVAPTSPHLPLPLTCF

SEQ ID NO: 752253 - protein, 105 aa, Homo sapiens
MEPWGWLAQICMRDEGQSSLLTLRLNGQGLRRNHILCCRSRRDSMCLRNVREKGDVSSMDPLQATWIPPYLCRTLLTASWNCQPKGSKLGSRSLKMRGDGWAWWL

SEQ ID NO: 752254 - protein, 682 aa, Homo sapiens
QTIEMWKLLLWVGLVLVLKHHDGAAHKLVCYFTNWAHSRPGPASILPHDLDPFLCTHLIFAFASMNNNQIVAKDLQDEKILYPEFNKLKERNRELKTLLSIGGWNFGTSRFTTMLSTFANREKFIASVISLLRTHDFDGLDLFFLYPGLRGSPMHDRWTFLFLIEELLFAFRKEALLTMRPRLLLSAAVSGVPHIVQTSYDVRFLGRLLDFINVLSYDLHGSWERFTGHNSPLFSLPEDPKSSAYAMNYWRKLGAPSEKLIMGIPTYGRTFRLLKASKNGLQARAIGPASPGKYTKQEGFLAYFEICSFVWGAKKHWIDYQYVPYANKGKEWVGYDNAISFSYKAWFIRREHFGGAMVWTLDMDDVRGTFCGTGPFPLVYVLNDILVRAEFSSTSLPQFWLSSAVNSSSTDPERLAVTTAWTTDSKILPPGGEAGVTEIHGKCENMTITPRGTTVTPTKETVSLGKHTVALGEKTEITGATTMTSVGHQSMTPGEKALTPVGHQSVTTGQKTLTSVGYQSVTPGEKTLTPVGHQSVTPVSHQSVSPGGTTMTPVHFQTETLRQNTVAPRRKAVAREKVTVPSRNISVTPEGQTMPLRGENLTSEVGTHPRMGNLGLQMEAENRMMLSSSPVIQLPEQTPLAFDNRFVPIYGNHSSVNSVTPQTSPLSLKKEIPENSAVDEEA

SEQ ID NO: 752255 - protein, 550 aa, Homo sapiens
QTIEMWKLLLWVGLVLVLKHHDGAAHKLVCYFTNWAHSRPGPASILPHDLDPFLCTHLIFAFASMNNNQIVAKDLQDEKILYPEFNKLKERNRELKTLLSIGGWNFGTSRFTTMLSTFANREKFIASVISLLRTHDFDGLDLFFLYPGLRGSPMHDRWTFLFLIEELLFAFRKEALLTMRPRLLLSAAVSGVPHIVQTSYDVRFLGRLLDFINVLSYDLHGSWERFTGHNSPLFSLPEDPKSSAYAMNYWRKLGAPSEKLIMGIPTYGRTFRLLKASKNGLQARAIGPASPGKYTKQEGFLAYFEICSFVWGAKKHWIDYQYVPYANKGKEWVGYDNAISFSYKAWFIRREHFGGAMVWTLDMDDVRGTFCGTGPFPLVYVLNDILVRAEFSSTSLPQFWLSSAVNSSSTDPERLAVTTAWTTDSKILPPGGEAGVTEIHGKCENMTITPRGTTVTPTKETVSLGKHTVALGEKTEITGATTMTSVGHQSMTPGEKALTPVGHQSVTTGQKTLTSVGYQSVTPGEKTLTPVGHQFCEPWRNDYDPCPFSD

SEQ ID NO: 752256 - protein, 52 aa, Homo sapiens
  misc_feature (44)..(44): Xaa can be any naturally occurring amino acid
MLDVGFLVPPLCIGRSRLWSQRLVRSPPHCRIRRTSPLSFLQIXVLSLNLCF

SEQ ID NO: 752257 - protein, 52 aa, Homo sapiens; identical to SEQ ID NO: 752256
  misc_feature (44)..(44): Xaa can be any naturally occurring amino acid

SEQ ID NO: 752258 - protein, 60 aa, Homo sapiens
TELCQGYAAGIPIKPRVLSRQSPWGLGSGVWAQYRSLVWHSEIGLDSCPPRGTQQAEGAS

SEQ ID NO: 752259 - protein, 436 aa, Homo sapiens
MDGKPATRKGPDFCSLRYGLALIMHFSNFTMITQRVSLSIAIIAMVNTTQQQGLSNASTEGPVADAFNNSSISIKEFDTKASVYQWSPETQGIIFSSINYGIILTLIPSGYLAGIFGAKKMLGAGLLISSLLTLFTPLAADFGVILVIMVRTVQGMAQGMAWTGQFTIWAKWAPPLERSKLTTIAGSGSAFGSFIILCVGGLISQALSWPFIFYIFGSTGCVCCLLWFTVIYDDPMHHPCISVREKEHILSSLAQQPSSPGRAVPIKAMVTCLPLWAIFLGFFSHFWLCTIILTYLPTYISTLLHVNIRDSGVLSSLPFIAAASCTILGGQLADFLLSRNLLRLITVRKLFSSLDMQVSSWESQGDLGSSQESSLPLPLDSSSVRILSLVGGMSFSCLLQSTCLAWSFTSRLDKQNFKTGPKRGPLPASEDIKLQT

SEQ ID NO: 752260 - protein, 383 aa, Homo sapiens
MDGKPATRKGPDFCSLRYGLALIMHFSNFTMITQRVSLSIAIIAMVNTTQQQGLSNASTEGPVADAFNNSSISIKEFDTKASVYQWSPETQGIIFSSINYGIILTLIPSGYLAGIFGAKKMLGAGLLISSLLTLFTPLAADFGVILVIMVRTVQGMAQGMAWTGQFTIWAKWAPPLERSKLTTIAGSGSAFGSFIILCVGGLISQALSWPFIFYIFGSTGCVCCLLWFTVIYDDPMHHPCISVREKEHILSSLAQQPSSPGRAVPIKAMVTCLPLWAIFLGFFSHFWLCTIILTYLPTYISTLLHVNIRDSGVLSSLPFIAAASCTILGGQLADFLLSRNLLRLITVRKLFSSLGLLLPSICAVALPFVASSYVITIILLILI

SEQ ID NO: 752261 - protein, 446 aa, Homo sapiens
MDGKPATRKGPDFCSLRYGLALIMHFSNFTMITQRVSLSIAIIAMVNTTQQQGLSNASTEGPVADAFNNSSISIKEFDTKASVYQWSPETQGIIFSSINYGIILTLIPSGYLAGIFGAKKMLGAGLLISSLLTLFTPLAADFGVILVIMVRTVQGMAQGMAWTGQFTIWAKWAPPLERSKLTTIAGSGSAFGSFIILCVGGLISQALSWPFIFYIFGSTGCVCCLLWFTVIYDDPMHHPCISVREKEHILSSLAQQPSSPGRAVPIKAMVTCLPLWAIFLGFFSHFWLCTIILTYLPTYISTLLHVNIRDSGVLSSLPFIAAASCTILGGQLADFLLSRNLLRLITVRKLFSSLDMQVSSWESQGDLGSSQESSLPLPLDSSSVRLGQFIEHLQVAGIVLGVGDTHGALKIWMATQLLYLHEPLNQTLVGQISQRKKNISLFSQDE

SEQ ID NO: 752262 - protein, 470 aa, Homo sapiens
MGRSLGSAASGARVSCTPVILSCRTHSSSKPPSCTKTRLIRRQVPSFFREDNPDKNPEAPLNVSRVAQLCRGDQGGESSLSVSKWNTFLKAMLVCSDAATNKNFNRLQDVFLLPDPSGQWRDTRVYGVFSNPWNYSAVCVYSLGDIDKVFRTSSLKGYHSSLPNPRPGKCLPDQQPIPTETFQVADRHPEVAQRVEPMGPLKTPLFHSKYHYQKVAVHRMQASHGETFHVLYLTTDRGTIHKVVEPGEQEHSFAFNIMEIQPFRRAAAIQTMSLDAERRKLYVSSQWEVSQVPLDLCEVYGGGCHGCLMSRDPYCGWDQGRCISIYSSERSVLQSINPAEPHKECPNPKPDKAPLQKVSLAPNSRYYLSCPMESRHATYSWRHKENVEQSCEPGHQSPNCILFIENLTAQQYGHYFCEAQEGSYFREAQHWQLLPEDGIMAEHLLGHACALAASLWLGVLPTLTLGLLVH

SEQ ID NO: 752263 - protein, 187 aa, Homo sapiens
SRGHGMTPPPPGRAAPSAPRARVPGPPARLGLPLRLRLLLLLWAAAASAQGHLRSGPRIFAVWKGHVGQDRVDFGQTEPHTVLFHEPGSSSVWVGGRGKVYLFDFPEGKNASVRTVNIGSTKGSCLDKRDCENYITLLERRSEGLLACGTNARLPQLLEPGEWHCGATWRDERLRPLQPGRELPGSV

SEQ ID NO: 752264 - protein, 470 aa, Homo sapiens; identical to SEQ ID NO: 752262

SEQ ID NO: 752265 - protein, 542 aa, Homo sapiens
MNHSVRRLDPVGLVSCVVCRLHLSTSAWYRAHVRDHALGYIMCYNPCQPGRVTPWYCLKGTRCIPPSGSRNTMGRSLGSAASGARVSCTPVILSCRTHSSSKPPSCTKTRLIRRQVPSFFREDNPDKNPEAPLNVSRVAQLCRGDQGGESSLSVSKWNTFLKAMLVCSDAATNKNFNRLQDVFLLPDPSGQWRDTRVYGVFSNPWNYSAVCVYSLGDIDKVFRTSSLKGYHSSLPNPRPGKCLPDQQPIPTETFQVADRHPEVAQRVEPMGPLKTPLFHSKYHYQKVAVHRMQASHGETFHVLYLTTDRGTIHKVVEPGEQEHSFAFNIMEIQPFRRAAAIQTMSLDAERRKLYVSSQWEVSQVPLDLCEVYGGGCHGCLMSRDPYCGWDQGRCISIYSSERSVLQSINPAEPHKECPNPKPDKAPLQKVSLAPNSRYYLSCPMESRHATYSWRHKENVEQSCEPGHQSPNCILFIENLTAQQYGHYFCEAQEGSYFREAQHWQLLPEDGIMAEHLLGHACALAASLWLGVLPTLTLGLLVH

SEQ ID NO: 752266 - protein, 573 aa, Homo sapiens
MGRSLGSAASGARVSCTPVILSCRTHSSSKPPSCTKTRLIRRQVPSFFREDNPDKNPEAPLNVSRVAQLCRGDQGGESSLSVSKWNTFLKAMLVCSDAATNKNFNRLQDVFLLPDPSGQWRDTRVYGVFSNPWNYSAVCVYSLGDIDKVFRTSSLKGYHSSLPNPRPGKCLPDQQPIPTETFQVADRHPEVAQRVEPMGPLKTPLFHSKYHYQKVAVHRMQASHGETFHVLYLTTDRGTIHKVVEPGEQEHSFAFNIMEIQPFRRAAAIQTMSLDAERRKLYVSSQWEVSQVPLDLCEVYGGGCHGCLMSRDPYCGWDQGRCISIYSSERSVLQSINPAEPHKECPNPKPGTCSGPAGGCGPMSGVLPCPDCPGLRETWPCPVGPRYMGQDTVLQREPSWWDERDGRKKEDAEGWVPHVHSEALSWDPSPWGGHILPWELFVPPHGCFPTASPDKAPLQKVSLAPNSRYYLSCPMESRHATYSWRHKENVEQSCEPGHQSPNCILFIENLTAQQYGHYFCEAQEGSYFREAQHWQLLPEDGIMAEHLLGHACALAASLWLGVLPTLTLGLLVH

SEQ ID NO: 752267 - protein, 470 aa, Homo sapiens; identical to SEQ ID NO: 752262

SEQ ID NO: 752268 - protein, 104 aa, Homo sapiens
MAAGPGRPQGLGWAAGGGRFFVLPSHLPELTSRTPGSRGHRARGGDPADRAAGGAHCKCRNWPQTLRSWTAPAAPGAAAELVDIFQGGKKSFKCHLFTLKMLIT

SEQ ID NO: 752269 - protein, 104 aa, Homo sapiens; identical to SEQ ID NO: 752268

SEQ ID NO: 752270 - protein, 109 aa, Homo sapiens
MLKLILPSTPPQHQGPWPKPFPGSPSSSHEASFPAPQNSLLYESGQDPTETFPINFIKLIRGEGRGEMEISPACSTHSIGHEVSCSLTHLLRVVCCLLLQSHIDPVTRS

SEQ ID NO: 752271 - protein, 173 aa, Homo sapiens
MSLLGPKVLLFLAAFIITSDWIPLGVNSQRGDDVTQATPETFTEDPNLVNDPATDETVLAVLADIAPSTDDLASLSEKNTTAECWDEKFTCTRLYSVHRPVKQCIHQLCFTSLRRMYIVNKEICSRLVCKEHEAMKDELCRQMAGLPPRRLRRSNYFRLPPCENVDLQRPNGL

SEQ ID NO: 752272 - protein, 173 aa, Homo sapiens; identical to SEQ ID NO: 752271

SEQ ID NO: 752273 - protein, 163 aa, Homo sapiens
MSLLGPKVLLFLAAFIITSDWIPLGVNSQRGDDVTQATPETFTEDPNLVNDPATDETVLAVLADIAPSTDDLECWDEKFTCTRLYSVHRPVKQCIHQLCFTSLRRMYIVNKEICSRLVCKEHEAMKDELCRQMAGLPPRRLRRSNYFRLPPCENVDLQRPNGL

SEQ ID NO: 752274 - protein, 173 aa, Homo sapiens; identical to SEQ ID NO: 752271

SEQ ID NO: 752275 - protein, 163 aa, Homo sapiens; identical to SEQ ID NO: 752273

SEQ ID NO: 752276 - protein, 173 aa, Homo sapiens; identical to SEQ ID NO: 752271

SEQ ID NO: 752277 - protein, 173 aa, Homo sapiens; identical to SEQ ID NO: 752271

SEQ ID NO: 752278 - protein, 173 aa, Homo sapiens; identical to SEQ ID NO: 752271

SEQ ID NO: 752279 - protein, 243 aa, Homo sapiens
VGQKSGYSCLHARLVRARRLRRAVAVMAAQCVRLARRSLPALALSLRPSPRLLCTATKQKNSGQNLEEDMGQSEQKADPPATEKTLLEEKVKLEEQLKETVEKYKRALADTENLRQRSQKLVEEAKLYGIQAFCKDLLEVADVLEKATQCVPKEEIKDDNPHLKNLYEGLVMTEVQIQKVFTKHGLLKLNPVGAKFDPYEHEALFHTPVEGKEPGTVALVSKVGYKLHGRTLRPALVGVVKEA

SEQ ID NO: 752280 - protein, 243 aa, Homo sapiens; identical to SEQ ID NO: 752279

SEQ ID NO: 752281 - protein, 243 aa, Homo sapiens; identical to SEQ ID NO: 752279

SEQ ID NO: 752282 - protein, 96 aa, Homo sapiens
VGQKSGYSCLHARLVRARRLRRAVAVMAAQCVRLARRSLPALALSLRPSPRLLCTATKQKNSGQNLYEGLVMTEVQIQKVFTNLAAVDGVGVFKLT

SEQ ID NO: 752283 - protein, 243 aa, Homo sapiens; identical to SEQ ID NO: 752279

SEQ ID NO: 752284 - protein, 243 aa, Homo sapiens; identical to SEQ ID NO: 752279

SEQ ID NO: 752285 - protein, 1072 aa, Homo sapiens
MLRMRTAGWARGWCLGCCLLLPLSLSLAAAKQLLRYRLAEEGPADVRIGNVASDLGIVTGSGEVTFSLESGSEYLKIDNLTGELSTSERRIDREKLPQCQMIFDENECFLDFEVSVIGPSQSWVDLFEGQVIVLDINDNTPTFPSPVLTLTVEENRPVGTLYLLPTATDRDFGRNGIERYELLQEPGGGGSGGESRRAGAADSAPYPGGGGNGASGGGSGGSKRRLDASEGGGGTNPGGRSSVFELQVADTPDGEKQPQLIVKGALDREQRDSYELTLRVRDGGDPPRSSQAILRVLITDVNDNSPRFEKSVYEADLAENSAPGTPILQLRAADLDVGVNGQIEYVFGAATESVRRLLRLDETSGWLSVLHRIDREEVNQLRFTVMARDRGQPPKTDKATVVLNIKDENDNVPSIEIRKIGRIPLKDGVANVAEDVLVDTPIALVQVSDRDQGENGVVTCTVVGDVPFQLKPASDTEGDQNKKKYFLHTSTPLDYEATREFNVVIVAVDSGSPSLSSNNSLIVKVGDTNDNPPMFGQSVVEVYFPENNIPGERVATVLATDADSGKNAEIAYSLDSSVMGIFAIDPDSGDILVNTVLDREQTDRYEFKVNAKDKGIPVLQGSTTVIVQVADKNDNDPKFMQDVFTFYVKENLQPNSPVGMVTVMDADKGRNAEMSLYIEENNNIFSIENDTGTIYSTMSFDREHQTTYTFRVKAVDGGDPPRSATATVSLFVMDENDNAPTVTLPKNISYTLLPPSSNVRTVVATVLATDSDDGINADLNYSIVGGNPFKLFEIDPTSGVVSLVGKLTQKHYGLHRLVVQVNDSGQPSQSTTTLVHVFVNESVSNATAIDSQIARSLHIPLTQDIAGDPSYEISKQRLSIVIGVVAGIMTVILIILIVVMARYCRSKNKNGYEAGKKDHEDFFTPQQHDKSKKPKKDKKNKKSKQPLYSSIVTVEASKPNGQRYDSVNEKLSDSPSMGRYRSVNGGPGSPDLARHYKSSSPLPTVQLHPQSPTAGKKHQAVQDLPPANTFVGAGDNISIGSDHCSEYSCQTNNKYSKQVRCIPNIFKYPREG

SEQ ID NO: 752286 - protein, 147 aa, Homo sapiens
APLSSWQDAWKKSAVKASPLTTDSRPLPDVALTGKCTRECDEYGHSDSCWMPVRTSPERKKSQPKLSTFMPVDERGSQEKLANGEAAIMGDRNRNLLNKKLTSSYETFSAASFSKNEEANPEDIPLTKTGEYKPSPVNTLTRREVYL

SEQ ID NO: 752287 - protein, 1200 aa, Homo sapiens
MLRMRTAGWARGWCLGCCLLLPLSLSLAAAKQLLRYRLAEEGPADVRIGNVASDLGIVTGSGEVTFSLESGSEYLKIDNLTGELSTSERRIDREKLPQCQMIFDENECFLDFEVSVIGPSQSWVDLFEGQVIVLDINDNTPTFPSPVLTLTVEENRPVGTLYLLPTATDRDFGRNGIERYELLQEPGGGGSGGESRRAGAADSAPYPGGGGNGASGGGSGGSKRRLDASEGGGGTNPGGRSSVFELQVADTPDGEKQPQLIVKGVYEADLAENSAPGTPILQLRAADLDVGVNGQIEYVFGAATESVRRLLRLDETSGWLSVLHRIDREEVNQLRFTVMARDRGQPPKTDKATVVLNIKDENDNVPSIEIRKIGRIPLKDGVANVAEDVLVDTPIALVQVSDRDQGENGVVTCTVVGDVPFQLKPASDTEGDQNKKKYFLHTSTPLDYEATREFNVVIVAVDSGSPSLSSNNSLIVKVGDTNDNPPMFGQSVVEVYFPENNIPGERVATVLATDADSGKNAEIAYSLDSSVMGIFAIDPDSGDILVNTVLDREQTDRYEFKVNAKDKGIPVLQGSTTVIVQVADKNDNDPKFMQDVFTFYVKENLQPNSPVGMVTVMDADKGRNAEMSLYIEENNNIFSIENDTGTIYSTMSFDREHQTTYTFRVKAVDGGDPPRSATATVSLFVMDENDNAPTVTLPKNISYTLLPPSSNVRTVVATVLATDSDDGINADLNYSIVGGNPFKLFEIDPTSGVVSLVGKLTQKHYGLHRLVVQVNDSGQPSQSTTTLVHVFVNESVSNATAIDSQIARSLHIPLTQDIAGDPSYEISKQRLSIVIGVVAGIMTVILIILIVVMARYCRSKNKNGYEAGKKDHEDFFTPQQHDKSKKPKKDKKNKKSKQPLYSSIVTVEASKPNGQRYDSVNEKLSDSPSMGRYRSVNGGPGSPDLARHYKSSSPLPTVQLHPQSPTAGKKHQAVQDLPPANTFVGAGDNISIGSDHCSEYSCQTNNKYSKQPFRRVTFSVVSQPQDPHQGSLQSCYDSGLEESETPSSKSSSGPRLGALPLPEDNYERTTPDGSVDSRPLPDVALTGKCTRECDEYGHSDSCWMPVRTSPERKKSQPKLSTFMPVDERGSQEKLANGEAAIMGDRNRNLLNKKLTSSYETFSAASFSKNEEANPEDIPLTKTGEYKPSPVNTLTRREVYL

SEQ ID NO: 752288 - protein, 1069 aa, Homo sapiens
MLRMRTAGWARGWCLGCCLLLPLSLSLAAAKQLLRYRLAEEGPADVRIGNVASDLGIVTGSGEVTFSLESGSEYLKIDNLTGELSTSERRIDREKLPQCQMIFDENECFLDFEVSVIGPSQSWVDLFEGQVIVLDINDNTPTFPSPVLTLTVEENRPVGTLYLLPTATDRDFGRNGIERYELLQEPGGGGSGGESRRAGAADSAPYPGGGGNGASGGGSGGSKRRLDASEGGGGTNPGGRSSVFELQVADTPDGEKQPQLIVKGALDREQRDSYELTLRVRDGGDPPRSSQAILRVLITDVNDNSPRFEKSVYEADLAENSAPGTPILQLRAADLDVGVNGQIEYVFGAATESVRRLLRLDETSGWLSVLHRIDREEVNQLRFTVMARDRGQPPKTDKATVVLNIKDENDNVPSIEIRKIGRIPLKDGVANVAEDVLVDTPIALVQVSDRDQGENGVVTCTVVGDVPFQLKPASDTEGDQNKKKYFLHTSTPLDYEATREFNVVIVAVDSGSPSLSSNNSLIVKVGDTNDNPPMFGQSVVEVYFPENNIPGERVATVLATDADSGKNAEIAYSLDSSVMGIFAIDPDSGDILVNTVLDREQTDRYEFKVNAKDKGIPVLQGSTTVIVQVADKNDNDPKFMQDVFTFYVKENLQPNSPVGMVTVMDADKGRNAEMSLYIEENNNIFSIENDTGTIYSTMSFDREHQTTYTFRVKAVDGGDPPRSATATVSLFVMDENDNAPTVTLPKNISYTLLPPSSNVRTVVATVLATDSDDGINADLNYSIVGGNPFKLFEIDPTSGVVSLVGKLTQKHYGLHRLVVQVNDSGQPSQSTTTLVHVFVNESVSNATAIDSQIARSLHIPLTQDIAGDPSYEISKQRLSIVIGVVAGIMTVILIILIVVMARYCRSKNKNGYEAGKKDHEDFFTPQQHDKSKKPKKDKKNKKSKQPLYSSIVTVEASKPNGQRYDSVNEKLSDSPSMGRYRSVNGGPGSPDLARHYKSSSPLPTVQLHPQSPTAGKKHQAVQDLPPANTFVGAGDNISIGSDHCSEYSCQTNNKYSKQMRLHPYITVFG

SEQ ID NO: 752289 - protein, 1247 aa, Homo sapiens
MLRMRTAGWARGWCLGCCLLLPLSLSLAAAKQLLRYRLAEEGPADVRIGNVASDLGIVTGSGEVTFSLESGSEYLKIDNLTGELSTSERRIDREKLPQCQMIFDENECFLDFEVSVIGPSQSWVDLFEGQVIVLDINDNTPTFPSPVLTLTVEENRPVGTLYLLPTATDRDFGRNGIERYELLQEPGGGGSGGESRRAGAADSAPYPGGGGNGASGGGSGGSKRRLDASEGGGGTNPGGRSSVFELQVADTPDGEKQPQLIVKGALDREQRDSYELTLRVRDGGDPPRSSQAILRVLITDVNDNSPRFEKSVYEADLAENSAPGTPILQLRAADLDVGVNGQIEYVFGAATESVRRLLRLDETSGWLSVLHRIDREEVNQLRFTVMARDRGQPPKTDKATVVLNIKDENDNVPSIEIRKIGRIPLKDGVANVAEDVLVDTPIALVQVSDRDQGENGVVTCTVVGDVPFQLKPASDTEGDQNKKKYFLHTSTPLDYEATREFNVVIVAVDSGSPSLSSNNSLIVKVGDTNDNPPMFGQSVVEVYFPENNIPGERVATVLATDADSGKNAEIAYSLDSSVMGIFAIDPDSGDILVNTVLDREQTDRYEFKVNAKDKGIPVLQGSTTVIVQVADKNDNDPKFMQDVFTFYVKENLQPNSPVGMVTVMDADKGRNAEMSLYIEENNNIFSIENDTGTIYSTMSFDREHQTTYTFRVKAVDGGDPPRSATATVSLFVMDENDNAPTVTLPKNISYTLLPPSSNVRTVVATVLATDSDDGINADLNYSIVGGNPFKLFEIDPTSGVVSLVGKLTQKHYGLHRLVVQVNDSGQPSQSTTTLVHVFVNESVSNATAIDSQIARSLHIPLTQDIAGDPSYEISKQRLSIVIGVVAGIMTVILIILIVVMARYCRSKNKNGYEAGKKDHEDFFTPQQHDKSKKPKKDKKNKKSKQPLYSSIVTVEASKPNGQRYDSVNEKLSDSPSMGRYRSVNGGPGSPDLARHYKSSSPLPTVQLHPQSPTAGKKHQAVQDLPPANTFVGAGDNISIGSDHCSEYSCQTNNKYSKQPFRRVTFSVVSQPQDPHQGSLQSCYDSGLEESETPSSKSSSGPRLGALPLPEDNYERTTPDGSVDSRPLPDVALTGKCTRECDEYGHSDSCWMPVRTSPERKKSQPKLSTFMPVDERGSQEKLANGEAAIMGDRNRNLLNKKLTSSYETFSAASFSKNEEANPEDIPLTKTGEYKPSPVNTLTRREVYL

SEQ ID NO: 752290 - protein, 72 aa, Homo sapiens
MQVSLTQKSILILFNFSISASLRDTVDYVNWNKAELRLGAVVVHACNPNALGGPEFEISLGKTVRPPSLQKT

SEQ ID NO: 752291 - protein, 1149 aa, Homo sapiens
MEFDGNFNTNVSRTISCDRLSTTVNSRAFNPGRDLNSGVENWLQYLQVLADNLKSNPGIKWQYFSSEEGIFTVFPAHKFRCKGSYEHRSRPIYVSTVRPQSKHIVVILDHGASVTDTQLQIAKDAAQVILSAIDEHDKISVLTVADTVRTCSLDQCYKTFLSPATSETKRKMSTFVSSVKSSDSPTQHAVGFQKAFQLIRSTNNNTKFQANTDMVIIYLSAGITSKDSSEEDKKATLQVINEENSFLNNSVMILTYALMNDGVTGLKELAFLRDLAEQNSGKYGVPDRTALPVIKGSMMVLNQLSNLETTVGRFYTNLPNRMIDEAVFSLPFSDEMGDGLIMTVSKPCYFGNLLLGIVGVDVNLAYILEDVTYYQDSLASYTFLIDDKGYTLMHPSLTRPYLLSEPPLHTDIIHYENIPKFELVRQNILSLPLGSQIIAVPVNSSLSWHINKLRETGKEAYNVSYAWKMVQDTSFILCIVVIQPEIPVKQLKNLNTVPSSKLLYHRLDLLGQPSACLHFKQLATLESPTIMLSAGSFSSPYEHLSQPETKRMVEHYTAYLSDNTRLIANPGLKFSVRNEVMATSHVTDEWMTQMEMSSLNTYIVRRYIATPNGVLRIYPGSLMDKAFDPTRRQWYLHAVANPGLISLTGPYLDVGGAGYVVTISHTIHSSSTQLSSGHTVAVMGIDFTLRYFYKVLMDLLPVCNQDGGNKIRCFIMEDRGYLVAHPTLIDPKGHAPVEQQHITHKEPLVANDILNHPNFVKKNLCNSFSDRTVQRFYKFNTSLAGDLTNLVHGSHCSKYRLARIPGTNAFVGIVNETCDSLAFCACSMVDRLCLNCHRMEQNECECPCECPLEVNECTGNLTNAENRNPSCEVHQEPVTYTAIDPGLQDALHQCVNSRCSQRLESGDCFGVLDCEWCMVDSDGKTHLDKPYCAPQKECFGGIVGAKSPYVDDMGAIGDEVITLNMIKSAPVGPVAGGIMGCIMVLVLAVYAYRHQIHRRSHQHMSPLAAQEMSVRMSNLENDRDERDDDSHEDRGIISNTRFIAAVIERHAHSPERRRRYWGRSGTESDHGYSTMSPQEDSENPPCNNDPLSAGVDVGNHDEDLDLDTPPQTAALLSHKFHHYRSHHPTLHHSHHLQAAVTVHTVDAEC

SEQ ID NO: 752292 - protein, 1258 aa, Homo sapiens
RPPLWLLCLVACWLLGAGAEADFSILDEAQVLASQMRRLAAEELGVVTMQRIFNSFVYTEKISNGESEVQQLAKKIREKFNRYLDVVNRNKQVVEASYTAHLTSPLTAIQDCCTIPPSMMEFDGNFNTNVSRTISCDRLSTTVNSRAFNPGRDLNSVLADNLKSNPGIKWQYFSSEEGIFTVFPAHKFRCKGSYEHRSRPIYVSTVRPQSKHIVVILDHGASVTDTQLQIAKDAAQVILSAIDEHDKISVLTVADTVRTCSLDQCYKTFLSPATSETKRKMSTFVSSVKSSDSPTQHAVGFQKAFQLIRSTNNNTKFQANTDMVIIYLSAGITSKDSSEEDKKATLQVINEENSFLNNSVMILTYALMNDGVTGLKELAFLRDLAEQNSGKYGVPDRTALPVIKGSMMVLNQLSNLETTVGRFYTNLPNRMIDEAVFSLPFSDEMGDGLIMTVSKPCYFGNLLLGIVGVDVNLAYILEDVTYYQDSLASYTFLIDDKGYTLMHPSLTRPYLLSEPPLHTDIIHYENIPKFELVRQNILSLPLGSQIIAVPVNSSLSWHINKLRETGKEAYNVSYAWKMVQDTSFILCIVVIQPEIPVKQLKNLNTVPSSKLLYHRLDLLGQPSACLHFKQLATLESPTIMLSAGSFSSPYEHLSQPETKRMVEHYTAYLSDNTRLIANPGLKFSVRNEVMATSHVTDEWMTQMEMSSLNTYIVRRYIATPNGVLRIYPGSLMDKAFDPTRRQWYLHAVANPGLISLTGPYLDVGGAGYVVTISHTIHSSSTQLSSGHTVAVMGIDFTLRYFYKVLMDLLPVCNQDGGNKIRCFIMEDRGYLVAHPTLIDPKGHAPVEQQHITHKEPLVANDILNHPNFVKKNLCNSFSDRTVQRFYKFNTSLAGDLTNLVHGSHCSKYRLARIPGTNAFVGIVNETCDSLAFCACSMVDRLCLNCHRMEQNECECPCECPLEVNECTGNLTNAENRNPSCEVHQEPVTYTAIDPGLQDALHQCVNSRCSQRLESGDCFGVLDCEWCMVDSDGKTHLDKPYCAPQKECFGGIVGAKSPYVDDMGAIGDEVITLNMIKSAPVGPVAGGIMGCIMVLVLAVYAYRHQIHRRSHQHMSPLAAQEMSVRMSNLENDRDERDDDSHEDRGIISNTRFIAAVIERHAHSPERRRRYWGRSGTESDHGYSTMSPQEDSENPPCNNDPLSAGVDVGNHDEDLDLDTPPQTAALLSHKFHHYRSHHPTLHHSHHLQAAVTVHTVDAEC

SEQ ID NO: 752293 - protein, 556 aa, Homo sapiens
RPPLWLLCLVACWLLGAGAEADFSILDEAQVLASQMRRLAAEELGVVTMQRIFNSFVYTEKISNGESEVQQLAKKIREKFNRYLDVVNRNKQVVEASYTAHLTSPLTAIQDCCTIPPSMMEFDGNFNTNVSRTISCDRLSTTVNSRAFNPGRDLNSVLADNLKSNPGIKWQYFSSEEGIFTVFPAHKFRCKGSYEHRSRPIYVSTVRPQSKHIVVILDHGASVTDTQLQIAKDAAQVILSAIDEHDKISVLTVADTVRTCSLDQCYKTFLSPATSETKRKMSTFVSSVKSSDSPTQHAVGFQKAFQLIRSTNNNTKFQANTDMVIIYLSAGITSKDSSEEDKKATLQVINEENSFLNNSVMILTYALMNDGVTGLKELAFLRDLAEQNSGKYGVPDRTALPVIKGSMMVLNQLSNLETTVGRFYTNLPNRMIDEAVFSLPFSDEMGDGLIMTVSKPCYFGNLLLGIVGVDVNLAYILEDVTYYQDSLASYTFLIDDKGYTLMHPSLTRPYLLSEPPLHTDIIHYENIPKFELVRQNILRIKSGYYNMGHCNFKVVF

SEQ ID NO: 752294 - protein, 1907 aa, Homo sapiens
MEVAWLVYVLGQQPLARQGEGQSRLVPGRGLVLWLPGLPRSSPSWPAVDLAPLAPARPRGPLICHTGHEQAGREPGPGSSTKGPVLHDQDTRCAFLPRPPGPLQTRRYCRHQGRQGSGLGAGPGAGTWAPAPPGVSKPRCPGRARPGEGQQQVTTARPPAINRGARQPRAGAAAAGRGPGAGAWRTGEAAASAGPAVGEGGAMGSRRAPSRGWGAGGRSGAGGDGEDDGPVWIPSPASRSYLLSVRPETSLSSNRLSHPSSGRSTFCSIIAQLTEETQPLFETTLKSRSVSEDSDVRFTCIVTGYPEPEVTWYKDDTELDRYCGLPKYEITHQGNRHTLQLYRCREEDAAIYQASAQNSKGIVSCSGVLEVGTMTEYKIHQRWFAKLKRKAAAKLREIEQSWKHEKAVPGEVDTLRKLSPDRFQRKRRLSGAQAPGPSVPTREPEGGTLAAWQEGETETAQHSGLGLINSFASGEVTTNGEAAPENGEDGEHGLLTYICDAMELGPQRALKEESGAKKKKKDEESKQGLRKPELEKAAQSRRSSENCIPSSDEPDSCGTQGPVGVEQVQTQPRGRAARGPGSSGTDSTRKPASAVGTPDKAQKAPGPGPGQEVYFSLKDMYLENTQAVRPLGEEGPQTLSVRAPGESPKGKAPLRARSEGVPGAPGQPTHSLTPQPTRPFNRKRFAPPKPKGEATTDSKPISSLSQAPECGAQSLGKAPPQASVQVPTPPARRRHGTRDSTLQGQAGHRTPGEVLECQTTTAPTMSASSSSDVASIGVSTSGSQGIIEPMDMETQEDGRTSANQRTGSKKNVQADGKIQVDGRTRGDGTQTAQRTRADRKTQVDAGTQESKRPQSDRSAQKGMMTQGRAETQLETTQAGEKIQEDRKAQADKGTQEDRRMQGEKGMQGEKGTQSEGSAPTAMEGQSEQEVATSLGPPSRTPKLPPTAGPRAPLNIECFVQTPEGSCFPKKPGCLPRSEEAVVTASRNHEQTVLGPLSGNLMLPAQPPHEGSVEQVGGERCRGPQSSGPVEAKQEDSPFQCPKEERPGGVPCMDQGGCPLAGLSQEVPTMPSLPGTGLTASPKAGPCSTPTSQHGSTATFLPSEDQVLMSSAPTLHLGLGTPTQSHPPETMATSSEGACAQVPDVEGRTPGPRSCDPGLIDSLKNYLLLLLKLSSTETSGAGGESQVGAATGGLVPSATLTPTVEVAGLSPRTSRRILERVENNHLVQSAQTLLLSPCTSRRLTGLLDREVQAGRQALAAARGSWGPGPSSLTVPAIVVDEEDPGLASEGASEGEGEVSLEGPGLLGASQESSMAGRLGEAGGQAAPGQGPSAESIAQEPSQEEKFPGEALTGLPAATPEELALGARRKRFLPKVRAAGDGEATTPEERESPTVSPRGPRKSLVPGSPGTPGRERRSPTQGRKASMLEVPRAEEELAAGDLGPSPKAGGLDTEVALDEGKQETLAKPRKAKDLLKAPQVIRKIRVEQFPDASGSLKLWCQFFNILSDSVLTWAKDQRPVGEVGRSAGDEGPAALAIVQASPVDCGVYRCTIHNEHGSASTDFCLSPEVLSGFISREEGEVGEEIEMTPMVFAKGLADSGCWGDKLFGRLVSEELRGGGYGCGLRKASQAKVIYGLEPIFESGRTCIIKVSSLLVFGPSSETSLVGRNYDVTIQGCKIQNMSREYCKIFAAEARAAPGFGEVPEIIPLYLIYRPANNIPYATLEEDLGKPLESYCSREWGCAEAPTASGSSEAMQKCQTFQHWLYQWTNGSFLVTDLAGVDWKMTDVQIATKLRGYQGLKESCFPALLDRFASSHQCNAYCELLGLTPLKGPEAAHPQAKAKGSKSPSAGRKGSQLSPQPQKKGLPSPQGTRKSAPSSKATPQASEPVTTQLLGQPPTQEEGSKAQGMR

SEQ ID NO: 752295 - protein, 1907 aa, Homo sapiens; identical to SEQ ID NO: 752294

SEQ ID NO: 752296 - protein, 1907 aa, Homo sapiens; identical to SEQ ID NO: 752294

SEQ ID NO: 752297 - protein, 1907 aa, Homo sapiens; identical to SEQ ID NO: 752294

SEQ ID NO: 752298 - protein, 990 aa, Homo sapiens
MEVAWLVYVLGQQPLARQGEGQSRLVPGRGLVLWLPGLPRSSPSWPAVDLAPLAPARPRGPLICHTGHEQAGREPGPGSSTKGPVLHDQDTRCAFLPRPPGPLQTRRYCRHQGRQGSGLGAGPGAGTWAPAPPGVSKPRCPGRARPGEGQQQVTTARPPAINRGARQPRAGAAAAGRGPGAGAWRTGEAAASAGPAVGEGGAMGSRRAPSRGWGAGGRSGAGGDGEDDGPVWIPSPASRSYLLSVRPETSLSSNRLSHPSSGRSTFCSIIAQLTEETQPLFETTLKSRSVSEDSDVRFTCIVTGYPEPEVTWYKDDTELDRYCGLPKYEITHQGNRHTLQLYRCREEDAAIYQASAQNSKGIVSCSGVLEVGTMTEYKIHQRWFAKLKRKAAAKLREIEQSWKHEKAVPGEVDTLRKLSPDRFQRKRRLSGAQAPGPSVPTREPEGGTLAAWQEGETETAQHSGLGLINSFASGEVTTNGEAAPENGEDGEHGLLTYICDAMELGPQRALKEESGAKKKKKDEESKQGLRKPELEKAAQSRRSSENCIPSSDEPDSCGTQGPVGVEQVQTQPRGRAARGPGSSGTDSTRKPASAVGTPDKAQKAPGPGPGQEVYFSLKDMYLENTQAVRPLGEEGPQTLSVRAPGESPKGKAPLRARSEGVPGAPGQPTHSLTPQPTRPFNRKRFAPPKPKGEATTDSKPISSLSQAPECGAQSLGKAPPQASVQVPTPPARRRHGTRDSTLQGQAGHRTPGEVLECQTTTAPTMSASSSSDVASIGVSTSGSQGIIEPMDMETQEDGRTSANQRTGSKKNVQADGKIQVDGRTRGDGTQTAQRTRADRKTQVDAGTQESKRPQSDRSAQKGMMTQGRAETQLETTQAGEKIQEDRKAQADKGTQEDRRMQGEKGMQGEKGTQSEGSAPTAMEGQSEQEVATSLGPPSRTPKLPPTAGPRAPLNIECFVQTPEGSCFPKKPGCLPSVSPPLPACIPRLLW

SEQ ID NO: 752299 - protein, 1907 aa, Homo sapiens; identical to SEQ ID NO: 752294

SEQ ID NO: 752300 - protein, 93 aa, Homo sapiens
LFGRLVSEELRGGGYGCGLRKASQAKVIYGLEPIFESGRTCIIKVSSLLVFGPSSETSLVGRNYDVTIQVLCPIFTPHSFILSPPPLSQPRSC

SEQ ID NO: 752301 - protein, 294 aa, Homo sapiens
MAHGIPSQGKVTITVDEYSSNPTQAFTHYNINQSRFQPPHVHMVDPIPYDTPKPAGHTRFVCISDTHSRTDGIQMPYGDILLHTGDFTELGLPSEVKKFNDWLGNLPYEYKIVIAGNHELTFDKEFMADLVKQDYYRFPSVSKLKPEDFDNVQSLLTNSIYLQDSEVTVKGFRIYGAPWTPWFNGWGFNLPRGQSLLDKWNLIPEGIDILMTHGPPLGFRDWVPKELQRVGCVELLNTVQRRVRPKLHVFGGIHEGYGIMTDGYTTYINASTCTVSFQPTNPPIIFDLPNPQGS

SEQ ID NO: 752302 - protein, 294 aa, Homo sapiens; identical to SEQ ID NO: 752301

SEQ ID NO: 752303 - protein, 294 aa, Homo sapiens; identical to SEQ ID NO: 752301

SEQ ID NO: 752304 - protein, 294 aa, Homo sapiens; identical to SEQ ID NO: 752301

SEQ ID NO: 752305 - protein, 168 aa, Homo sapiens
MADLVKQDYYRFPSVSKLKPEDFDNVQSLLTNSIYLQDSEVTVKGFRIYGAPWTPWFNGWGFNLPRGQSLLDKWNLIPEGIDILMTHGPPLGFRDWVPKELQRVGCVELLNTVQRRVRPKLHVFGGIHEGYGIMTDGYTTYINASTCTVSFQPTNPPIIFDLPNPQGS

SEQ ID NO: 752306 - protein, 119 aa, Homo sapiens
RRGARTERRLGRPASWSCAPLTPVAVPVTAPLALPPARRALAPSPRPLARSLPRSRLLGSFLPPPPSSAAPPGPQPQPAAGPPGSKVLARSRPSPPPRAPSAPPAGSGRSAMDRLLAGR

SEQ ID NO: 752307 - protein, 179 aa, Homo sapiens
MAHGIPSQGKVTITVDEYSSNPTQAFTHYNINQSRFQPPHVHMVDPIPYDTPKPAGHTRFVCISDTHSRTDGIQMPYGDILLHTGDFTELGLPSEVKKFNDWLGNLPYEYKIVIAGNHELTFDKEFMADLVKQDYYRFPSVSKLKPEDFDNVQSLLTNSIYLQDSEVTVKGFRIYGAPW

SEQ ID NO: 752308 - protein, 284 aa, Homo sapiens
GCLGGAGCLGGGAAGPAGCSALPAALPMVVPTQPARRLQPRKSSFPGDGDEAPGPGGGEGAAAGGGGGGLGSGGRSAQRRAGAGARRPIGAAPSVGPGGELQGWGRKSGCRPPGPEGWAGGRKLRRWLPPRRFSNFCCRSPCAQTAVRRRRRRAPSPRGAGWREGAGAGRGTPATMAGGEWAAEPLHLPQRGRPAPLHLPEREATEARPRRRRARRRLRVLEPHPPARLGRGIGRVWVKGITAWGLEGHIFSAPRISATASTARRPTVVQRWGARAAFPSRVPD

SEQ ID NO: 752309 - protein, 284 aa, Homo sapiens; identical to SEQ ID NO: 752308

SEQ ID NO: 752310 - protein, 284 aa, Homo sapiens; identical to SEQ ID NO: 752308

SEQ ID NO: 752311 - protein, 58 aa, Homo sapiens
MAAGLAARTTASRQFLRGASPGLSGQLCTRNPEYFPGCSGKTGGSSAESPLGVCVGGA

SEQ ID NO: 752312 - protein, 544 aa, Homo sapiens
MLNMQGAEERDIRRETCPGWVNKNKPALEQDVCKIDSSGIVVKRFQEDEYQDSTFEEKYACEGMKENSPREIAESCLFQEGGFGRITFIHKEAPPEIISQGYNFEKSLLLTSSLVTRLRVSTEESLHQWETSNIQTNDISDQSKCPTLCTQKKSWKCNECGKTFTQSSSLTQHQRTHTGERPYTCEECGKAFSRSSFLVQHQRIHTGVKPYGCEQCGKTFRCRSFLTQHQRIHTGEKPYKCNECGNSFRNHSHLTEHQRIHTGEKPYKCNRCGKAFNQNTHLIHHQRIHTGEKPYICSECGSSFRKHSNLTQHQRIHTGEKPHKCDECGKTFQTKANLSQHQRIHSGEKPYKCKECGKAFCQSPSLIKHQRIHTGEKPYKCKECGKAFTQSTPLTKHQRIHTGERPYKCSECGKAFIQSICLIRHQRSHTGEKPYKCNECGKGFNQNTCLTQHMRIHTGEKPYKCKECGKAFAHSSSLTEHHRTHTGEKLYKCSECEKTFRKYAHLSEHYRIHTGEKPYECIECGKFFRHSSVLFRHQKLHSGD

SEQ ID NO: 752313 - protein, 541 aa, Homo sapiens
MQGAEERDIRRETCPGWVNKNKPALEQDVCKIDSSGIVVKRFQEDEYQDSTFEEKYACEGMKENSPREIAESCLFQEGGFGRITFIHKEAPPEIISQGYNFEKSLLLTSSLVTRLRVSTEESLHQWETSNIQTNDISDQSKCPTLCTQKKSWKCNECGKTFTQSSSLTQHQRTHTGERPYTCEECGKAFSRSSFLVQHQRIHTGVKPYGCEQCGKTFRCRSFLTQHQRIHTGEKPYKCNECGNSFRNHSHLTEHQRIHTGEKPYKCNRCGKAFNQNTHLIHHQRIHTGEKPYICSECGSSFRKHSNLTQHQRIHTGEKPHKCDECGKTFQTKANLSQHQRIHSGEKPYKCKECGKAFCQSPSLIKHQRIHTGEKPYKCKECGKAFTQSTPLTKHQRIHTGERPYKCSECGKAFIQSICLIRHQRSHTGEKPYKCNECGKGFNQNTCLTQHMRIHTGEKPYKCKECGKAFAHSSSLTEHHRTHTGEKLYKCSECEKTFRKYAHLSEHYRIHTGEKPYECIECGKFFRHSSVLFRHQKLHSGD

SEQ ID NO: 752314 - protein, 544 aa, Homo sapiens; identical to SEQ ID NO: 752312

SEQ ID NO: 752315 - protein, 168 aa, Homo sapiens
LLLNTRPPKQAFTQSTPLTKHQRIHTGERPYKCSECGKAFIQSICLIRHQRSHTGEKPYKCNECGKGFNQNTCLTQHMRIHTGEKPYKCKECGKAFAHSSSLTEHHRTHTGEKLYKCSECEKTFRKYAHLSEHYRIHTGEKPYECIECGKFFRHSSVLFRHQKLHSGD

SEQ ID NO: 752316 - protein, 39 aa, Homo sapiens
MHARKANDAGHHQELGEAQGRSPSALEGPSPGHTFISDL

SEQ ID NO: 752317 - protein, 273 aa, Homo sapiens
MTFDDLKIQTVKDQPDEKSNGKKAKGLQFLYSPWWCLAAATLGVLCLGLVVTIMVLGMQLSQVSDLLTQEQANLTHQKKKLEGQISARQQAEEASQESENELKEMIETLARKLNEKSKEQMELHHQNLNLQETLKRVANCSAPCPQDWIWHGENCYLFSSGSFNWEKSQEKCLSLDAKLLKINSTADLDFIQQAISYSSFPFWMGLSRRNPSYPWLWEDGSPLMPHLFRVRGAVSQTYPSGTCAYIQRGAVYAENCILAAFSICQKKANLRAQ

SEQ ID NO: 752318 - protein, 220 aa, Homo sapiens
MVLGMQLSQVSDLLTQEQANLTHQKKKLEGQISARQQAEEASQESENELKEMIETLARKLNEKSKEQMELHHQNLNLQETLKRVANCSAPCPQDWIWHGENCYLFSSGSFNWEKSQEKCLSLDAKLLKINSTADLDFIQQAISYSSFPFWMGLSRRNPSYPWLWEDGSPLMPHLFRVRGAVSQTYPSGTCAYIQRGAVYAENCILAAFSICQKKANLRAQ

SEQ ID NO: 752319 - protein, 273 aa, Homo sapiens; identical to SEQ ID NO: 752317

SEQ ID NO: 752320 - protein, 201 aa, Homo sapiens
MTFDDLKIQTVKDQPDEKSNGKKAKGLQFLYSPWWCLAAATLGVLCLGLVVTIMVLGMQLSQVSDLLTQEQANLTHQKKKLEGQISARQQAEEASQESENELKEMIETLARKLNEKSKEQMELHHQNLNLQETLKRVANCSAPCPQDWIWHGENCYLFSSGSFNWEKSQEKCLSLDFSFSFRASASIIYLSSLADSCEASS

SEQ ID NO: 752321 - protein, 273 aa, Homo sapiens; identical to SEQ ID NO: 752317

SEQ ID NO: 752322 - protein, 227 aa, Homo sapiens
MTFDDLKIQTVKDQPDEKSNGKKAKGLQFLYSPWWCLAAATLGVLCLGLVVTIMVLGMQLSQVSDLLTQEQANLTHQKKKLEGQISARQQAEEASQESENELKEMIETLARKLNEKSKEQMELHHQNLNLQETLKRVANCSAPCPQDWIWHGENCYLFSSGSFNWEKSQEKCLSLDAKLLKINSTADLDFIQQAISYSSFPFWMGLSRRNPSYPWLWEDGSPLMPHL

SEQ ID NO: 752323 - protein, 189 aa, Homo sapiens
MTFDDLKIQTVKDQPDEKSNGKKAKGLQFLYSPWWCLAAATLGVLCLGLVVTIMVLGMQLSQVSDLLTQEQANLTHQKKKLEGQISARQQAEEASQESENELKEMIETLARKLNEKSKEQMELHHQNLNLQETLKRVANCSAPCPQDWIWHGENCYLFSSGSFNWEKSQEKCLSLDAKLLKINSTADLI

SEQ ID NO: 752324 - protein, 78 aa, Homo sapiens
YQLWGPGGRHAGGCKLQHSKTLGLCQGDPVIWALPGPQPARQMQHPLQGRPVESLGSLFLDPVIQVFMLCSRGPHERA

SEQ ID NO: 752325 - protein, 102 aa, Homo sapiens
CIISLCSLQPQQIHSYTQNLQDYLPSFSIYQILIFLCNSLLESPSSKRIFFIQVSIFLNTTLLTATPLQHFFFSRYLAIVYLSFGIKFDSCFITTLPKQQCF

SEQ ID NO: 752326 - protein, 102 aa, Homo sapiens; identical to SEQ ID NO: 752325

SEQ ID NO: 752327 - protein, 114 aa, Homo sapiens
FLSYTSAQKEELFDVICQECRLFSCVNSSLYNPDHSILVVRAREGVWIPVRLSRPWKASPSVHIITEILQKILKALLALNCCFNFSHYGMIAVTATATAAGSCFAFPQYKQQTM

SEQ ID NO: 752328 - protein, 179 aa, Homo sapiens
MGVEREGGKSQCGERVDQTGLAPWAPLSEPRPGLRGRPYKWLWAETEKSVPVSPHVCLHHCHRDPAAMSYPVTSQPQCATTSCYQTQLSDWHTGLTDCCNDMPVCLCGTFAPLCLACRISDDFGECCCAPYLPGGLHSIRTGMRERYHIQGSVGHDWAALTFCLPCALCQMARELKIRE

SEQ ID NO: 752329 - protein, 31 aa, Homo sapiens
MVQKKLTEGEQDEASNAAMLLEKETQNENNS

SEQ ID NO: 752330 - protein, 189 aa, Homo sapiens
MFDFLSKELVRLQEERRIHAFVMLAERQRRVREAEESGRRQVEKQRLREEDEIFKEVAKVHHSTISSYLEDIILNTEANTAEEQARAEIEKMAEKINDIAYEMESRRTYLQSEEIVAELVYSFLIPEVQKYFVKEKVRNAQRKHILAAHQIIHSYTESMVQKKLTEGEQDEASNAAMLLEKETQNENNS

SEQ ID NO: 752331 - protein, 733 aa, Homo sapiens
MFSNLIHYPRYSLYWSKSDPVPPFISREWKGHKEKHREALRQLTTTDASFQMPKEVYEDPEVTGKNRYKYFERPFLPFFQQMPFNVVYAVSKWSLAPSLRLECSGVISARCNLHLQGSSDSPSSASQVAGITGQNHTLFLLLLLSTYPSLQSLLWALRLIIGMLTFKQIHTLQKYVVCQDSIPELLTLATLTWGRGLPAGQAEVEMIERAREKRAWEASLPALSDTSQFEKRRKMMNEMERKEWAFREQEIEKLQEIRLEVLKELLRKREENQNEVNMKHLNARWSKLQEGKEAKMAKIQRTHVSTIRKLVGKRKNIEGKLERRNIIKDYSDYASQVYGPLSRLGCFPDNNSEDFVVKNYYLNTYEGLVELESCLPDFVTQPQIRAPKPKVITTKAGFLKRAARLDYELAEVHKALLDKKNKVLEVKKPPRFLQRNPIPQPRLPTPTLEMTSNEEEEMEMAVIYLQKLLRGRVVQNMMFEGKEKRLELIQELRTCHALQEDEKLVKKAEKQVTLALQRQRNLHEHKVSLVENHLAGLEGRALADMFDFLSKELVRLQEERRIHAFVMLAERQRRVREAEESGRRQVEKQRLREEDEIFKEVVKVHHSTISSYLEDIILNTEANTAEEQARAEIEKMAEKINDIAYEMESRRTYLQSEEIVAELVYSFLIPEVQKYFVKEKVRNAQRKHILAAHQIIHSYTESMVQKKLTEGEQDEASNAAMLLEKETQNENNS

SEQ ID NO: 752332 - protein, 553 aa, Homo sapiens
MFSNLIHYPRYSLYWSKSDPVPPFISREWKGHKEKHREALRQLTTTDASFQMPKEVYEDPEVTGKNRYKYFERPFLPFFQQMPFNVVYAVSKWSLAPSLRLECSGVISARCNLHLQGSSDSPSSASQVAGITGQNHTLFLLLLLSTYPSLQSLLWALRLIIGMLTFKQIHTLQKYVVCQDSIPELLTLATLTWGRGLPAGQAEVEMIERAREKRAWEASLPALSDTSQFEKRRKMMNEMERKEWAFREQEIEKLQEIRLEVLKELLRKREENQNEVNMKHLNARWSKLQEGKEAKMAKIQRTHVSTIRKLVGKRKNIEGKLERRNIIKDYSDYASQVYGPLSRLGCFPDNNSEDFVVKNYYLNTYEGLVELESCLPDFVTQPQIRAPKPKVITTKAGFLKRAARLDYELAEVHKALLDKKNKVLEVKKPPRFLQRNPIPQPRLPTPTLEMTSNEEEEMEMAVIYLQKLLRGRVVQNMMFEGKEKRLELIQELRTCHALQEDEKLVKKAEKQVTLALQRQRNLHEHKVFLFLFSCYFLVKFSPLILSSHSTIII

SEQ ID NO: 752333 - protein, 189 aa, Homo sapiens; identical to SEQ ID NO: 752330

SEQ ID NO: 752334 - protein, 31 aa, Homo sapiens; identical to SEQ ID NO: 752329

SEQ ID NO: 752335 - protein, 31 aa, Homo sapiens; identical to SEQ ID NO: 752329

SEQ ID NO: 752336 - protein, 75 aa, Homo sapiens
GVRGQFFGAVISMSLTDCSRGNAYCDLLTCDLSTCRLPALGSVRARKSLWSRSQSWDGIQGTTKVSLSLSILKNE

SEQ ID NO: 752337 - protein, 106 aa, Homo sapiens
MTFIIIVLLVYVTFCPLIQQTFMDTSHVLGIALGMVVGLVALCIPGEIPAQSASTITSNVSESILRCGEVFFFFFYFTNFPDGFSLLKVYLERGHLTAFIFSSTCF

SEQ ID NO: 752338 - protein, 135 aa, Homo sapiens
HFFRAKVSPCWPTSASQGAGITGVSHARPAHLCVILIQHLLSAYCMFGIKWWSLISKDLESRGQKLKRLVLCTSESAHRLNKYGKKIFPTAEEFSVPRAQSRTHSSHPPVAVATPSSRSPSAHSYGSPGLSPAIE

SEQ ID NO: 752339 - protein, 164 aa, Homo sapiens
HFFRAKVSPCWPTSASQGAGITGVSHARPAHLCVILIQHLLSAYCMFGIKWWSLISKDLESRGQKLKRLVLCTSESAHRLNKYSGGSTAVLTVEFRRGDQAPSPPTSEIQHQFQGSRTRARGRLTLSPRLRGRRSPEAQARQGQRDRETQGPRGSGRLKTQVRL

SEQ ID NO: 752340 - protein, 907 aa, Homo sapiens
MYARLRIGGDGGRAGTRRGRPPGQRRQPLLPGALRTPQRPPAAAACLALPGTMSEARRDSTSSLQRKKPPWLKLDIPSAVPLTAEEPSFLQPLRRQAFLRSVSMPAETAHISSPHHELRRPVLQRQTSITQTIRRGTADWFGVSKDSDSTQKWQRKSIRHCSQRYGKLKPQVLRELDLPSQDNVSLTSTETPPPLYVGPCQLGMQKIIDPLARGRAFRVADDTAEGLSAPHTPVTPGAASLCSFSSSRSGFHRLPRRRKRESVAKMSFRAAAALMKGRSVRDGTFRRAQRRSFTPASFLEEDTTDFPDELDTSFFAREGILHEELSTYPDEVFESPSEAALKDWEKAPEQADLTGGALDRSELERSHLMLPLERGWRKQKEGAAAPQPKVRLRQEVVSTAGPRRGQRIAVPVRKLFAREKRPYGLGMVGRLTNRTYRKRIDSFVKRQIEDMDDHRPFFTYWLTFVHSLVTILAVCIYGIAPVGFSQHETVDSVLRNRGVYENVKYVQQENFWIGPSSEALIHLGAKFSPCMRQDPQVHSFIRSAREREKHSACCVRNDRSGCVQTSEEECSSTLAVWVKWPIHPSAPELAGHKRQFGSVCHQDPRVCDEPSSEDPHEWPEDITKWPICTKNSAGNHTNHPHMDCVITGRPCCIGTKGRCEITSREYCDFMRGYFHEEATLCSQVHCMDDVCGLLPFLNPEVPDQFYRLWLSLFLHAGILHCLVSICFQMTVLRDLEKLAGWHRIAIIYLLSGVTGNLASAIFLPYRAEVGPAGSQFGILACLFVELFQSWQILARPWRAFFKLLAVVLFLFTFGLLPWIDNFAHISGFISGLFLSFAFLPYISFGKFDLYRKRCQIIIFQVVFLGLLAGLVVLFYVYPVRCEWCEFLTCIPFTDKFCEKYELDAQLH

SEQ ID NO: 752341 - protein, 948 aa, Homo sapiens
MYARLRIGGDGGRAGTRRGRPPGQRRQPLLPGALRTPQRPPAAAACLALPGTMSEARRDSTSSLQRKKPPWLKLDIPSAVPLTAEEPSFLQPLRRQAFLRSVSMPAETAHISSPHHELRRPVLQRQTSITQTIRRPWSLEWLQAWGRACCPGGGPLKSPAWEGRSGRPLLSPCHARGTADWFGVSKDSDSTQKWQRKSIRHCSQRYGKLKPQVLRELDLPSQDNVSLTSTETPPPLYVGPCQLGMQKIIDPLARGRAFRVADDTAEGLSAPHTPVTPGAASLCSFSSSRSGFHRLPRRRKRESVAKMSFRAAAALMKGRSVRDGTFRRAQRRSFTPASFLEEDTTDFPDELDTSFFAREGILHEELSTYPDEVFESPSEAALKDWEKAPEQADLTGGALDRSELERSHLMLPLERGWRKQKEGAAAPQPKVRLRQEVVSTAGPRRGQRIAVPVRKLFAREKRPYGLGMVGRLTNRTYRKRIDSFVKRQIEDMDDHRPFFTYWLTFVHSLVTILAVCIYGIAPVGFSQHETVDSVLRNRGVYENVKYVQQENFWIGPSSEALIHLGAKFSPCMRQDPQVHSFIRSAREREKHSACCVRNDRSGCVQTSEEECSSTLAVWVKWPIHPSAPELAGHKRQFGSVCHQDPRVCDEPSSEDPHEWPEDITKWPICTKNSAGNHTNHPHMDCVITGRPCCIGTKGRCEITSREYCDFMRGYFHEEATLCSQVHCMDDVCGLLPFLNPEVPDQFYRLWLSLFLHAGILHCLVSICFQMTVLRDLEKLAGWHRIAIIYLLSGVTGNLASAIFLPYRAEVGPAGSQFGILACLFVELFQSWQILARPWRAFFKLLAVVLFLFTFGLLPWIDNFAHISGFISGLFLSFAFLPYISFGKFDLYRKRCQIIIFQVVFLGLLAGLVVLFYVYPVRCEWCEFLTCIPFTDKFCEKYELDAQLH

SEQ ID NO: 752342 - protein, 1078 aa, Homo sapiens
MYARLRIGGDGGRAGTRRGRPPGQRRQPLLPGALRTPQRPPAAAACLALPGTMSEARRDSTSSLQRKKPPWLKLDIPSAVPLTAEEPSFLQPLRRQAFLRSVSMPAETAHISSPHHELRRPVLQRQTSITQTIRRPWSLEWLQAWGRACCPGGGPLKSPAWEGRSGRPLLSPCHARGTADWFGVSKDSDSTQKWQRKSIRHCSQRYGKLKPQVLRELDLPSQDNVSLTSTETPPPLYVGPCQLGMQKIIDPLARGRAFRVADDTAEGLSAPHTPVTPGAASLCSFSSSRSGFHRLPRRRKRESVAKMSFRAAAALMKGRSVRDGTFRRAQRRSFTPASFLEEDTTDFPDELDTSFFAREGILHEELSTYPDEVFESPSEAALKDWEKAPEQADLTGGALDRSELERSHLMLPLERGWRKQKEGAAAPQPKVRLRQEVVSTAGPRRGQRIAVPVRKLFAREKRPYGLGMVGRLTNRTYRKRIDSFVKRQIEDMDDHRPFFTYWLTFVHSLVTILAVCIYGIAPVGFSQHETVDSVLRNRGVYENVKYVQQENFWIGPSSEALIHLGAKFSPCMRQDPQVHSFIRSAREREKHSACCVRNDRSGCVQTSEEECSSTLAVWVKWPIHPSAPELAGHKRQFGSVCHQDPRVCDEPSSEDPHEWPEDITKWPVSCSGGVVREPSVSCGGECHTPPTGDTRDSHHGTTSRFQRLCTCPLYSLSINQRLPLRASRSRELDGDLKGQVTLFQFDRDSVWWPAGSQGSHTVFCFMSPPIFASTPKRGVGPKVGGGPGLSSSSFVTQICTKNSAGNHTNHPHMDCVITGRPCCIGTKGRCEITSREYCDFMRGYFHEEATLCSQVHCMDDVCGLLPFLNPEVPDQFYRLWLSLFLHAGILHCLVSICFQMTVLRDLEKLAGWHRIAIIYLLSGVTGNLASAIFLPYRAEVGPAGSQFGILACLFVELFQSWQILARPWRAFFKLLAVVLFLFTFGLLPWIDNFAHISGFISGLFLSFAFLPYISFGKFDLYRKRCQIIIFQVVFLGLLAGLVVLFYVYPVRCEWCEFLTCIPFTDKFCEKYELDAQLH

SEQ ID NO: 752343 - protein, 221 aa, Homo sapiens [sequence omitted]

SEQ ID NO: 752344 - protein, 943 aa, Homo sapiens
MYARLRIGGDGGRAGTRRGRPPGQRRQPLLPGALRTPQRPPAAAACLALPGTMSEARRDSTSSLQRKKPPWLKLDIPSAVPLTAEEPSFLQPLRRQAFLRSVSMPAETAHISSPHHELRRPVLQRQTSITQTIRSSRQVRFGRVHTLPLLGPRAARRAFPQRQSLSWSLLRGTADWFGVSKDSDSTQKWQRKSIRHCSQRYGKLKPQVLRELDLPSQDNVSLTSTETPPPLYVGPCQLGMQKIIDPLARGRAFRVADDTAEGLSAPHTPVTPGAASLCSFSSSRSGFHRLPRRRKRESVAKMSFRAAAALMKGRSVRDGTFRRAQRRSFTPASFLEEDTTDFPDELDTSFFAREGILHEELSTYPDEVFESPSEAALKDWEKAPEQADLTGGALDRSELERSHLMLPLERGWRKQKEGAAAPQPKVRLRQEVVSTAGPRRGQRIAVPVRKLFAREKRPYGLGMVGRLTNRTYRKRIDSFVKRQIEDMDDHRPFFTYWLTFVHSLVTILAVCIYGIAPVGFSQHETVDSVLRNRGVYENVKYVQQENFWIGPSSEALIHLGAKFSPCMRQDPQVHSFIRSAREREKHSACCVRNDRSGCVQTSEEECSSTLAVWVKWPIHPSAPELAGHKRQFGSVCHQDPRVCDEPSSEDPHEWPEDITKWPICTKNSAGNHTNHPHMDCVITGRPCCIGTKGRCEITSREYCDFMRGYFHEEATLCSQVHCMDDVCGLLPFLNPEVPDQFYRLWLSLFLHAGILHCLVSICFQMTVLRDLEKLAGWHRIAIIYLLSGVTGNLASAIFLPYRAEVGPAGSQFGILACLFVELFQSWQILARPWRAFFKLLAVVLFLFTFGLLPWIDNFAHISGFISGLFLSFAFLPYISFGKFDLYRKRCQIIIFQVVFLGLLAGLVVLFYVYPVRCEWCEFLTCIPFTDKFCEKYELDAQLH

SEQ ID NO: 752345 - protein, 1118 aa, Homo sapiens
MYARLRIGGDGGRAGTRRGRPPGQRRQPLLPGALRTPQRPPAAAACLALPGTMSEARRDSTSSLQRKKPPWLKLDIPSAVPLTAEEPSFLQPLRRQAFLRSVSMPAETAHISSPHHELRRPVLQRQTSITQTIRRPWSLEWLQAWGRACCPGGGPLKSPAWEGRSGRPLLSPCHARGTADWFGVSKDSDSTQKWQRKSIRHCSQRYGKLKPQVLRELDLPSQDNVSLTSTETPPPLYVGPCQLGMQKIIDPLARGRAFRVADDTAEGLSAPHTPVTPGAASLCSFSSSRSGFHRLPRRRKRESVAKMSFRAAAALMKGRSVRDGTFRRAQRRSFTPASFLEEDTTDFPDELDTSFFAREGILHEELSTYPDEVFESPSEAALKDWEKAPEQADLTGGALDRSELERSHLMLPLERGWRKQKEGAAAPQPKVRLRQEVVSTAGPRRGQRIAVPVRKLFAREKRPYGLGMVGRLTNRTYRKRIDSFVKRQIEDMDDHRPFFTYWLTFVHSLVTILAVCIYGIAPVGFSQHETVDSVLRNRGVYENVKYVQQENFWIGPSSEALIHLGAKFSPCMRQDPQVHSFIRSAREREKHSACCVRNDRSGCVQTSEEECSSTLAVWVKWPIHPSAPELAGHKRQFGSVCHQDPRVCDEPSSEDPHEWPEDITKWPVSCSGGVVREPSVSCGGECHTPPTGDTRDSHHGTTSRFQRLCTCPLYSLSINQRLPLRASRSRELDGDLKGQVTLFQFDRDSVWWPAGSQGSHTVFCFMSPPIFASTPKRGVGPKVGGGPGLSSSSFVTQICTKNSAGNHTNHPHMDCVITGRPCCIGTKGRCEITSREYCDFMRGYFHEEATLCSQVHCMDDVCGLLPFLNPEVPDQFYRLWLSLFLHAGQVTLWAGSGVSGPSGWLAGGGRKVTSLLNVSRPPPATDYRILHCLVSICFQMTVLRDLEKLAGWHRIAIIYLLSGVTGNLASAIFLPYRAEVGPAGSQFGILACLFVELFQSWQILARPWRAFFKLLAVVLFLFTFGLLPWIDNFAHISGFISGLFLSFAFLPYISFGKFDLYRKRCQIIIFQVVFLGLLAGLVVLFYVYPVRCEWCEFLTCIPFTDKFCEKYELDAQLH

SEQ ID NO: 752346 - protein, 185 aa, Homo sapiens
ALYARLRIGGDGGRAGTRRGRPPGQRRQPLLPGALRTPQRPPAAAACLALPGTMSEARRDSTSSLQRKKPPWLKLDIPSAVPLTAEEPSFLQVGPGLQGLWVPPVQYPHHDPVAQPLRRQAFLRSVSMPAETAHISSPHHELRRPVLQRQTSITQTIRRYQHRPAAPWGGSWGLVGQRQVHRGWK

SEQ ID NO: 752347 - protein, 176 aa, Homo sapiens
VTSVAFRGGTKMDSSRARQQLRRRFLLLPDAEAQLDREGDAGPETSTAVEKKEKPLPRLNIHSGFWILASIVVTYYVDFFKTLKENFHTSSWFLCGSALLLVSLSIAFYCIVYLEWYCGIGEYDVKYPALIPITTASFIAAGICFNIALWHVWSFFTPLLLFTQFMGVVMFITLLG

SEQ ID NO: 752348 - protein, 74 aa, Homo sapiens
VTSVAFRGGTKMDSSRARQQLRRRFLLLPDAEAQLDREGDAGPGEARTKPPRGSQRRGVGKRPASGSPGPVWKD

SEQ ID NO: 752349 - protein, 176 aa, Homo sapiens; identical to SEQ ID NO: 752347

SEQ ID NO: 752350 - protein, 162 aa, Homo sapiens
VTSVAFRGGTKMDSSRARQQLRRRFLLLPETSTAVEKKEKPLPRLNIHSGFWILASIVVTYYVDFFKTLKENFHTSSWFLCGSALLLVSLSIAFYCIVYLEWYCGIGEYDVKYPALIPITTASFIAAGICFNIALWHVWSFFTPLLLFTQFMGVVMFITLLG

SEQ ID NO: 752351 - protein, 176 aa, Homo sapiens; identical to SEQ ID NO: 752347

SEQ ID NO: 752352 - protein, 176 aa, Homo sapiens; identical to SEQ ID NO: 752347

SEQ ID NO: 752353 - protein, 842 aa, Homo sapiens
MRQSFPSTQHWSQACLCSDTWRCSVFHSTTLQGCFLLCSPLHPESLYLFALNGEISDTQKATVVHMDCASPGLLGRPPPFWECRELTYRMGLLLQYVDDLFIVSQTWQDSDFNIIKTLNFLAERGYKVSPIQGPDFFTEVPISGVHSDPRSPNTSCGLEKAITSLLVPQTKRQPQGFLGMVGFCSIWIPNYGLTAKPLCETQKGEEREPLYWEKKCQQSFEPLKTELGQALVLGLPEKNHFTLYVCERLGIALGVLTQRLGPVQKPVAHFSKQTNPVAQKRPGCWRAVAATALLFSEASKLTQGQYTEAMTPHQVQTGLEVKGHHWLTAGRLTNYQALLLDTLDITLRVCQTLNTATSLPTTDDEDSQHQCTGPTKQTPAGLACEISLLRMQRRNDILMAVALWRETQKAGHAVVSLKETTETKALPPQNGTKSSTRGLNRASQLGEREGVNLYTNSKYRFLLLCAHAAIWKEKGMLTVKNSPGKRKDPIQLLLEAAQLPCQVAVIHCKGHQRDWSLISQGNRATKQATWLQESSNVLALMTDPPTFLITYNTHNKSKRKLRGRGTRKTVLDGSQMVTSFIPGTDQLKVTKHLHDATHYWRDVLWNSVHKIFTRKKLRKSVKQVTFVSELCSRNNPHTHPIPPSGLKLVQHRGTYLGEDWQVVLTQMTPNLGYKYLLVFVDTFTGRVKGFPTCTEKAVEVCKPSLKEVISQFGLPKSPQSGNRLSFMGKITQSLSTTLGIDYELAPQSSGKVKMNHTLETTLAKLFQEMHESWVKMLPVFSGSAGPLRAAYRLSSSQMIYQRPFLTTDLLLGEELHKKLQYRFRTDSKGDFRIWKQNPASPH

SEQ ID NO: 752354 - protein, 124 aa, Homo sapiens [sequence omitted]

SEQ ID NO: 752355 - protein, 819 aa, Homo sapiens
MVGFCSIWIPNYGLTAKPLCETQKGEEREPLYWEKKCQQSFEPLKTELGQALVLGLPEKNHFTLYVCERLGIALGVLTQRLGPVQKPVAHFSKQTNPVAQKRPGCWRAVAATALLFSEASKLTQGQYTEAMTPHQVQTGLEVKGHHWLTAGRLTNYQALLLDTLDITLRVCQTLNTATSLPTTDDEDSQHQCTGPTKQTPAGLACEISLLRMQRRNDILMAVALWRETQKAGHAVVSLKETTETKALPPQNGTKSSTRGLNRASQLGEREGVNLYTNSKYRFLLLCAHAAIWKEKGMLTVKNSPGKRKDPIQLLLEAAQLPCQVAVIHCKGHQRDWSLISQGNMGHKTGNLVIGIQQCVGLNDRPYQTFLITYNTHNKSKRKLRGRGTRKTVLDGSQMVTSFIPGTDQLKVTKHLHDATHQWRDVLWNSVHKIFTRKKLRKSVKQVTFVSELCSRNNPHTHPIPPSGLKLVQHRGTYLGEDWQVVLTQMTPNLGYKYLLVFVDTFTGRVKGFPTCTEKAVEVCKPSLKEVISQFGLPKSPQSGNRLSFMGKITQSLSTTLGIDYELAPQSSGKVKMNHTLETTLAKLFQEMHESWVKMLPVFSGSAGPLRAAYRLSSSQMIYQRPFLTTDLLLGEELQKNYSIDLGQIQKVTSEYGNKILPVPTKDGKTPLQVNPGDQVLLKAWRAGSPEDHPLLKWEGPYWVILTTPTAANSQGITSWVHLSRSEMLSPKCFQTRPDGPFTPENLWKTSNSGEPIHHRRSNVVRDLESNTFPCITNWFTIILLLLLSLLPQVKTSFVPAGYKDATLYFVPTPPHQGTG

SEQ ID NO: 752356 - protein, 842 aa, Homo sapiens; identical to SEQ ID NO: 752353

SEQ ID NO: 752357 - protein, 1236 aa, Homo sapiens
MGGALGPALLLTSLFGAWAGLGPGQGEQGMTVAVVFSSSGPPQAQFRARLTPQSFLDLPLEIQPLTVGVNTTNPSSLLTQICGLLGAAHVHGIVFEDNVDTEAVAQILDFISSQTHVPILSISGGSAVVLTPKEPGSAFLQLGVSLEQQLQVLFKVLEEYDWSAFAVITSLHPGHALFLEGVRAVADASHVSWRLLDVVTLELGPGGPRARTQRLLRQLDAPVFVAYCSREEAEVLFAEAAQAGLVGPGHVWLVPNLALGSTDAPPATFPVGLISVVTESWRLSLRQKVRDGVAILALGAHSYWRQHGTLPAPAGDCRVHPGPVSPAREAFYRHLLNVTWEGRDFSFSPGGYLVQPTMVVIALNRHRLWEMVGRWEHGVLYMKYPVWPRYSASLQPVVDSRHLTVATLEERPFVIVESPDPGTGGCVPNTVPCRRQSNHTFSSGDVAPYTKLCCKGFCIDILKKLARVVKFSYDLYLVTNGKHGKRVRGVWNGMIGEVYYKRADMAIGSLTINEERSEIVDFSVPFVETGISVMVARSNGTVSPSAFLEPYSPAVWVMMFVMCLTVVAITVFMFEYFSPVSYNQNLTRGKKSGGPAFTIGKSVWLLWALVFNNSVPIENPRGTTSKIMVLVWAFFAVIFLASYTANLAAFMIQEQYIDTVSGLSDKKFQRPQDQYPPFRFGTVPNGSTERNIRSNYRDMHTHMVKFNQRSVEDALTSLKMGKLDAFIYDAAVLNYMAGKDEGCKLVTIGSGKVFATTGYGIAMQKDSHWKRAIDLALLQFLGDGETQKLETVWLSGICQNEKNEVMSSKLDIDNMAGVFYMLLVAMGLALLVFAWEHLVYWKLRHSVPNSSQLDFLLAFSRGIYSCFSGVQSLASPPRQASPDLTASSAQASVLKMLQAARDMVTTAGVSSSLDRATRTIENWGGGRRAPPPSPCPTPRSGPSPCLPTPDPPPEPSPTGWGPPDGGRAALVRRAPQPPGRPPTPGPPLSDVSRVSRRPAWEARWPVRTGHCGRHLSASERPLSPARCHYSSFPRADRSGRPFLPLFPEPPELEDLPLLGPEQLARREALLHAAWARGSRPRHASLPSSVAEAFARPSSLPAGCTGPACARPDGHSACRRLAQAQSMCLPIYREACQEGEQAGAPAWQHRQHVCLHAHAHLPFCWGAVCPHLPPCASHGSWLSGAWGPLGHRGRTLGLGTGYRDSGGLDEISRVARGTQGFPGPCTWRRISSLESEV

SEQ ID NO: 752358 - protein, 161 aa, Homo sapiens
MGGALGPALLLTSLFGAWAGLGPGQGEQGMTVAVVFSSSGPPQAQFRARLTPQSFLDLPLEIQPLTVGVNTTNPSSLLTQICGLLGAAHVHGIVFEDNVDTEAVAQILDFISSQTHVPILSISGGSAVVLTPKERPNSCPLVPQAWNQAGVGGALVLGSWD

SEQ ID NO: 752359 - protein, 1236 aa, Homo sapiens; identical to SEQ ID NO: 752357

SEQ ID NO: 752360 - protein, 748 aa, Homo sapiens
MTLEDGGWGVYYKRADMAIGSLTINEERSEIVDFSVPFVETGISVMVARSNGTVSPSAFLEPYSPAVWVMMFVMCLTVVAITVFMFEYFSPVSYNQNLTRGKKSGGPAFTIGKSVWLLWALVFNNSVPIENPRGTTSKIMVLVWAFFAVIFLASYTANLAAFMIQEQYIDTVSGLSDKKFQRPQDQYPPFRFGTVPNGSTERNIRSNYRDMHTHMVKFNQRSVEDALTSLKMGKLDAFIYDAAVLNYMAGKDEGCKLVTIGSGKVFATTGYGIAMQKDSHWKRAIDLALLQFLGDGETQKLETVWLSGICQNEKNEVMSSKLDIDNMAGVFYMLLVAMGLALLVFAWEHLVYWKLRHSVPNSSQLDFLLAFSRGIYSCFSGVQSLASPPRQASPDLTASSAQASVLKMLQAARDMVTTAGVSSSLDRATRTIENWGGGRRAPPPSPCPTPRSGPSPCLPTPDPPPEPSPTGWGPPDGGRAALVRRAPQPPGRPPTPGPPLSDVSRVSRRPAWEARWPVRTGHCGRHLSASERPLSPARCHYSSFPRADRSGRPFLPLFPEPPELEDLPLLGPEQLARREALLHAAWARGSRPRHASLPSSVAEAFARPSSLPAGCTGPACARPDGHSACRRLAQAQSMCLPIYREACQEGEQAGAPAWQHRQHVCLHAHAHLPFCWGAVCPHLPPCASHGSWLSGAWGPLGHRGRTLGLGTGYRDSGGLDEISRVARGTQGFPGPCTWRRISSLESEV

SEQ ID NO: 752361 - protein, 447 aa, Homo sapiens
MPWDQAGTIVAGPSAEGAAYGLSSPYCPGHLQLLQRGAEPRQPTAAGQPGPHGQLGPGQRAQDAAGSPRHGDHGGRKQLPGPRHSHHRELGWRPPCAPTVPLPDPAVWPQPMPAHPRPAPRAEPHGLGTARRGSRGACAQGSAAPGPPPDAGAAPVRRLPSVAPPSLGGAVAGADRALREAPLGLRAAPVARALSLQLLSSSRPIRPPLPPALPGAPGAGGPAAARSGAAGPAGGPAARGLGPGLAPASRFPAQLRGRGLRSAQLAARWVHRPRLRPPRRPLGLQALGAGAVDVLADLPGGLPGGRAGRGPRLAAQTARLPARPRPPAILLGGCLSSPSTLCQPRLLALRGLGASGAQGQDSGAGHRLQRQWGTGRDQQGSPWDARLPGTLHLETDLQSGVRSVSYQPLRLRASWILCLPLSGLSGRQDWAFLASTMKSWPWDPSDR

SEQ ID NO: 752362 - protein, 122 aa, Homo sapiens
HLENTGVAWTAFKTFCSDYASPHWGWALGWVWGFGAWKAGGRVVLAAALRLQFQRPQDQYPPFRFGTVPNGSTERNIRSNYRDMHTHMVKFNQRSVEDALTSLKMGWVPSPAPAVFIRVSPQ

SEQ ID NO: 752363 - protein, 114 aa, Homo sapiens
LQDSCGVEGRGLGAEWSLRQKWKATMCLRTQLWCQSKFSLSLRWWLGPSLSLRSTERVGRKGGVSSGNRQSPGHSAEEGGRGPHPIQDPREPDKSLPIGPSRGCPAGSCGLDPC

SEQ ID NO: 752364 - protein, 1129 aa, Homo sapiens
RGSGTDTAREAAWRGLSSRAQRPFPSEPGSAFLQLGVSLEQQLQVLFKVLEEYDWSAFAVITSLHPGHALFLEGVRAVADASHVSWRLLDVVTLELGPGGPRARTQRLLRQLDAPVFVAYCSREEAEVLFAEAAQAGLVGPGHVWLVPNLALGSTDAPPATFPVGLISVVTESWRLSLRQKVRDGVAILALGAHSYWRQHGTLPAPAGDCRVHPGPVSPAREAFYRHLLNVTWEGRDFSFSPGGYLVQPTMVVIALNRHRLWEMVGRWEHGVLYMKYPVWPRYSASLQPVVDSRHLTVATLEERPFVIVESPDPGTGGCVPNTVPCRRQSNHTFSSGDVAPYTKLCCKGFCIDILKKLARVVKFSYDLYLVTNGKHGKRVRGVWNGMIGEVYYKRADMAIGSLTINEERSEIVDFSVPFVETGISVMVARSNGTVSPSAFLEPYSPAVWVMMFVMCLTVVAITVFMFEYFSPVSYNQNLTRGKKSGGPAFTIGKSVWLLWALVFNNSVPIENPRGTTSKIMVLVWAFFAVIFLASYTANLAAFMIQEQYIDTVSGLSDKKFQRPQDQYPPFRFGTVPNGSTERNIRSNYRDMHTHMVKFNQRSVEDALTSLKMGKLDAFIYDAAVLNYMAGKDEGCKLVTIGSGKVFATTGYGIAMQKDSHWKRAIDLALLQFLGDGETQKLETVWLSGICQNEKNEVMSSKLDIDNMAGVFYMLLVAMGLALLVFAWEHLVYWKLRHSVPNSSQLDFLLAFSRGIYSCFSGVQSLASPPRQASPDLTASSAQASVLKMLQAARDMVTTAGVSSSLDRATRTIENWGGGRRAPPPSPCPTPRSGPSPCLPTPDPPPEPSPTGWGPPDGGRAALVRRAPQPPGRPPTPGPPLSDVSRVSRRPAWEARWPVRTGHCGRHLSASERPLSPARCHYSSFPRADRSGRPFLPLFPEPPELEDLPLLGPEQLARREALLHAAWARGSRPRHASLPSSVAEAFARPSSLPAGCTGPACARPDGHSACRRLAQAQSMCLPIYREACQEGEQAGAPAWQHRQHVCLHAHAHLPFCWGAVCPHLPPCASHGSWLSGAWGPLGHRGRTLGLGTGYRDSGGLDEISRVARGTQGFPGPCTWRRISSLESEV

SEQ ID NO: 752365 - protein, 855 aa, Homo sapiens
MKYPVWPRYSASLQPVVDSRHLTVATLEERPFVIVESPDPGTGGCVPNTVPCRRQSNHTFSSGDVAPYTKLCCKGFCIDILKKLARVVKFSYDLYLVTNGKHGKRVRGVWNGMIGEVYYKRADMAIGSLTINEERSEIVDFSVPFVETGISVMVARSNGTVSPSAFLEPYSPAVWVMMFVMCLTVVAITVFMFEYFSPVSYNQNLTRGKKSGGPAFTIGKSVWLLWALVFNNSVPIENPRGTTSKIMVLVWAFFAVIFLASYTANLAAFMIQEQYIDTVSGLSDKKFQRPQDQYPPFRFGTVPNGSTERNIRSNYRDMHTHMVKFNQRSVEDALTSLKMGKLDAFIYDAAVLNYMAGKDEGCKLVTIGSGKVFATTGYGIAMQKDSHWKRAIDLALLQFLGDGETQKLETVWLSGICQNEKNEVMSSKLDIDNMAGVFYMLLVAMGLALLVFAWEHLVYWKLRHSVPNSSQLDFLLAFSRGIYSCFSGVQSLASPPRQASPDLTASSAQASVLKMLQAARDMVTTAGVSSSLDRATRTIENWGGGRRAPPPSPCPTPRSGPSPCLPTPDPPPEPSPTGWGPPDGGRAALVRRAPQPPGRPPTPGPPLSDVSRVSRRPAWEARWPVRTGHCGRHLSASERPLSPARCHYSSFPRADRSGRPFLPLFPEPPELEDLPLLGPEQLARREALLHAAWARGSRPRHASLPSSVAEAFARPSSLPAGCTGPACARPDGHSACRRLAQAQSMCLPIYREACQEGEQAGAPAWQHRQHVCLHAHAHLPFCWGAVCPHLPPCASHGSWLSGAWGPLGHRGRTLGLGTGYRDSGGLDEISRVARGTQGFPGPCTWRRISSLESEV

SEQ ID NO: 752366 - protein, 1042 aa, Homo sapiens
CIERVCIGANDKKEEFDVSGNGRIEGHIGVQLQEHSYLEKGMLASEELSQSGGSTKDDELASTTTPKRGRPKGNISRTCSHCGLLASSITNLTVHIRRKHSHQYSYLCKVCKYYTVTKGDMERHCATKKHKGRVEIEASGKHSSDIIVGPEGGSLEAGKKNAGSAVTMSDEHANKPAESPTSVLEKPDRGNSIEAEVENVFHSLDGEVNSHLLDEKEQISSEPEDFAQPGDVYSQRDVTGTGENKCLHCEFSAHSSASLELHVKRKHTKEFEFYCMACDYYAVTRREMTRHAATEKHKMKRQSYLNSANVEAGSADMSKNIIMPEEEHQQNSEEFQIISGQPSDTLKSRNAADCSILNENTNLDMSKVLCAADSVEVETEEESNFNEDHSFCETFQQAPVKDKVRKPEEMMSLTMSSNYGSPSRFQNENSGSSALNCETAKKNHEISNDAGELRVHCEGEGGNAGDGGGVVPHRHLCPVTLDGERSAESPVLVVTRITREQGNLESGGQNRVARGHGLEDLKGVQEDPVLGNKEILMNSQHETEFILEEDGPASDSTVESSDVYETIISIDDKGQAMYSFGRFDSSIIRIKNPEDGELIDQSEEGLIATGVRISELPLKDCAQGVKKKKSEGSSIGESTRIRCDDCGFLADGLSGLNVHIAMKHPTKEKHFHCLLCGKSFYTESNLHQHLASAGHMRNEQASVEELPEGGATFKCVKCTEPFDSEQNLFLHIKGQHEELLREVNKYIVEDTEQINREREENQGNVCKYCGKMCRSSNSMAFLAHIRTHTGSKPFKCKICHFATAQLGDARNHVKRHLGMREYKCHVCGVAFVMKKHLNTHLLGKHGVGTPKERKFTCHLCDRSFTEKWALNNHMKLHTGEKPFKCTWPTCHYSFLTASAMKDHYRTHTGEKSFLCDLCGFAGGTRHALTKHRRQHTGEKPFKCDECNFASTTQSHLTRHKRVHTGEKPYRCPWCDYRSNCAENIRKHILHTGKHEGVKMYNCPKCDYGTNVPVEFRNHLKEQHPDIENPDLAYLHAGKGQKL

SEQ ID NO: 752367 - protein, 982 aa, Homo sapiens
CIERVCIGANDKKEEFDVSGNGRIEGHIGVQLQEHSYLEKGMLASEELSQSGGSTKDDELASTTTPKRGRPKGNISRTCSHCGLLASSITNLTVHIRRKHSHQYSYLCKVCKYYTVTKGDMERHCATKKHKGRVEIEASGKHSSDIIVGPEGGSLEAGKKNAGSAVTMSDEHANKPAESPTSVLEKPDRGNSIEAEVENVFHSLDGEVNSHLLDEKEQISSEPEDFAQPGDVYSQRDVTGTGENKCLHCEFSAHSSASLELHVKRKHTKEFEFYCMACDYYAVTRREMTRHAATEKHKMKRQSYLNSANVEAGSADMSKNIIMPEEEHQQNSEEFQIISGQPSDTLKSRNAADCSILNENTNLDMSKVLCAADSVEVETEEESNFNEDHSFCETFQQAPVKDKVRKPEEMMSLTMSSNYGSPSRFQNENSGSSALNCETAKKNHEISNDAGELRVHCEGEGGNAGDGGGVVPHRHLCPVTLDGERSAESPVLVVTRITREQGNLESGGQNRVARGHGLEDLKGVQEDPVLGNKEILMNSQHETEFILEEDGPASDSTVESSDVYETIISIDDKGQAMYSFGRFDSSIIRIKNPEDGELIDQSEEGLIATGVRISELPLKDCAQGVKKKKSEGSSIGESTRIRCDDCGFLADGLSGLNVHIAMKHPTKEKHFHCLLCGKSFYTESNLHQHLASAGHMRNEQASVEELPEGGATFKCVKCTEPFDSEQNLFLHIKGQHEELLREVNKYIVEDTEQINREREENQGNVCKYCGKMCRSSNSMAFLAHIRTHTGSKPFKCKICHFATAQLGDARNHVKRHLGMREYKCHVCGVAFVMKKHLNTHLLGKHGVGTPKERKFTCHLCDRSFTEKWALNNHMKLHTGEKPFKCTWPTCHYSFLTASAMKDHYRTHTGEKSFLCDLCGFAGGTRHALTKHRRQHTGEKPFKCDECNFASTTQSHLTRHKRVHTGEKPYRCPWCDYSAYDWV

SEQ ID NO: 752368 - protein, 1475 aa, Homo sapiens
CIERVCIGANDKKEEFDVSGNGRIEGHIGVQLQEHSYLEKGMLASEELSQSGGSTKDDELASTTTPKRGRPKGNISRTCSHCGLLASSITNLTVHIRRKHSHQYSYLCKVCKYYTVTKGDMERHCATKKHKGRVEIEASGKHSSDIIVGPEGGSLEAGKKNAGSAVTMSDEHANKPAESPTSVLEKPDRGNSIEAEVENVFHSLDGEVNSHLLDEKEQISSEPEDFAQPGDVYSQRDVTGTGENKCLHCEFSAHSSASLELHVKRKHTKEFEFYCMACDYYAVTRREMTRHAATEKHKMKRQSYLNSANVEAGSADMSKNIIMPEEEHQQNSEEFQIISGQPSDTLKSRNAADCSILNENTNLDMSKVLCAADSVEVETEEESNFNEDHSFCETFQQAPVKDKVRKPEEMMSLTMSSNYGSPSRFQNENSGSSALNCETAKKNHEISNDAGELRVHCEGEGGNAGDGGGVVPHRHLCPVTLDGERSAESPVLVVTRITREQGNLESGGQNRVARGHGLEDLKGVQEDPVLGNKEILMNSQHETEFILEEDGPASDSTVESSDVYETIISIDDKGQAMYSFGRFDSSIIRIKNPEDGELIDQSEEGLIATGVRISELPLKDCAQGVKKKKSEGSSIGESTRIRCDDCGFLADGLSGLNVHIAMKHPTKEKHFHCLLCGKSFYTESNLHQHLASAGHMRNEQASVEELPEGGATFKCVKCTEPFDSEQNLFLHIKGQHEELLREVNKYIVEDTEQINREREENQGNVCKYCGKMCRSSNSMAFLAHIRTHTGSKPFKCKICHFATAQLGDARNHVKRHLGMREYKCHVCGVAFVMKKHLNTHLLGKHGVGTPKERKFTCHLCDRSFTEKWALNNHMKLHTGEKPFKCTWPTCHYSFLTASAMKDHYRTHTGEKSFLCDLCGFAGGTRHALTKHRRQHTGEKPFKCDECNFASTTQSHLTRHKRVHTGEKPYRCPWCDYRSNCAENIRKHILHTGKHEGVKMYNCPKCDYGTNVPVEFRNHLKEQHPDIENPDLAYLHAGIVSKSYECRLKGQGATFVETDSPFTAAALAEEPLVKEKPLRSSRRPAPPPEQVQQVIIFQGYDGEFALDPSVEETAAATLQTLAMAGQVARVVHITEDGQVIATSQSGAHVGSVVPGPILPEQLADGATQVVVVGGSMEGHGMDESLSPGGAVIQQVTKQEILNLSEAGVAPPEASSALDALLCAVTELGEVEGRAGLEEQGRPGAKDVLIQLPGQEVSHVAADPEAPEIQMFPQAQESPAAVEVLTQVVHPSAAMASQERAQVAFKKMVQGVLQFAVCDTAAAGQLVKDGVTQVVVSEEGAVHMVAGEGAQIIMQEAQGEHMDLVESDGEISQIIVTEELVQAMVQESSGGFSEGTTHYILTELPPGVQDEPGLYSHTVLETADSQELLQAGATLGTEAGAPSRAEQLASVVIYTQEGSSAAAAIQSQRESSELQEA

SEQ ID NO: 752369 - protein, 887 aa, Homo sapiens
CIERVCIGANDKKEEFDVSGNGRIEGHIGVQLQEHSYLEKGMLASEELSQSGGSTKDDELASTTTPKRGRPKGNISRTCSHCGLLASSITNLTVHIRRKHSHQYSYLCKVCKYYTVTKGDMERHCATKKHKGRVEIEASGKHSSDIIVGPEGGSLEAGKKNAGSAVTMSDEHANKPAESPTSVLEKPDRGNSIEAEVENVFHSLDGEVNSHLLDEKEQISSEPEDFAQPGDVYSQRDVTGTGENKCLHCEFSAHSSASLELHVKRKHTKEFEFYCMACDYYAVTRREMTRHAATEKHKMKRQSYLNSANVEAGSADMSKNIIMPEEEHQQNSEEFQIISGQPSDTLKSRNAADCSILNENTNLDMSKVLCAADSVEVETEEESNFNEDHSFCETFQQAPVKDKVRKPEEMMSLTMSSNYGSPSRFQNENSGSSALNCETAKKNHEISNDAGELRVHCEGEGGNAGDGGGVVPHRHLCPVTLDGERSAESPVLVVTRITREQGNLESGGQNRVARGHGLEDLKGVQEDPVLGNKEILMNSQHETEFILEEDGPASDSTVESSDVYETIISIDDKGQAMYSFGRFDSSIIRIKNPEDGELIDQSEEGLIATGVRISELPLKDCAQGVKKKKSEGSSIGESTRIRCDDCGFLADGLSGLNVHIAMKHPTKEKHFHCLLCGKSFYTESNLHQHLASAGHMRNEQASVEELPEGGATFKCVKCTEPFDSEQNLFLHIKGQHEELLREVNKYIVEDTEQINREREENQGNVCKYCGKMCRSSNSMAFLAHIRTHTGSKPFKCKICHFATAQLGDARNHVKRHLGMREYKCHVCGVAFVMKKHLNTHLLGKHGVGTPKERVKVAYRKIGTLPGIQNNRNASSASEAQSLCEHFS

SEQ ID NO: 752370 - protein, 1386 aa, Homo sapiens
CIERVCIGANDKKEEFDVSGNGRIEGHIGVQLQEHSYLEKGMLASEELSQSGGSTKDDELASTTTPKRGRPKGNISRTCSHCGLLASSITNLTVHIRRKHSHQYSYLCKVCKYYTVTKGDMERHCATKKHKGRVEIEASGKHSSDIIVGPEGGSLEAGKKNAGSAVTMSDEHANKPAESPTSVLEKPDRGNSIEAEVENVFHSLDGEVNSHLLDEKEQISSEPEDFAQPGDVYSQRDVTGTGENKCLHCEFSAHSSASLELHVKRKHTKEFEFYCMACDYYAVTRREMTRHAATEKHKMKRQSYLNSANVEAGSADMSKNIIMPEEEHQQNSEEFQIISGQPSDTLKSRNAADCSILNENTNLDMSKVLCAADSVEVETEEESNFNEDHSFCETFQQAPVKDKVRKPEEMMSLTMSSNYGSPSRFQNENSGSSALNCETAKKNHEISNDAGELRVHCEGEGGNAGDGGGVVPHRHLCPVTLDGERSAESPVLVVTRITREQGNLESGGQNRVARGHGLEDLKGVQEDPVLGNKEILMNSQHETEFILEEDGPASDSTVESSDVYETIISIDDKGQAMYSFGRFDSSIIRIKNPEDGELIDQSEEGLIATGVRISELPLKDCAQGVKKKKSEGSSIGESTRIRCDDCGFLADGLSGLNVHIAMKHPTKEKHFHCLLCGKSFYTESNLHQHLASAGHMRNEQASVEELPEGGATFKCVKCTEPFDSEQNLFLHIKGQHEELLREVNKYIVEDTEQINREREENQGNVCKYCGKMCRSSNSMAFLAHIRTHTGSKPFKCKICHFATAQLGDARNHVKRHLGMREYKCHVCGVAFVMKKHLNTHLLGKHGVGTPKERKFTCHLCDRSFTEKWALNNHMKLHTGEKPFKCTWPTCHYSFLTASAMKDHYRTHTGEKSFLCDLCGFAGGTRHALTKHRRQHTGEKPFKCDECNFASTTQSHLTRHKRVHTGEKPYRCPWCDYRSNCAENIRKHILHTGKHEGVKMYNCPKCDYGTNVPVEFRNHLKEQHPDIENPDLAYLHAGIVSKSYECRLKGQGATFVETDSPFTAAALAEEPLVKEKPLRSSRRPAPPPEQVQQVIIFQGYDGEFALDPSVEETAAATLQTLAMAGQVARVVHITEDGQVIATSQSGAHVGSVVPGPILPEQLADGATQVVVVGGSMEGHGMDESLSPGGAVIQQVTKQEILNLSEAGVAPPEASSALDALLCAVTELGEVEGRAGLEEQGRPGAKDVLIQLPGQEVSHVAADPEAPEIQMFPQAQESPAAVEVLTQVVHPSAAMASQERAQVAFKKMVQGVLQFAVCDTAAAGQLVKDGVTQVVVSEEGAVHMVAGEGAQIIMQEAQGEHMDLVESDGEIIADHRGFTAAVGCEFLS

SEQ ID NO: 752371 - protein, 361 aa, Homo sapiens
NIHKYTPAYKDHKHLASAFRSYKMINSTSTQPPDESCSQNLLITQQIIPVLYCMVFIAGILLNGVSGWIFFYVPSSKSFIIYLKNIVIADFVMSLTFPFKILGDSGLGPWQLNVFVCRVSAVLFYVNMYVSIVFFGLISFDRYYKIVKPLWTSFIQSVSYSKLLSVIVWMLMLLLAVPNIILTNQSVREVTQIKCIELKSELGRKWHKASNYIFVAIFWIVFLLLIVFYTAITKKIFKSHLKSSRNSTSVKKKSSRNIFSIVFVFFVCFVPYHIARIPYTKSQTEAHYSCQSKEILRYMKEFTLLLSAANVCLDPIIYFFLCQPFREILCKKLHIPLKAQNDLDISRIKRGNTTLESTDTL

SEQ ID NO: 752372 - protein, 338 aa, Homo sapiens
MINSTSTQPPDESCSQNLLITQQIIPVLYCMVFIAGILLNGVSGWIFFYVPSSKSFIIYLKNIVIADFVMSLTFPFKILGDSGLGPWQLNVFVCRVSAVLFYVNMYVSIVFFGLISFDRYYKIVKPLWTSFIQSVSYSKLLSVIVWMLMLLLAVPNIILTNQSVREVTQIKCIELKSELGRKWHKASNYIFVAIFWIVFLLLIVFYTAITKKIFKSHLKSSRNSTSVKKKSSRNIFSIVFVFFVCFVPYHIARIPYTKSQTEAHYSCQSKEILRYMKEFTLLLSAANVCLDPIIYFFLCQPFREILCKKLHIPLKAQNDLDISRIKRGNTTLESTDTL

SEQ ID NO: 752373 - protein, 232 aa, Homo sapiens
MANYYEVLGVQASASPEDIKKAYRKLALRWHPDKNPDNKEEAEKKFKLVSEAYEVLSDSKKRSLYDRAGCDSWRAGGGASTPYHSPFDTGYTFRNPEDIFREFFGGLDPFSFEFWDSPFNSDRGGRGHGLRGAFSAGFGEFPAFMEAFSSFNMLGCSGGSHTTFSSTSFGGSSSGSSGFKSVMSSTEMINGHKVTTKRIVENGQERVEVEEDGQLKSVTVNGKEQLKWMDSK

SEQ ID NO: 752374 - protein, 77 aa, Homo sapiens
  misc_feature (1)..(1): Xaa can be any naturally occurring amino acid
XLRQRLYVIFHRYRDVFPQGLPDEYAFVTTFRFRKTSRKEDWYIWQVIDQYSIPQLSVPMKVGQLSTSTQSGEEREI

SEQ ID NO: 752375 - protein, 345 aa, Homo sapiens
MAGLRGNAVAGLLWMLLLWSGGGGCQAQRAGCKSVHYDLVFLLDTSSSVGKEDFEKVRQWVANLVDTFEVGPDRTRVGVVRYSDRPTTAFELGLFGSQEEVKAAARRLAYHGGNTNTGDALRYITARSFSPHAGGRPRDRAYKQVAILLTDGRSQDLVLDAAAAAHRAGIRIFAVGVGEALKEELEEIASEPKSAHVFHVSDFNAIDKIRGKLRRRLCENVLCPSVRVEGDRFKHTNGGTKEITGFDLMDLFSVKEILGKRENGAQSSYVRMGSFPVVQSTEDVFPQGLPDEYAFVTTFRFRKTSRKEDWYIWQVIDQYSIPQLSVPMKVGQLSTSTQSGEEREI

SEQ ID NO: 752376 - protein, 369 aa, Homo sapiens
MAGLRGNAVAGLLWMLLLWSGGGGCQAQRAGCKSVHYDLVFLLDTSSSVGKEDFEKVRQWVANLVDTFEVGPDRTRVGVVRYSDRPTTAFELGLFGSQEEVKAAARRLAYHGGNTNTGDALRYITARSFSPHAGGRPRDRAYKQVAILLTDGRSQDLVLDAAAAAHRAGIRIFAVGVGEALKEELEEIASEPKSAHVFHVSDFNAIDKIRGKLRRRLCENVLCPSVRVEGDRFKHTNGGTKEITGFDLMDLFSVKEILGKRENGAQSSYVRMGSFPVVQSTEDVFPQGLPDEYAFVTTFRFRKTSRKEDWYIWQVIDQYSIPQVSIRLDGENKAVEYNAVGAMKDAVRVVFRGSRVNDLFDRDWHKMAL

SEQ ID NO: 752377 - protein, 184 aa, Homo sapiens
MQAFLKGTSISTKPPLTKDRGVAASAGSSGENKKAKPVPWVEKYRPKCVDEVAFQEEVVAVLKKSLEGADLPNLLFYGPPGTGKTSTILAAARELFGPELFRLRVLELNASDERGIQVVREKVKNFAQLTVSGSRSDGKPCPPFKMVILDEADSMTSAAQGGLRRTMGKGRKHPIWLICTMSVE

SEQ ID NO: 752378 - protein, 251 aa, Homo sapiens
MQAFLKGTSISTKPPLTKDRGVAASAGSSGENKKAKPVPWVEKYRPKCVDEVAFQEEVVAVLKKSLEGADLPNLLFYGPPGTGKTSTILAAARELFGPELFRLRVLELNASDERGIQVVREKVKNFAQLTVSGSRSDGKPCPPFKMVILDEADSMTSAAQAALRRTMEKESKTTRFCLICNYVSRIIEPLTSRCSKFRFKPLSDKIPQQGLLDIAKKENVKISDEGIAYLVKVSEGDFKKSHYISSKRYSD

SEQ ID NO: 752379 - protein, 251 aa, Homo sapiens; identical to SEQ ID NO: 752378

SEQ ID NO: 752380 - protein, 234 aa, Homo sapiens
MQAFLKGTSISTKPPLTKDRGVAASAGSSGENKKAKPVPWVEKYRPKCVDEVAFQEEVVAVLKKSLEGADLPNLLFYGPPGTGKTSTILAAARELFGPELFRLRVLELNASDERGIQVVREKVKNFAQLTVSGSRSDGKPCPPFKMVILDEADSMTSAAQAALRRTMEKESKTTRFCLICNYVSRIIEPLTSRCSKFRFKPLSDKIPQQGLLDIATPATVHFSERDRPVRVRGS

SEQ ID NO: 752381 - protein, 282 aa, Homo sapiens
MQAFLKGTSISTKPPLTKDRGVAASAGSSGENKKAKPVPWVEKYRPKCVDEVAFQEEVVAVLKKSLEGADLPNLLFYGPPGTGKTSTILAAARELFGPELFRLRVLELNASDERGIQVVREKVKNFAQLTVSGSRSDGKPCPPFKMVILDEADSMTSAAQAALRRTMEKESKTTRFCLICNYVSRIIEPLTSRCSKFRFKPLSDKIPQQGLLDIAKKENVKISDEGIAYLVKVSEGDLRKAITFLQSATPINQGGKGIHGRKGITDIGGYIQVGEIDGVIGA

SEQ ID NO: 752382 - protein, 121 aa, Homo sapiens
LPVNNPPLGTYLPYLTLLRELLREHTDHSLPKPGPLSPDSPAIITPGDQVLVKDLQARGLSPQWKGPYTVILTTPTAAKLIGLPSWYHISHLKKAPTQHQATWTVTSLSPTKLKLSPSNTA

SEQ ID NO: 752383 - protein, 109 aa, Homo sapiens
SPREAPETAGGEGSLAQPGCVWDWGQASHTYDSGSAVPHLSGRCVCLQTPVCISPSASFTLSLSVSVSMSDPLGHTFNRHGDTSPGPQPCDLCPPSHSSERFHQLQKAH

SEQ ID NO: 752384 - protein, 282 aa, Homo sapiens
MAVVKTPSRGLKNAKEPFNNASPHLLKNLVEEPKKRKEVPNHLLESKVYAKLVNNKVIQARPGIIHFGGYQVEKQHQQILHLVNVSNEDTRVHILPPQTKYFEINYVRKEHHLVPGLSLTVTVTFSPDEWRYYYDCIRVHCKGDDTLLVPIHAYPVMNSLDFPSFINLSNVLLGESKTYVIPLQCSCPVDFEFYITLIQSHQAFAIEPTSGIIPANGKMTVTIKFTPFQYGTAQIKMQLWISQFNSQPYECVFTGTCYPNMALPLEEFERLNTLSKKVNVPP

SEQ ID NO: 752385 - protein, 516 aa, Homo sapiens
MGTLAMTLACSVSGFLLQPLLGAWSDRCTSRFGRRRPFILVLAIGALLGLSLLLNGRDIGIALADVTGNHKWGLLLTVCGVVLMDFSADSADNPSHAYMMDVCSPADQDRGLNIHALLAGLGGGFGYVVGGIHWDKTGFGRALGGQLRVIYLFTAVTLSVTTVLTLVSIPERPLRPPSEKRAAMKSPSLPLPPSPPVLPEEGPGDSLPSHTATNFSSPISPPSPLTPKYGSFISRDSSLTGISEFASSFGTANIDSVLIDCFTGGHDSYLAIPGSVPRPPISVSFPRAPDGFYRQDRGLLEGREGALTSGCDGDILRVGSLDTSKPRSSGILKRPQTLAIPDAAGGGGPETSRRRNVTFSQQVANILLNGVKYESELTGSSERAEQPLSVGRLCSTICNMPKALRTLCVNHFLGELPAKPPRWLSFEGMLLFYTDSGLPGPGAPASAVGSANGVMYFSSLVSFLGCLYSSLFVIYEIPPSDAADEEHRPLLLNVLTSRSLDSGHAPAPGGLEQADQ

SEQ ID NO: 752386 - protein, 549 aa, Homo sapiens
LLFNGCILFGIEFSYAMETAYVTPVLLQMGLPDQLYSLVWFISPILGFLLQPLLGAWSDRCTSRFGRRRPFILVLAIGALLGLSLLLNGRDIGIALADVTGNHKWGLLLTVCGVVLMDFSADSADNPSHAYMMDVCSPADQDRGLNIHALLAGLGGGFGYVVGGIHWDKTGFGRALGGQLRVIYLFTAVTLSVTTVLTLVSIPERPLRPPSEKRAAMKSPSLPLPPSPPVLPEEGPGDSLPSHTATNFSSPISPPSPLTPKYGSFISRDSSLTGISEFASSFGTANIDSVLIDCFTGGHDSYLAIPGSVPRPPISVSFPRAPDGFYRQDRGLLEGREGALTSGCDGDILRVGSLDTSKPRSSGILKRPQTLAIPDAAGGGGPETSRRRNVTFSQQVANILLNGVKYESELTGSSERAEQPLSVGRLCSTICNMPKALRTLCVNHFLGELPAKPPRWLSFEGMLLFYTDSGLPGPGAPDLAVGSANGVMYFSSLVSFLGCLYSSLFVIYEIPPSDAADEEHRPLLLNVLTSRSLDSGHAPAPGGLEQADQ

SEQ ID NO: 752387 - protein, 72 aa, Homo sapiens
QLQIDSSYKPNFRNQDLVLDINKVKLLQDVRKLLVSYDHRLDYLCSKHMIMEGGRTVYFGMNTTVSDEDSLP

SEQ ID NO: 752388 - protein, 213 aa, Homo sapiens
MEAIWLYQFRLIVIGDSTVGKSCLIRRFTEGRFAQVSDPTVGVDFFSRLVEIEPGKRIKLQIWDTAGQERFRSITRAYYRNSVGGLLLFDITNRRSFQNVHEWLEETKVHVQPYQIVFVLVGHKCDLDTQRQVTRHEAEKLAAAYGMKYIETSARDAINVEKAFTDLTRDIYELVKRGEITIQEGWEGVKSGFVPNVVHSSEEVVKSERRCLC

SEQ ID NO: 752389 - protein, 726 aa, Homo sapiens
MTGDPFAGPGISDLSFSHQRNMWTYQLKFILPEGETYCLIIKYTIFCFLSQIKCRTQPNNCYLMMAVENTCKHDKCTCMSAFVIYCCMTNCHNLVAYYTPVYNLTAFVGYESRHNLSGSSNSASFTGFSQDVSQDWISFKGSTGKDLLSSSQKHGRIQSLELFELKVSVPSWFPFSYISILSNIEACFIKACRLRRQYNLQIRQNHKLYNPIMVCEYCYSLLVKNKSLKSLNLVTCLILTLPGLHMRVNTRRRGHWEPSQQSSTVSELDNQHCKYQEMALTGESVCFQRCPLTMYRSWSWQQHLIGKVALFLHFCCLAVSCPFTAVSSCLCLTVLFPLSLQHLAELLLGLDFTSSQAAGSWSFPPNPSQGKVPLLNALKMLCLCQSTYHILINCLSSRLEFKLCGDRDHIHLILFGSPVPSTSQLLNKYWHDEEIVPLGVLLFHFNKCDSLKLYSEIFCVCTTFHVNEFSHLESLFEKKYHVIQIFDMEKVVSDILVIRKEHLKGTSFGNTMMLKWMLIFILGRKCELKSNKNRKRSLLILACSYLPEKCTDARMGMKNSMHLLGFGYSKLAFSDLVMINLTICLLFFLFISSTLILNFGSDFSLNEVKIQLGNEMTPSKTELTFCNYKGKKKQQQQQTYIRLICKSQVLLCFMLLSYIELGYFIYIHNGYFQWFDENHFYVQKLEDLTGKVIIDKLIVILKVHSLKLYPICCYNTFFFWWFDFSP

SEQ ID NO: 752390 - protein, 118 aa, Homo sapiens
LVRWGLALLPRLECSGAISAHCNLCLLGSSNSPASVSQVAGTTGTHHHAQLIFVFLVETGFCHIGQAGLKLLTSGDPPTSASQSAGITGVSHHAQPRFFFEALNYFANQDKKLRRVPE

SEQ ID NO: 752391 - protein, 224 aa, Homo sapiens
TQSLIKDLKNLYLNKAVNFSDHLLSSAAEGDGGLCGSRSSWVSDYSQSTSDTIEKIKRIKNFKTKTFQEKKEQLIPENRLLLKEVGPTGEGRVSVIEQLLDEGADPNCCDEDNRPVITVAVMNKHHEAIPVLVQRGADIDQQWGPLRNTALHEATLLGLAGRESTATLLGCNASIQKKNAGGQTAYDLALNTGDDLVTSLFAAKFGQGLEDQLAQTRSLSLDDC

SEQ ID NO: 752392 - protein, 556 aa, Homo sapiens
QRETDFLKCAHCLAPRPSDPFARFCQECGSPVPPIFGCRLPPPEGAQMGLCAECRSLVPMNTPICVVCEAPLALQLQPQASLHLKEKVICRACGTGNPAHLRYCVTCEGALPSSQESMCSGDKAPPPPTQKGGTISCYRCGRWNLWEASFCGWCGAMLGIPAGCSVCPKCGASNHLSARFCGSCGICVKSLVKLSLDRSLALAAEEPRPFSEPRCAWQSLNIPLPRSDVGTKRDIGTQTVGLFYPSGKLLAKKEQELASQKQRQEKMSDHKPLLTAISPGRGYWRRQLDHISAHLRCYAQNNPEFRALIAEPRMGKLISATVHEDGCEVSIRLNYSQVSNKNLYLNKAVNFSDHLLSSAAEGDGGLCGSRSSWVSDYSQSTSDTIEKIKRIKNFKTKTFQEKKEQLIPENRLLLKEVGPTGEGRVSVIEQLLDEGADPNCCDEDNRPVITVAVMNKHHEAIPVLVQRGADIDQQWGPLRNTALHEATLLGLAGRESTATLLGCNASIQKKNAGGQTAYDLALNTGDDLVTSLFAAKFGQGLEDQLAQTRSLSLDDC

SEQ ID NO: 752393 - protein, 550 aa, Homo sapiens
QRETDFLKCAHCLAPRPSDPFARFCQECGSPVPPIFGCRLPPPEGAQMGLCAECRSLVPMNTPICVVCEAPLALQLQPQASLHLKEKVICRACGTGNPAHLRYCVTCEGALPSSQESMCSGDKAPPPPTQKGGTISCYRCGRWNLWEASFCGWCGAMLGIPAGCSVCPKCGASNHLSARFCGSCGICVKSLVKLSLDRSLALAAEEPRPFSESLNIPLPRSDVGTKRDIGTQTVGLFYPSGKLLAKKEQELASQKQRQEKMSDHKPLLTAISPGRGYWRRQLDHISAHLRCYAQNNPEFRALIAEPRMGKLISATVHEDGCEVSIRLNYSQVSNKNLYLNKAVNFSDHLLSSAAEGDGGLCGSRSSWVSDYSQSTSDTIEKIKRIKNFKTKTFQEKKEQLIPENRLLLKEVGPTGEGRVSVIEQLLDEGADPNCCDEDNRPVITVAVMNKHHEAIPVLVQRGADIDQQWGPLRNTALHEATLLGLAGRESTATLLGCNASIQKKNAGGQTAYDLALNTGDDLVTSLFAAKFGQGLEDQLAQTRSLSLDDC

SEQ ID NO: 752394 - protein, 377 aa, Homo sapiens
QRETDFLKCAHCLAPRPSDPFARFCQECGSPVPPIFGCRLPPPEGAQMGLCAECRSLVPMNTPICVVCEAPLALQLQPQASLHLKEKVICRACGTGNPAHLRYCVTCEGALPSSQESMCSGDKAPPPPTQKGGTISCYRCGRWNLWEASFCGWCGAMLGIPAGCSVCPKCGASNHLSARFCGSCGICVKSLVKLSLDRSLALAAEEPRPFSEPRCAWQSLNIPLPRSDVGTKRDIGTQTVGLFYPSGKLLAKKEQELASQKQRQEKMSDHKPLLTAISPGRGYWRRQLDHISAHLRCYAQNNPEFRALIAEPRMGKVGEMKFPLHKCPRDQAEGTLHGLCLKLHLAWLLSLSCSAFYTFLLFCLVSSALINHLHMNI

SEQ ID NO: 752395 - protein, 106 aa, Homo sapiens; identical to SEQ ID NO: 752226

SEQ ID NO: 752396 - protein, 187 aa, Homo sapiens
MRQKSHRHLYQSITPRPVSKANRSRVLSWKVCFPIGCSIARSLWGLETKGQQQIHVIIYGLQTPASARLRPPSLPVHQPVAPVGRGVSTSRLLETSFLLRQEAKDCVPSTSTWLPPPGKSHGSLWHHAPPGTCRGSCHQPPEPLFLRGKWAYSSERKFHREYAWQFSLGLLGSPTPLPLTSALSTAC

SEQ ID NO: 752397 - protein, 106 aa, Homo sapiens
THHNGTSSKSIYGEKFDDENFILKHTGPGILSMANAGPNTNSSQFFICTAKTEWLDGKHVVFGKAKEGMNIVEAIEHFGSRNGKTSKKITTADCGQLLISLTCVLS

SEQ ID NO: 752398 - protein, 591 aa, Homo sapiens
MLVGSQSFSPGGPNGIIRSQSFAGFSGLQERRSRCNSFIENSSALKKPQAKLKKMHNLGHKNNNPPKEPQPKRVEEVYRALKNGLDEYLEVHQTELDKLTAQLKDMKRNSRLGVLYDLDKQIKTIERYMRRLEFHISKVDELYEAYCIQRRLQDGASKMKQAFATSPASKAARESLTEINRSFKEYTENMCTIEVELENLLGEFSIKMKGLAGFARLCPGDQYEIFMKYGRQRWKLKGKIEVNGKQSWDGEETVFLPLIVGFISIKVTELKGLATHILVGSVTCETKELFAARPQVVAVDINDLGTIKLNLEITWYPFDVEDMTASSGAGNKAAALQRRMSMYSQGTPETPTFKDHSFFSNLPDDIFENGKAAEEKMPLSLSFSDLPNGDCALTSHSTGSPSNSTNPEITITPAEFNLSSLASQNEGMDDTSSASSRNSLGEGQEPKSHLKEEDPEEPRKPASAPSEACRRQSSGAGAEHLFLENDVAEALLQESEEASELKPVELDTSEGNITKQLVKRLTSAEVPMATDRLLSEGSVGGESEGCRSFLDGSLEDAFNGLLLALEPHKEQYKEFQDLNQEVMNLDDILKK

SEQ ID NO: 752399 - protein, 591 aa, Homo sapiens; identical to SEQ ID NO: 752398

SEQ ID NO: 752400 - protein, 1037 aa, Homo sapiens
MQFFDAEELLVDEEDDVFGEGLPTRLPEIMLVGSQSFSPGGPNGIIRSQSFAGFSGLQERRSRCNSFIENSSALKKPQAKLKKMHNLGHKNNNPPKEPQPKRVEEVYRALKNGLDEYLEVHQTELDKLTAQLKDMKRNSRLGVLYDLDKQIKTIERYMRRLEFHISKVDELYEAYCIQRRLQDGASKMKQAFATSPASKAARESLTEINRSFKEYTENMCTIEVELENLLGEFSIKMKGLAGFARLCPGDQYEIFMKYGRQRWKLKGKIEVNGKQSWDGEETVFLPLIVGFISIKVTELKGLATHILVGSVTCETKELFAARPQVVAVDINDLGTIKLNLEITWYPFDVEDMTASSGAGNKAAALQRRMSMYSQGTPETPTFKDHSFFSNLPDDIFENGKAAEEKMPLSLSFSDLPNGDCALTSHSTGSPSNSTNPEITITPAEFNLSSLASQNEGMDDTSSASSRNSLGEGQEPKSHLKEEDPEEPRKPASAPSEACRRQSSGAGAEHLFLENDVAEALLQESEEASELKPVELDTSEGNITKQLVKRLTSAEVPMATDRLLSEGSVGGESEGCRSFLDGSLEDAFNGLLLALEPHKEQYKEFQDLNQEVMNLDDILKCKPAVSRSRSSSLSLTVESALESFDFLNTSDFDEEEDGDEVCNVGGGADSVFSDTETEKHSYRSVHPEARGHLSEALTEDTGVGTSVAGSPLPLTTGNESLDITIVRHLQYCTQLVQQIVFSSKTPFVARSLLEKLAAVSDENIGNISSVVEAIPEFHKKLSLLSFWTKCCSPVGVYHSPADRVMKQLEASFARTVNKEYPGLADPVFRTLVSQILDRAEPLLSSSLSSEVVTVFQYYSYFTSHGVSDLESYLSQLARQVSMVQTLQSLRDEKLLQTMSDLAPSNLLAQQEVLRTLALLLTREDNEVSEAVTLYLAAASKNQHFREKALLYYCEALTKTNLQLQKAACLALKILEATESIKMLVTLCQSDTEEIRNVASETLLSLGEDGRLAYEQLDKFPRDCVKVGGRHGTEVATAF

SEQ ID NO: 752401 - protein, 1008 aa, Homo sapiens
MLVGSQSFSPGGPNGIIRSQSFAGFSGLQERRSRCNSFIENSSALKKPQAKLKKMHNLGHKNNNPPKEPQPKRVEEVYRALKNGLDEYLEVHQTELDKLTAQLKDMKRNSRLGVLYDLDKQIKTIERYMRRLEFHISKVDELYEAYCIQRRLQDGASKMKQAFATSPASKAARESLTEINRSFKEYTENMCTIEVELENLLGEFSIKMKGLAGFARLCPGDQYEIFMKYGRQRWKLKGKIEVNGKQSWDGEETVFLPLIVGFISIKVTELKGLATHILVGSVTCETKELFAARPQVVAVDINDLGTIKLNLEITWYPFDVEDMTASSGAGNKAAALQRRMSMYSQGTPETPTFKDHSFFSNLPDDIFENGKAAEEKMPLSLSFSDLPNGDCALTSHSTGSPSNSTNPEITITPAEFNLSSLASQNEGMDDTSSASSRNSLGEGQEPKSHLKEEDPEEPRKPASAPSEACRRQSSGAGAEHLFLENDVAEALLQESEEASELKPVELDTSEGNITKQLVKRLTSAEVPMATDRLLSEGSVGGESEGCRSFLDGSLEDAFNGLLLALEPHKEQYKEFQDLNQEVMNLDDILKCKPAVSRSRSSSLSLTVESALESFDFLNTSDFDEEEDGDEVCNVGGGADSVFSDTETEKHSYRSVHPEARGHLSEALTEDTGVGTSVAGSPLPLTTGNESLDITIVRHLQYCTQLVQQIVFSSKTPFVARSLLEKLAAVSDENIGNISSVVEAIPEFHKKLSLLSFWTKCCSPVGVYHSPADRVMKQLEASFARTVNKEYPGLADPVFRTLVSQILDRAEPLLSSSLSSEVVTVFQYYSYFTSHGVSDLESYLSQLARQVSMVQTLQSLRDEKLLQTMSDLAPSNLLAQQEVLRTLALLLTREDNEVSEAVTLYLAAASKNQHFREKALLYYCEALTKTNLQLQKAACLALKILEATESIKMLVTLCQSDTEEIRNVASETLLSLGEDGRLAYEQLDKFPRDCVKVGGRHGTEVATAF

SEQ ID NO: 752402 - protein, 642 aa, Homo sapiens
MQFFDAEELLVDEEDDVFGEGLPTRLPEIMLVGSQSFSPGGPNGIIRSQSFAGFSGLQERRSRCNSFIENSSALKKPQAKLKKMHNLGHKNNNPPKEPQPKRVEEVYRALKNGLDEYLEVHQTELDKLTAQLKDMKRNSRLGVLYDLDKQIKTIERYMRRLEFHISKVDELYEAYCIQRRLQDGASKMKQAFATSPASKAARESLTEINRSFKEYTENMCTIEVELENLLGEFSIKMKGLAGFARLCPGDQYEIFMKYGRQRWKLKGKIEVNGKQSWDGEETVFLPLIVGFISIKVTELKGLATHILVGSVTCETKELFAARPQVVAVDINDLGTIKLNLEITWYPFDVEDMTASSGAGNKAAALQRRMSMYSQGTPETPTFKDHSFFSNLPDDIFENGKAAEEKMPLSLSFSDLPNGDCALTSHSTGSPSNSTNPEITITPAEFNLSSLASQNEGMDDTSSASSRNSLGEGQEPKSHLKEEDPEEPRKPASAPSEACRRQSSGAGAEHLFLENDVAEALLQESEEASELKPVELDTSEGNITKQLVKRLTSAEVPMATDRLLSEGSVGGESEGCRSFLDGSLEDAFNGLLLALEPHKEQYKEFQDLNQEVMNLDDILKDAKHLDDQKLNGAASWTEITEGE

SEQ ID NO: 752403 - protein, 1068 aa, Homo sapiens
MLVGSQSFSPGGPNGIIRSQSFAGFSGLQERRSRCNSFIENSSALKKPQAKLKKMHNLGHKNNNPPKEPQPKRVEEVYRALKNGLDEYLEVHQTELDKLTAQLKDMKRNSRLGVLYDLDKQIKTIERYMRRLEFHISKVDELYEAYCIQRRLQDGASKMKQAFATSPASKAARESLTEINRSFKEYTENMCTIEVELENLLGEFSIKMKGLAGFARLCPGDQYEIFMKYGRQRWKLKGKIEVNGKQSWDGEETVFLPLIVGFISIKVTELKGLATHILVGSVTCETKELFAARPQVVAVDINDLGTIKLNLEITWYPFDVEDMTASSGAGNKAAALQRRMSMYSQGTPETPTFKDHSFFRWLHPSPDKPRRLSVLSALQDTFFAKLHRSRSFSDLPSLRPSPKAVLELYSNLPDDIFENGKAAEEKMPLSLSFSDLPNGDCALTSHSTGSPSNSTNPEITITPAEFNLSSLASQNEGMDDTSSASSRNSLGEGQEPKSHLKEEDPEEPRKPASAPSEACRRQSSGAGAEHLFLENDVAEALLQESEEASELKPVELDTSEGNITKQLVKRLTSAEVPMATDRLLSEGSVGGESEGCRSFLDGSLEDAFNGLLLALEPHKEQYKEFQDLNQEVMNLDDILKCKPAVSRSRSSSLSLTVESALESFDFLNTSDFDEEEDGDEVCNVGGGADSVFSDTETEKHSYRSVHPEARGHLSEALTEDTGVGTSVAGSPLPLTTGNESLDITIVRHLQYCTQLVQQIVFSSKTPFVARSLLEKLSRQIQVMEKLAAVSDENIGNISSVVEAIPEFHKKLSLLSFWTKCCSPVGVYHSPADRVMKQLEASFARTVNKEYPGLADPVFRTLVSQILDRAEPLLSSSLSSEVVTVFQYYSYFTSHGVSDLESYLSQLARQVSMVQTLQSLRDEKLLQTMSDLAPSNLLAQQEVLRTLALLLTREDNEVSEAVTLYLAAASKNQHFREKALLYYCEALTKTNLQLQKAACLALKILEATESIKMLVTLCQSDTEEIRNVASETLLSLGEDGRLAYEQLDKFPRDCVKVGGRHGTEVATAF

SEQ ID NO: 752404 - protein, 264 aa, Homo sapiens
MLVGSQSFSPGGPNGIIRSQSFAGFSGLQERRSRCNSFIENSSALKKPQAKLKKMHNLGHKNNNPPKEPQPKRVEEVYRALKNGLDEYLEVHQTELDKLTAQLKDMKRNSRLGVLYDLDKQIKTIERYMRRLEFHISKVDELYEAYCIQRRLQDGASKMKQAFATSPASKAARESLTEINRSFKEYTENMCTIESGGLEEILLGKNSSINDEQVWPGFAPPLFLDDHYDNFHESMGGQAGGTWKATRTYMAAKTGMGKNKVLAL

SEQ ID NO: 752405 - protein, 1008 aa, Homo sapiens; identical to SEQ ID NO: 752401

SEQ ID NO: 752406 - protein, 286 aa, Homo sapiens
MEKLAAVSDENIGNISSVVEAIPEFHKKLSLLSFWTKCCSPVGVYHSPADRVMKQLEASFARTVNKEYPGLADPVFRTLVSQILDRAEPLLSSSLSSEVVTVFQYYSYFTSHGVSDLESYLSQLARQVSMVQTLQSLRDEKLLQTMSDLAPSNLLAQQEVLRTLALLLTREDNEVSEAVTLYLAAASKNQHFREKALLYYCEALTKTNLQLQKAACLALKILEATESIKMLVTLCQSDTEEIRNVASETLLSLGEDGRLAYEQLDKFPRDCVKVGGRHGTEVATAF

SEQ ID NO: 752407 - protein, 346 aa, Homo sapiens
MQFFDAEELLVDEEDDVFGEGLPTRLPEIMLVGSQSFSPGGPNGIIRSQSFAGFSGLQERRSRCNSFIENSSALKKPQAKLKKMHNLGHKNNNPPKEPQPKRVEEVYRALKNGLDEYLEVHQTELDKLTAQLKDMKRNSRLGVLYDLDKQIKTIERYMRRLEFHISKVDELYEAYCIQRRLQDGASKMKQAFATSPASKAARESLTEINRSFKEYTENMCTIEVELENLLGEFSIKMKGLAGFARLCPGDQYEIFMKYGRQRWKLKGKIEVNGKQSWDGEETVFLPLIVGFISIKVQYCHCLLSFLVPRLDDPLVGPLPVTPACCPSIPQTSLHKSITKTAALSSE

SEQ ID NO: 752408 - protein, 340 aa, Homo sapiens
MSELEQLRQEAEQLRNQIQDARKACNDATLVQITSNMDSVGRIQMRTRRTLRGHLAKIYAMHWGYDSRLLVSASQDGKLIIWDSYTTNKMHAIPLRSSWVMTCAYAPSGNYVACGGLDNICSIYNLKTREGNVRVSRELPGHTGYLSCCRFLDDSQIVTSSGDTTCALWDIETAQQTTTFTGHSGDVMSLSLSPDMRTFVSGACDASSKLWDIRDGMCRQSFTGHVSDINAVSFFPNGYAFATGSDDATCRLFDLRADQELLLYSHDNIICGITSVAFSKSGRLLLAGYDDFNCNVWDTLKGDRAGVLAGHDNRVSCLGVTDDGMAVATGSWDSFLRIWN

SEQ ID NO: 752409 - protein, 236 aa, Homo sapiens [sequence omitted]

SEQ ID NO: 752410 - protein, 340 aa, Homo sapiens; identical to SEQ ID NO: 752408

SEQ ID NO: 752411 - protein, 340 aa, Homo sapiens; identical to SEQ ID NO: 752408

SEQ ID NO: 752412 - protein, 236 aa, Homo sapiens [sequence omitted]

SEQ ID NO: 752413 - protein, 113 aa, Homo sapiens
PRPLSGLLATPGRMCGGGVLQAKRELRADRGSAPDWGTQCKRRGQREGTECGPLRKEDAAGGGESCSGSGVRAGPVLEWAWSPVGRVRFLLSVTGLVGSDLKVHSGCGVGSRW

SEQ ID NO: 752414 - protein, 628 aa, Homo sapiens
MSTATTVAPAGIPATPGPVNPPPPEVSNPSKPGRKTNQLQYMQNVVVKTLWKHQFAWPFYQPVDAIKLNLPDYHKIIKNPMDMGTIKKRLENNYYWSASECMQDFNTMFTNCYIYNKPTDDIVLMAQALEKIFLQKVAQMPQEEVELLPPAPKGKGRKPAAGAQSAGTQQVAAVSSVSPATPFQSVPPTVSQTPVIAATPVPTITANVTSVPVPPAAAPPPPATPIVPVVPPTPPVVKKKGVKRKADTTTPTTSAITASRSESPPPLSDPKQAKVVARRESGGRPIKPPKKDLEDGEVPQHAGKKGKLSEHLRYCDSILREMLSKKHAAYAWPFYKPVDAEALELHDYHDIIKHPMDLSTVKRKMDGREYPDAQGFAADVRLMFSNCYKYNPPDHEVVAMARKLQDVFEMRFAKMPDEPVEAPALPAPAAPMVSKGAESSRSSEESSSDSGSSDSEEERATRLAELQEQLKAVHEQLAALSQAPVNKPKKKKEKEGEGEEEEGQGEGEGEAQSEWPMEEKKAKVAPPAKQAQQKKAPAKKANSTTTAGRQLKKGGKQASASYDSEEEEEGLPMSYDEKRQLSLDINRLPGEKLGRVVHIIQSREPSLRDSNPDEIEIDFETLKPTTLR

SEQ ID NO: 752415 - protein, 501 aa, Homo sapiens
MSTATTVAPAGIPATPGPVNPPPPEVSNPSKPGRKTNQLQYMQNVVVKTLWKHQFAWPFYQPVDAIKLNLPDYHKIIKNPMDMGTIKKRLENNYYWSASECMQDFNTMFTNCYIYNKPTDDIVLMAQALEKIFLQKVAQMPQEEVELLPPAPKGKGRKPAAGAQSAGTQQVAAVSSVSPATPFQSVPPTVSQTPVIAATPVPTITANVTSVPVPPAAAPPPPATPIVPVVPPTPPVVKKKGVKRKADTTTPTTSAITASRSESPPPLSDPKQAKVVARRESGGRPIKPPKKDLEDGEVPQHAGKKGKLSEHLRYCDSILREMLSKKHAAYAWPFYKPVDAEALELHDYHDIIKHPMDLSTVKRKMDGREYPDAQGFAADVRLMFSNCYKYNPPDHEVVAMARKLQDVFEMRFAKMPDEPVEAPALPAPAAPMVSKGAESSRSSEESSSDSGSSDSEEERATRLAELQEQLKAVHEQLAALSQAPVNKPKKKKEKEGETFPL

SEQ ID NO: 752416 - protein, 414 aa, Homo sapiens
MSTATTVAPAGIPATPGPVNPPPPEVSNPSKPGRKTNQLQYMQNVVVKTLWKHQFAWPFYQPVDAIKLNLPDYHKIIKNPMDMGTIKKRLENNYYWSASECMQDFNTMFTNCYIYNKPTDDIVLMAQALEKIFLQKVAQMPQEEVELLPPAPKGKGRKPAAGAQSAGTQQVAAVSSVSPATPFQSVPPTVSQTPVIAATPVPTITANVTSVPVPPAAAPPPPATPIVPVVPPTPPVVKKKGVKRKADTTTPTTSAITASRSESPPPCLRPQETNQRRRRRKKEKEKKKKDKEKEKEKHKVKAEEEKKAKVAPPAKQAQQKKAPAKKANSTTTAGRQLKKGGKQASASYDSEEEEEGLPMSYDEKRQLSLDINRLPGEKLGRVVHIIQSREPSLRDSNPDEIEIDFETLKPTTLR

SEQ ID NO: 752417 - protein, 312 aa, Homo sapiens
MQNVVVKTLWKHQFAWPFYKPVDAEALELHDYHDIIKHPMDLSTVKRKMDGREYPDAQGFAADVRLMFSNCYKYNPPDHEVVAMARKLQDVFEMRFAKMPDEPVEAPALPAPAAPMVSKGAESSRSSEESSSDSGSSDSEEERATRLAELQEQLKAVHEQLAALSQAPVNKPKKKKEKEGEGEEEEGQGEGEGEAQSEGLMEEKKAKVAPPAKQAQQKKAPAKKANSTTTAGRQLKKGGKQASASYDSEEEEEGLPMSYDEKRQLSLDINRLPGEKLGRVVHIIQSREPSLRDSNPDEIEIDFETLKPTTLR

SEQ ID NO: 752418 - protein, 1829 aa, Homo sapiens
MEDTPPSLSCSDCQRHFPSLPELSRHRELLHPSPNQDSEEADSIPRPYRCQQCGRGYRHPGSLVNHRRTHETGLFPCTTCGKDFSNPMALKSHMRTHAPEGRRRHRPPRPKEATPHLQGETVSTDSWGQRLGSSEGWENQTKHTEETPDCESVPDPRAASGTWEDLPTRQREGLASHPGPEDGADGWGPSTNSARAPPLPIPASSLLSNLEQYLAESVVNFTGGQEPTQSPPAEEERRYKCSQCGKTYKHAGSLTNHRQSHTLGIYPCAICFKEFSNLMALKNHSRLHAQYRPYHCPHCPRVFRLPRELLEHQQSHEGERQEPRWEEKGMPTTNGHTDESSQDQLPSAQMLNGSAELSTSGELEDSGLEEYRPFRCGDCGRTYRHAGSLINHRKSHQTGVYPCSLCSKQLFNAAALKNHVRAHHRPRQGVGENGQPSVPPAPLLLAETTHKEEEDPTTTLDHRPYKCSECGRAYRHRGSLVNHRHSHRTGEYQCSLCPRKYPNLMALRNHVRVHCKAARRSADIGAEGAPSHLKVELPPDPVEAEAAPHTDQDHVCKHEEEATDITPAADKTAAHICSICGLLFEDAESLERHGLTHGAGEKENSRTETTMSPPRAFACRDCGKSYRHSGSLINHRQTHQTGDFSCGACAKHFHTMAAMKNHLRRHSRRRSRRHRKRAGGASGGREAKLLAAESWTRELEDNEGLESPQDPSGESPHGAEGNLESDGDCLQAESEGDKCGLERDETHFQGDKESGGTGEGLERKDASLLDNLDIPGEEGGGTHFCDSLTGVDEDQKPATGQPNSSSHSANAVTGWQAGAAHTCSDCGHSFPHATGLLSHRPCHPPGIYQCSLCPKEFDSLPALRSHFQNHRPGEATSAQPFLCCLCGMIFPGRAGYRLHRRQAHSSSGMTEGSEEEGEEEGVAEAAPARSPPLQLSEAELLNQLQREVEALDSAGYGHICGCCGQTYDDLGSLERHHQSQSSGTTADKAPSPLGVAGDAMEMVVDSVLEDIVNSVSGEGGDAKSQEGAGTPLGDSLCIQGGESLLEAQPRPFRCNQCGKTYRHGGSLVNHRKIHQTGDFLCPVCSRCYPNLAAYRNHLRNHPRCKGSEPQVGPIPEAAGSSELQVGPIPEGGSNKPQHMAEEGPGQAEVEKLQEELKVEPLEEVARVKEEVWEETTVKGEEIEPRLETAEKGCQTEASSERPFSCEVCGRSYKHAGSLINHRQSHQTGHFGCQACSKGFSNLMSLKNHRRIHADPRRFRCSECGKAFRLRKQLASHQRVHMERRGGGGTRKATREDRPFRCGQCGRTYRHAGSLLNHRRSHETGQYSCPTCPKTYSNRMALKDHQRLHSENRRRRAGRSRRTAVRCALCGRSFPGRGSLERHLREHEETEREPANGQGGLDGTAASEANLTGSQGLETQLGGAEPVPHLEDGVPRPGERSQSPIRAASSEAPEPLSWGAGKAGGWPVGGGLGNHSGGWVPQFLTRSEEPEDSVHRSPCHAGDCQLNGPTLSHMDSWDNRDNSSQLQPGSHSSCSQCGKTYCQSGSLLNHNTNKTDRHYCLLCSKEFLNPVATKSHSHNHIDAQTFACPDCGKAFESHQELASHLQAHARGHSQVPAQMEEARDPKAGTGEDQVVLPGQGKAQEAPSETPRGPGESVERARGGQAVTSMAAEDKERPFRCTQCGRSYRHAGSLLNHQKAHTTGLYPCSLCPKLLPNLLSLKNHSRTHTDPKRHCCSICGKAFRTAARLEGHGRVHAPREGPFTCPHCPRHFRRRISFVQHQQQHQEEWTVAGSGRGHEGSQEEVGTQWRGKSSPKVGGGARSERREPRGF

SEQ ID NO: 752419 - protein, 1219 aa, Homo sapiens
MSPPRAFACRDCGKSYRHSGSLINHRQTHQTGDFSCGACAKHFHTMAAMKNHLRRHSRRRSRRHRKRAGGASGGREAKLLAAESWTRELEDNEGLESPQDPSGESPHGAEGNLESDGDCLQAESEGDKCGLERDETHFQGDKESGGTGEGLERKDASLLDNLDIPGEEGGGTHFCDSLTGVDEDQKPATGQPNSSSHSANAVTGWQAGAAHTCSDCGHSFPHATGLLSHRPCHPPGIYQCSLCPKEFDSLPALRSHFQNHRPGEATSAQPFLCCLCGMIFPGRAGYRLHRRQAHSSSGMTEGSEEEGEEEGVAEAAPARSPPLQLSEAELLNQLQREVEALDSAGYGHICGCCGQTYDDLGSLERHHQSQSSGTTADKAPSPLGVAGDAMEMVVDSVLEDIVNSVSGEGGDAKSQEGAGTPLGDSLCIQGGESLLEAQPRPFRCNQCGKTYRHGGSLVNHRKIHQTGDFLCPVCSRCYPNLAAYRNHLRNHPRCKGSEPQVGPIPEAAGSSELQVGPIPEGGSNKPQHMAEEGPGQAEVEKLQEELKVEPLEEVARVKEEVWEETTVKGEEIEPRLETAEKGCQTEASSERPFSCEVCGRSYKHAGSLINHRQSHQTGHFGCQACSKGFSNLMSLKNHRRIHADPRRFRCSECGKAFRLRKQLASHQRVHMERRGGGGTRKATREDRPFRCGQCGRTYRHAGSLLNHRRSHETGQYSCPTCPKTYSNRMALKDHQRLHSENRRRRAGRSRRTAVRCALCGRSFPGRGSLERHLREHEETEREPANGQGGLDGTAASEANLTGSQGLETQLGGAEPVPHLEDGVPRPGERSQSPIRAASSEAPEPLSWGAGKAGGWPVGGGLGNHSGGWVPQFLTRSEEPEDSVHRSPCHAGDCQLNGPTLSHMDSWDNRDNSSQLQPGSHSSCSQCGKTYCQSGSLLNHNTNKTDRHYCLLCSKEFLNPVATKSHSHNHIDAQTFACPDCGKAFESHQELASHLQAHARGHSQVPAQMEEARDPKAGTGEDQVVLPGQGKAQEAPSETPRGPGESVERARGGQAVTSMAAEDKERPFRCTQCGRSYRHAGSLLNHQKAHTTGLYPCSLCPKLLPNLLSLKNHSRTHTDPKRHCCSICGKAFRTAARLEGHGRVHAPREGPFTCPHCPRHFRRRISFVQHQQQHQEEWTVAGSGRGHEGSQEEVGTQWRGKSSPKVGGGARSERREPRGF

SEQ ID NO: 752420 - protein, 1829 aa, Homo sapiens; identical to SEQ ID NO: 752418

SEQ ID NO: 752421 - protein, 110 aa, Homo sapiens
MLSSLQRSESGGGSACREGLDLHIFSGVVRASPYLLLSPCEEDPDLASFPRRGWGVPRVPVLEGPPSPSLITVLFSAPPSAARLQHQGEADAEPHRWESCLWKGAFCYNL

SEQ ID NO: 752422 - protein, 1829 aa, Homo sapiens; identical to SEQ ID NO: 752418

SEQ ID NO: 752423 - protein, 359 aa, Homo sapiens
MGNHSGGWVPQFLTRSEEPEDSVHRSPCHAGDCQLNGPTLSHMDSWDNRDNSSQLQPGSHSSCSQCGKTYCQSGSLLNHNTNKTDRHYCLLCSKEFLNPVATKSHSHNHIDAQTFACPDCGKAFESHQELASHLQAHARGHSQVPAQMEEARDPKAGTGEDQVVLPGQGKAQEAPSETPRGPGESVERARGGQAVTSMAAEDKERPFRCTQCGRSYRHAGSLLNHQKAHTTGLYPCSLCPKLLPNLLSLKNHSRTHTDPKRHCCSICGKAFRTAARLEGHGRVHAPREGPFTCPHCPRHFRRRISFVQHQQQHQEEWTVAGSGRGHEGSQEEVGTQWRGKSSPKVGGGARSERREPRGF

SEQ ID NO: 752424 - protein, 106 aa, Homo sapiens
STTYGTQCSLRLLQVGGDVVGPECGVLKPRPGKSPQRIPGYLRTAPAGVWPVLPPDFQPSSRHPRRSVCCLLFLECPKVVVSAQDFHRFLNLDSCGPQLCALRILF

SEQ ID NO: 752425 - protein, 47 aa, Homo sapiens
MPLVGQVCKYTSWFPFLVCTPPRPLSELPPSVSCAFINSPEMFRFKF

SEQ ID NO: 752426 - protein, 104 aa, Homo sapiens [sequence omitted]

SEQ ID NO: 752427 - protein, 83 aa, Homo sapiens
GRLSVRGFSKQVEYGTEVHRSSLLTKRVVLVEIRVVLNTVSEADYVECTRAKQARDGLVTVSACMMYGAFVTHTARCAFVFVF

SEQ ID NO: 752428 - protein, 83 aa, Homo sapiens; identical to SEQ ID NO: 752427

SEQ ID NO: 752429 - protein, 119 aa, Homo sapiens
PIVCELLGLATSQDNGQPEGAWAKSPQGTSHKDRATGQRGKTNAREILPAMPGAQGSWPPTRRTAGSTWHWGSAWHRATSSFPLHAHPPPQKQVLCAQQWPWMLGRATHRDHGGPPGQP

SEQ ID NO: 752430 - protein, 667 aa, Homo sapiens
PPPPPPPPPALPGPGPVSVPELKPESSQTPVVSTRKGKCRGVRRMVVKMAKIPVSLGRRNKTTYKVSSLSSSLSVEGKELGLRVSAEPTPLLKMKNNGRNVVVVFPPGEMPIILKRKRGRPPKNLLLGPGKPKEPAVVAAEAATVAAATMAMPEVKKRRRRKQKLASPQPSYAADANDSKAEYSDVLAKLAFLNRQSQCAGRCSPPRCWTPSEPESVHQAPDTQSISHFLHRVQGFRRRGGKAGGFGGRGGGHAAKSARCSFSDFFEGIGKKKKVVAVAAAGVGGPGLTELGHPRKRGRGEVDAVTGKPKRKRRSRKNGTLFPEQVPSGPGFGEAGAEWAGDKGGGWAPHHGHPGGQAGRNCGFQGTEARAFASTGLESGASGRGSYYSTGAPSGQTELSQERQNLFTGYFRSLLDSDDSSDLLDFALSASRPESRKASGTYAGPPTSALPAQRGLATFPSRGAKASPVAVGSSGAGADPSFQPVLSARQTFPPGRAASYGLTPATSDCRAAETFPKLVPPPSAMARSPTTHPPANTYLPQYGGYGAGQSVFAPTKPFTGQDCANSKDCSFAYGSGNSLPASPSSAHSAGYAPPPTGGPCLPPSKASFFSSSEGAPFSGSAPTPLRCDSRASTVSPGGYMVPKGTTASATSAASAASSSSSSFQPSP

SEQ ID NO: 752431 - protein, 282 aa, Homo sapiens
PPPPPPPPPALPGPGPVSVPELKPESSQTPVVSTRKGKCRGVRRMVVKMAKIPVSLGRRNKTTYKVSSLSSSLSVEGKELGLRVSAEPTPLLKMKNNGRNVVVVFPPGEMPIILKRKRGRPPKNLLLGPGKPKEPAVVAAEAATVAAATMAMPEVKKRRRRKQKLASPQPSYAADANDSKAEYSDVLAKLAFLNRQSQCAGRCSPPRCWTPSEPESVHQAPGPCFPPGPLPAHLTRPSPPTPSPRTHAHPHAGTPAPGAHQSLPRGTTRCPHGQPVLSHRPA

SEQ ID NO: 752432 - protein, 72 aa, Homo sapiens
DIQLASGVQSDQVSGCHTPEGRWGHEESENPWVSVCVGTRTKLQDSQVHGQFLRGPPGDLKSKKHGILSQLL

SEQ ID NO: 752433 - protein, 106 aa, Homo sapiens
PRLECSAVMSAHCNLRLLCSSHSPATASRVAGITGTCHHTWLIFVFLVEMGFHHVGQAGLELLTSGDPPASASQSSGITGMSHCARPHPSFLIHLVTNSQINCFYL

SEQ ID NO: 752434 - protein, 50 aa, Homo sapiens
MPVCPCLICVCFVLRLQSGVAGTETERPPHGAASLHQDRGATLRLCFFPS

SEQ ID NO: 752435 - protein, 388 aa, Homo sapiens
MTASVLLHPRWIEPTVMFLYDNGGGLVADELNKNMEGAAAAAAAAAAAAAAGAGGGGFPHPAAAAAGGNFSVAAAAAAAAAAAANQCRNLMAHPAPLAPGAASAYSSAPGEAPPSAAAAAAAAAAAAAAAAAASSSGGPGPAGPAGAEAAKQCSPCSAAAQSSSGPAALPYGYFGSGYYPCARMGPHPNAIKSCAQPASAAAAAAFADKYMDTAGPAAEEFSSRAKEFAFYHQGYAAGPYHHHQPMPGYLDMPVVPGLGGPGESRHEPLGLPMESYQPWALPNGWNGQMYCPKEQAQPPHLWKSTLPDVVSHPSDASSYRRGRKKRVPYTKVQLKELEREYATNKFITKDKRRRISATTNLSERQVTIWFQNRRVKEKKVINKLKTTS

SEQ ID NO: 752436 - protein, 262 aa, Homo sapiens
MTASVLLHPRWIEPTVMFLYDNGGGLVADELNKNMEGAAAAAAAAAAAAAAGAGGGGFPHPAAAAAGGNFSVAAAAAAAAAAAANQCRNLMAHPAPLAPGAASAYSSAPGEAPPSAAAAAAAAAAAAAAAAAASSSGGPGPAGPAGAEAAKQCSPCSAAAQSSSGPAALPYGYFGSGYYPCARMGPHPNAIKSCAQPASAAAAAAFADKYMDTAGPAAEEFSSRAKEFAFYHQGYIAETMICEWVPSQNCLEGCVGEEGWMG

SEQ ID NO: 752437 - protein, 388 aa, Homo sapiens; identical to SEQ ID NO: 752435

SEQ ID NO: 752438 - protein, 241 aa, Homo sapiens
EKPHKCTECGKSFNEKSTLIVHQRTHTGEKPYECDVCGKTFTQKSNLGVHQRTHSGEKPFECNECEKAFSQKSYLMLHQRGHTGEKPYECNECEKAFSQKSYLIIHQRTHTEEKPYKCNECGKASEKSQSLIIHQRIHTGEKPYECPVCWKAFSQKSQLIIHQRTHTGEKPYACTECGKAFREKSTFTVHQRTHTGEKPYKCTECGKAFTQKSNLIVHQRTHAGKKAHGRGHTRKSKFMAH

SEQ ID NO: 752439 - protein, 241 aa, Homo sapiens; identical to SEQ ID NO: 752438

SEQ ID NO: 752440 - protein, 790 aa, Homo sapiens
MMCYHCTPDWTKEFLCLKNIRTFLSTCCEKFGLKRSELFEAFDLFDVQDFGKVIYTLSALSWTPIAQNRGIMPFPTEEESVGDEDIYSGLSDQIDDTVEEDEDLYDCVENEEAEGDEIYEDLMRSEPVSMPPKMTEYDKRCCCLREIQQTEEKYTDTLGSIQQHFLKPLQRFLKPQDIEIIFINIEDLLRVHTHFLKEMKEALGTPGAANLYQVFIKYKERFLVYGRYCSQVESASKHLDRVAAAREDVQMKLEECSQRANNGRFTLRDLLMVPMQRVLKYHLLLQELVKHTQEAMEKENLRLALDAMRDLAQCVNEVKRDNETLRQITNFQLSIENLDQSLAHYGRPKIDGELKITSVERRSKMDRYAFLLDKALLICKRRGDSYDLKDFVNLHSFQVRDDSSGDRDNKKWSHMFLLIEDQGAQGYELFFKTRELKKKWMEQFEMAISNIYPENATANGHDFQMFSFEETTSCKACQMLLRGTFYQGYRCHRCRASAHKECLGRVPPCGRHGQDFPGTMKKDKLHRRAQDKKRNELGLPKMEVFQEYYGLPPPPGAIGPFLRLNPGDIVELTKAEAEQNWWEGRNTSTNEIGWFPCNRVKPYVHGPPQDLSVHLWYAGPMERAGAESILANRSDGTFLVRQRVKDAAEFAISIKYNVEVKHIKIMTAEGLYRITEKKAFRGLTELVEFYQQNSLKDCFKSLDTTLQFPFKEPEKRTISRPAVGSTKYFGTAKARYDFCARDRSELSLKEGDIIKILNKKGQQGWWRGEIYGRVGWFPANYVEEDYSEYC

SEQ ID NO: 752441 - protein, 877 aa, Homo sapiens
LAVAPQASRAGVRAGGWWRLRGCTAGPGQAVAMELWRQCTHWLIQCRVLPPSHRVTWDGAQVCELAQALRDGVLLCQLLNNLLPHAINLREVNLRPQMSQFLCLKNIRTFLSTCCEKFGLKRSELFEAFDLFDVQDFGKVIYTLSALSWTPIAQNRGIMPFPTEEESVGDEDIYSGLSDQIDDTVEEDEDLYDCVENEEAEGDEIYEDLMRSEPVSMPPKMTEYDKRCCCLREIQQTEEKYTDTLGSIQQHFLKPLQRFLKPQDIEIIFINIEDLLRVHTHFLKEMKEALGTPGAANLYQVFIKYKERFLVYGRYCSQVESASKHLDRVAAAREDVQMKLEECSQRANNGRFTLRDLLMVPMQRVLKYHLLLQELVKHTQEAMEKENLRLALDAMRDLAQCVNEVKRDNETLRQITNFQLSIENLDQSLAHYGRPKIDGELKITSVERRSKMDRYAFLLDKALLICKRRGDSYDLKDFVNLHSFQVRDDSSGDRDNKKWSHMFLLIEDQGAQGYELFFKTRELKKKWMEQFEMAISNIYPENATANGHDFQMFSFEETTSCKACQMLLRGTFYQGYRCHRCRASAHKECLGRVPPCGRHGQDFPGTMKKDKLHRRAQDKKRNELGLPKMEVFQEYYGLPPPPGAIGPFLRLNPGDIVELTKAEAEQNWWEGRNTSTNEIGWFPCNRVKPYVHGPPQDLSVHLWYAGPMERAGAESILANRSDGTFLVRQRVKDAAEFAISIKYNVEVKHIKIMTAEGLYRITEKKAFRGLTELVEFYQQNSLKDCFKSLDTTLQFPFKEPEKRTISRPAVGSTKYFGTAKARYDFCARDRSELSLKEGDIIKILNKKGQQGWWRGEIYGRVGWFPANYVEEDYSEYC

SEQ ID NO: 752442 - protein, 80 aa, Homo sapiens
FYLLSFTLMTRFFGSHLHFAPEARDSFSFPYFCPGDHRDGHTVSLQEMPGEAIAKFQTPSQTQRAEPSPRIHVSNLSGDL

SEQ ID NO: 752443 - protein, 79 aa, Homo sapiens
MEVFQEYYGLPPPPGAIGPFLRLNPGDIVELTKAEAEQNWWEGRNTSTNEIGWFPCNRVKPYVHGPPQDLSVHLCTQAP

SEQ ID NO: 752444 - protein, 845 aa, Homo sapiens
LAVAPQASRAGVRAGGWWRLRGCTAGPGQAVAMELWRQCTHWLIQCRVLPPSHRVTWDGAQVCELAQALRDGVLLCQLLNNLLPHAINLREVNLRPQMSQFLCLKNIRTFLSTCCEKFGLKRSELFEAFDLFDVQDFGKVIYTLSALSWTPIAQNRGIMPFPTEEESVGDEDIYSGLSDQIDDTVEEDEDLYDCVENEEAEGDEIYEDLMRSEPVSMPHFLKPLQRFLKPQDIEIIFINIEDLLRVHTHFLKEMKEALGTPGAANLYQVFIKYKERFLVYGRYCSQVESASKHLDRVAAAREDVQMKLEECSQRANNGRFTLRDLLMVPMQRVLKYHLLLQELVKHTQEAMEKENLRLALDAMRDLAQCVNEVKRDNETLRQITNFQLSIENLDQSLAHYGRPKIDGELKITSVERRSKMDRYAFLLDKALLICKRRGDSYDLKDFVNLHSFQVRDDSSGDRDNKKWSHMFLLIEDQGAQGYELFFKTRELKKKWMEQFEMAISNIYPENATANGHDFQMFSFEETTSCKACQMLLRGTFYQGYRCHRCRASAHKECLGRVPPCGRHGQDFPGTMKKDKLHRRAQDKKRNELGLPKMEVFQEYYGLPPPPGAIGPFLRLNPGDIVELTKAEAEQNWWEGRNTSTNEIGWFPCNRVKPYVHGPPQDLSVHLWYAGPMERAGAESILANRSDGTFLVRQRVKDAAEFAISIKYNVEVKHIKIMTAEGLYRITEKKAFRGLTELVEFYQQNSLKDCFKSLDTTLQFPFKEPEKRTISRPAVGSTKYFGTAKARYDFCARDRSELSLKEGDIIKILNKKGQQGWWRGEIYGRVGWFPANYVEEDYSEYC

SEQ ID NO: 752445 - protein, 125 aa, Homo sapiens [sequence omitted]

SEQ ID NO: 752446 - protein, 519 aa, Homo sapiens
MMCYHCTPDWTKEFLCLKNIRTFLSTCCEKFGLKRSELFEAFDLFDVQDFGKVIYTLSALSWTPIAQNRGIMPFPTEEESVGDEDIYSGLSDQIDDTVEEDEDLYDCVENEEAEGDEIYEDLMRSEPVSMPPKMTEYDKRCCCLREIQQTEEKYTDTLGSIQQHFLKPLQRFLKPQDIEIIFINIEDLLRVHTHFLKEMKEALGTPGAANLYQVFIKYKERFLVYGRYCSQVESASKHLDRVAAAREDVQMKLEECSQRANNGRFTLRDLLMVPMQRVLKYHLLLQELVKHTQEAMEKENLRLALDAMRDLAQCVNEVKRDNETLRQITNFQLSIENLDQSLAHYGRPKIDGELKITSVERRSKMDRYAFLLDKALLICKRRGDSYDLKDFVNLHSFQVRDDSSGDRDNKKWSHMFLLIEDQGAQGYELFFKTRELKKKWMEQFEMAISNIYPENATANGHDFQMFSFEETTSCKACQMLLRGTFYQGYRCHRCRASAHKECLGRVPPCGRHGQDLPGT

SEQ ID NO: 752447 - protein, 448 aa, Homo sapiens
MMCYHCTPDWTKEFLCLKNIRTFLSTCCEKFGLKRSELFEAFDLFDVQDFGKVIYTLSALSWTPIAQNRGIMPFPTEEESVGDEDIYSGLSDQIDDTVEEDEDLYDCVENEEAEGDEIYEDLMRSEPVSMPPKMTEYDKRCCCLREIQQTEEKYTDTLGSIQQHFLKPLQRFLKPQDIEIIFINIEDLLRVHTHFLKEMKEALGTPGAANLYQVFIKYKERFLVYGRYCSQVESASKHLDRVAAAREDVQMKLEECSQRANNGRFTLRDLLMVPMQRVLKYHLLLQELVKHTQEAMEKENLRLALDAMRDLAQCVNEVKRDNETLRQITNFQLSIENLDQSLAHYGRPKIDGELKITSVERRSKMDRYAFLLDKALLICKRRGDSYDLKDFVNLHSFQVRDDSSGDRDNKKWSHMFLLIEDQGAQGYELFFKTRELKKKWMEQFEMAM

SEQ ID NO: 752448 - protein, 470 aa, Homo sapiens
MEPGSAVGGPGSPLPPPQDLAQCVNEVKRDNETLRQITNFQLSIENLDQSLAHYGRPKIDGELKITSVERRSKMDSFQVRDDSSGDRDNKKWSHMFLLIEDQGAQGYELFFKTRELKKKWMEQFEMAISNIYPENATANGHDFQMFSFEETTSCKACQMLLRGTFYQGYRCHRCRASAHKECLGRVPPCGRHGQDFPGTMKKDKLHRRAQDKKRNELGLPKMEVFQEYYGLPPPPGAIGPFLRLNPGDIVELTKAEAEQNWWEGRNTSTNEIGWFPCNRVKPYVHGPPQDLSVHLWYAGPMERAGAESILANRSDGTFLVRQRVKDAAEFAISIKYNVEVKHIKIMTAEGLYRITEKKAFRGLTELVEFYQQNSLKDCFKSLDTTLQFPFKEPEKRTISRPAVGSTKYFGTAKARYDFCARDRSELSLKEGDIIKILNKKGQQGWWRGEIYGRVGWFPANYVEEDYSEYC

SEQ ID NO: 752449 - protein, 192 aa, Homo sapiens
MGTQARGRPPQDLSVHLWYAGPMERAGAESILANRSDGTFLVRQRVKDAAEFAISIKYNVEVKHIKIMTAEGLYRITEKKAFRGLTELVEFYQQNSLKDCFKSLDTTLQFPFKEPEKRTISRPAVGSTKYFGTAKARYDFCARDRSELSLKEGDIIKILNKKGQQGWWRGEIYGRVGWFPANYVEEDYSEYC

SEQ ID NO: 752450 - protein, 414 aa, Homo sapiens
MMCYHCTPDWTKEFLCLKNIRTFLSTCCEKFGLKRSELFEAFDLFDVQDFGKVIYTLSALSWTPIAQNRGIMPFPTEEESVGDEDIYSGLSDQIDDTVEEDEDLYDCVENEEAEGDEIYEDLMRSEPVSMPPKMTEYDKRCCCLREIQQTEEKYTDTLGSIQQHFLKPLQRFLKPQDIEIIFINIEDLLRVHTHFLKEMKEALGTPGAANLYQVFIKYKERFLVYGRYCSQVESASKHLDRVAAAREDVQMKLEECSQRANNGRFTLRDLLMVPMQRVLKYHLLLQELVKHTQEAMEKENLRLALDAMRDLAQCVNEVKRDNETLRQITNFQLSIENLDQSLAHYGRPKIDGELKITSVERRSKMDRYAFLLDKALLICKRRGDSYDLKDFVNLHSFQVRDDSSGDRDNKKVGL

SEQ ID NO: 752451 - protein, 127 aa, Homo sapiens
MEDDLGRVGWEELTFWAEPESCFMSSEKQSAGLSQATTAAAVWLPMVGALFSFSGPHCLPRKADPGRGEACGSSVPFSLPSMSAGQQESGDWEALSAPMLKSAFVGCMEQPASPSCQCCPVLGLLGP

SEQ ID NO: 752452 - protein, 911 aa, Homo sapiens
ERRRSASPSASQSASPPAQYLSLLGPRKLSAVCLARTAAEALIMATFISVQLKKTSEVDLAKPLVKFIQQTYPSGGEEQAQYCRAAEELSKLRRAAVGRPLDKHEGALETLLRYYDQICSIEPKFPFSENQICLTFTWKDAFDKGSLFGGSVKLALASLGYEKSCVLFNCAALASQIAAEQNLDNDEGLKIAAKHYQFASGAFLHIKETVLSALSREPTVDISPDTVGTLSLIMLAQAQEVFFLKATRDKMKDAIIAKLANQAADYFGDAFKQCQYKDTLPKEVFPVLAAKHCIMQANAEYHQSILAKQQKKFGEEIARLQHAAELIKTVASRYDEYVNVKDFSDKINRALAAAKKDNDFIYHDRVPDLKDLDPIGKATLVKSTPVNVPISQKFTDLFEKMVPVSVQQSLAAYNQRKADLVNRSIAQMREATTLANGVLASLNLPAAIEDVSGDTVPQSILTKSRSVIEQGGIQTVDQLIKELPELLQRNREILDESLRLLDEEEATDNDLRAKFKERWQRTPSNELYKPLRAEGTNFRTVLDKAVQADGQVKECYQSHRDTIVLLCKPEPELNAAIPSANPAKTMQGSEVVNVLKSLLSNLDEVKKEREGLENDLKSVNFDMTSKFLTALAQDGVINEEALSVTELDRVYGGLTTKVQESLKKQEGLLKNIQVSHQEFSKMKQSNNEANLREEVLKNLATAYDNFVELVANLKEGTKFYNELTEILVRFQNKCSDIVFARKTERDELLKDLQQSIAREPSAPSIPTPAYQSSPAGGHAPTPPTPAPRTMPPTKPQPPARPPPPVLPANRAPSATAPSPVGAGTAAPAPSQTPGSAPPPQAQGPPYPTYPGYPGYCQMPMPMGYNPYAYGQYNMPYPPVYHQSPGQAPYPGPQQPSYPFPQPPQQSYYPQQ

SEQ ID NO: 752453 - protein, 615 aa, Homo sapiens
NGPGWYRSECEDQQKKFGEEIARLQHAAELIKTVASRYDEYVNVKDFSDKINRALAAAKKDNDFIYHDRVPDLKDLDPIGKATLVKSTPVNVPISQKFTDLFEKMVPVSVQQSLAAYNQRKADLVNRSIAQMREATTLANGVLASLNLPAAIEDVSGDTVPQSILTKSRSVIEQGGIQTVDQLIKELPELLQRNREILDESLRLLDEEEATDNDLRAKFKERWQRTPSNELYKPLRAEGTNFRTVLDKAVQADGQVKECYQSHRDTIVLLCKPEPELNAAIPSANPAKTMQGSEVVNVLKSLLSNLDEVKKEREGLENDLKSVNFDMTSKFLTALAQDGVINEEALSVTELDRVYGGLTTKVQESLKKQEGLLKNIQVSHQEFSKMKQSNNEANLREEVLKNLATAYDNFVELVANLKEGTKFYNELTEILVRFQNKCSDIVFARKTERDELLKDLQQSIAREPSAPSIPTPAYQSSPAGGHAPTPPTPAPRTMPPTKPQPPARPPPPVLPANRAPSATAPSPVGAGTAAPAPSQTPGSAPPPQAQGPPYPTYPGYPGYCQMPMPMGYNPYAYGQYNMPYPPVYHQSPGQAPYPGPQQPSYPFPQPPQQSYYPQQ

SEQ ID NO: 752454 - protein, 663 aa, Homo sapiens
HSVPLHPVGPLVQSCHGEKKVTYKDLEATSAAFLEVFPVLAAKHCIMQANAEYHQSILAKQQKKFGEEIARLQHAAELIKTVASRYDEYVNVKDFSDKINRALAAAKKDNDFIYHDRVPDLKDLDPIGKATLVKSTPVNVPISQKFTDLFEKMVPVSVQQSLAAYNQRKADLVNRSIAQMREATTLANGVLASLNLPAAIEDVSGDTVPQSILTKSRSVIEQGGIQTVDQLIKELPELLQRNREILDESLRLLDEEEATDNDLRAKFKERWQRTPSNELYKPLRAEGTNFRTVLDKAVQADGQVKECYQSHRDTIVLLCKPEPELNAAIPSANPAKTMQGSEVVNVLKSLLSNLDEVKKEREGLENDLKSVNFDMTSKFLTALAQDGVINEEALSVTELDRVYGGLTTKVQESLKKQEGLLKNIQVSHQEFSKMKQSNNEANLREEVLKNLATAYDNFVELVANLKEGTKFYNELTEILVRFQNKCSDIVFARKTERDELLKDLQQSIAREPSAPSIPTPAYQSSPAGGHAPTPPTPAPRTMPPTKPQPPARPPPPVLPANRAPSATAPSPVGAGTAAPAPSQTPGSAPPPQAQGPPYPTYPGYPGYCQMPMPMGYNPYAYGQYNMPYPPVYHQSPGQAPYPGPQQPSYPFPQPPQQSYYPQQ

SEQ ID NO: 752455 - protein, 678 aa, Homo sapiens
ERRRSASPSASQSASPPAQYLSLLGPRKLSAVCLARTAAEALIMATFISVQLKKTSEVDLAKPLVKFIQQTYPSGGEEQAQYCRAAEELSKLRRAAVGRPLDKHEGALETLLRYYDQICSIEPKFPFSENQICLTFTWKDAFDKGSLFGGSVKLALASLGYEKSCVLFNCAALASQIAAEQNLDNDEGLKIAAKHYQFASGAFLHIKETVLSALSREPTVDISPDTVGTLSLIMLAQAQEVFFLKATRDKMKDAIIAKLANQAADYFGDAFKQCQYKDTLPKEVFPVLAAKHCIMQANAEYHQSILAKQQKKFGEEIARLQHAAELIKTVASRYDEYVNVKDFSDKINRALAAAKKDNDFIYHDRVPDLKDLDPIGKATLVKSTPVNVPISQKFTDLFEKMVPVSVQQSLAAYNQRKADLVNRSIAQMREATTLANGVLASLNLPAAIEDVSGDTVPQSILTKSRSVIEQGGIQTVDQLIKELPELLQRNREILDESLRLLDEEEATDNDLRAKFKERWQRTPSNELYKPLRAEGTNFRTVLDKAVQADGQVKECYQSHRDTIVLLCKPEPELNAAIPSANPAKTMQGSEVVNVLKSLLSNLDEVKKEREGLENDLKSVNFDMTSKFLTALAQDGVINEEALSVTELDRVYGGLTTKVQESLKKQEGLLKNIQLSELL

SEQ ID NO: 752456 - protein, 911 aa, Homo sapiens; identical to SEQ ID NO: 752452

SEQ ID NO: 752457 - protein, 336 aa, Homo sapiens
ELLGSGDPPKVLGLQVVNVLKSLLSNLDEVKKEREGLENDLKSVNFDMTSKFLTALAQDGVINEEALSVTELDRVYGGLTTKVQESLKKQEGLLKNIQVSHQEFSKMKQSNNEANLREEVLKNLATAYDNFVELVANLKEGTKFYNELTEILVRFQNKCSDIVFARKTERDELLKDLQQSIAREPSAPSIPTPAYQSSPAGGHAPTPPTPAPRTMPPTKPQPPARPPPPVLPANRAPSATAPSPVGAGTAAPAPSQTPGSAPPPQAQGPPYPTYPGYPGYCQMPMPMGYNPYAYGQYNMPYPPVYHQSPGQAPYPGPQQPSYPFPQPPQQSYYPQQ

SEQ ID NO: 752458 - protein, 230 aa, Homo sapiens
KQEGLLKNIQVSHQEFSLATAYDNFVELVANLKEGTKFYNELTEILVRFQNKCSDIVFARKTERDELLKDLQQSIAREPSAPSIPTPAYQSSPAGGHAPTPPTPAPRTMPPTKPQPPARPPPPVLPANRAPSATAPSPVGAGTAAPAPSQTPGSAPPPQAQGPPYPTYPGYPGYCQMPMPMGYNPYAYGQYNMPYPPVYHQSPGQAPYPGPQQPSYPFPQPPQQSYYPQQ

SEQ ID NO: 752459 - protein, 578 aa, Homo sapiens
MLSCNICGETVTSEPDMKAHLIVHMESEIICPFCKLSGVNYDEMCFHIETAHFEQNTLERNFERINTVQYGTSDNKKDNTLQCGMEVNSSILSGCASNHPKNSAQNLTKDSTLKHEGFYSENLTESRKFLKSREKQSSLTEIKGSVYETTYSPPECPFCGKIEEHSEDMETHVKTKHANLLDIPLEDCDQPLYDCPMCGLICTNYHILQEHVDLHLEENSFQQGMDRVQCSGDLQLAHQLQQEEDRKRRSEESRQEIEEFQKLQRQYGLDNSGGYKQQQLRNMEIEVNRGRMPPSEFHRRKADMMESLALGFDDGKTKTSGIIEALHRYYQNAATDVRRVWLSSVVDHFHSSLGDKGWGCGYRNFQMLLSSLLQNDAYNDCLKGMLIPCIPKIQSMIEDAWKEGFDPQGASQLNNRLQGTKAWIGACEVYILLTSLRVKCHIVDFHKSTGPLGTHPRLFEWILNYYSSEGEGSPKVVCTSKPPIYLQHQGHSRTVIGIEEKKNRTLCLLILDPGCPSREMQKLLKQDIEASSLKQLRKSMGNLKHKQYQILAVEGALSLEEKLARRQASQVFTAEKIP

SEQ ID NO: 752460 - protein, 354 aa, Homo sapiens
MDRVQCSGDLQLAHQLQQEEDRKRRSEESRQEIEEFQKLQRQYGLDNSGGYKQQQLRNMEIEVNRGRMPPSEFHRRKADMMESLALGFDDGKTKTSGIIEALHRYYQNAATDVRRVWLSSVVDHFHSSLGDKGWGCGYRNFQMLLSSLLQNDAYNDCLKGMLIPCIPKIQSMIEDAWKEGFDPQGASQLNNRLQGTKAWIGACEVYILLTSLRVKCHIVDFHKSTGPLGTHPRLFEWILNYYSSEGEGSPKVVCTSKPPIYLQHQGHSRTVIGIEEKKNRTLCLLILDPGCPSREMQKLLKQDIEASSLKQLRKSMGNLKHKQYQILAVEGALSLEEKLARRQASQVFTAEKIP

SEQ ID NO: 752461 - protein, 228 aa, Homo sapiens
MLSCNICGETVTSEPDMKAHLIVHMESEIICPFCKLSGVNYDEMCFHIETAHFEQNTLERNFERINTVQYGTSDNKKDNTLQCGMEVNSSILSGCASNHPKNSAQNLTKDSTLKHEGFYSENLTESRKFLKSREKQSSLTEIKGSVYETTYSPPECPFCGKIEEHSEDMETHVKTKHANLLDIPLEDCDQPLYDCPMCGLICTNYHILQEHVDLHLEENSFQQVALFK

SEQ ID NO: 752462 - protein, 84 aa, Homo sapiens
PNPRGAGAHLYAAPWIQVIRPQTLQGDRTDETRRCSLRRRDIYRIQISAFSPHLHKAISAFSDEKRAAPAVIHSGAGITFGTRK

SEQ ID NO: 752463 - protein, 120 aa, Homo sapiens
MVDPGEKISATLKREFGEEAMNSLQKSRKEMQELERQLHKLLSQEHFEVYKGYVDDSRNTDNCWIETEAVNYRDEIMDHLPLEAGDDAKKVKWVDINDKLELYASLSQFIQLVAEKRGAH

SEQ ID NO: 752464 - protein, 673 aa, Homo sapiens [sequence omitted]

SEQ ID NO: 752465 - protein, 673 aa, Homo sapiens [sequence omitted]

SEQ ID NO: 752466 - protein, 116 aa, Homo sapiens [sequence omitted]

SEQ ID NO: 752467 - protein, 69 aa, Homo sapiens
PHFDFWVAGNLNQPTDQGPSMGRSLKGQFFLCGLGQVTQALSKSVSSSLKQDFWLGTVAHTYNPSYSGG

SEQ ID NO: 752468 - protein, 85 aa, Homo sapiens
RWLKVNNRSLRLLAKQSGPKCRAESNSVTSLPWKSQIRTEPSMPPVTKSFRGRQTSNEVMSHSCRHFVSLHTKLCFDSEDVRKPS

SEQ ID NO: 752469 - protein, 458 aa, Homo sapiens [sequence omitted]

SEQ ID NO: 752470 - protein, 559 aa, Homo sapiens
QHPESGPCRRGVPRGRNPSPLGVRNDQGPGTSYIQGCLCGLHRGGVRSPGLCSQEAVRSCDAGQLQKLGLGDLNENSVENLQQKTLQDLLHELSSWLVLEGMASTITGSQDCIVNHRGEVDGEPELDISPCQQWGEASSPISRNRDSVMTLQSGCFENIESETYLPLKVSSQIDTQDSSVKFCKNEPQDHQESRRLFVMEESTERKVIKGESCSENLQVKLVSDGQELASPLLNGEATCQNGQLKESLDPIDCNCKDIHGWKSQVVSCSQQRGHTEEKPCDHNNCGKILNTSPDGHPYEKIHTAEKQYEGSQCGKNFSQSSELLLHQRDHTEEKPYKCEQCGKGFTRSSSLLIHQAVHTDEKPYKCDKCGKGFTRSSSLLIHHAVHTGEKPYKCDKCGKGFSQSSKLHIHQRVHTGEKPYECEECGMSFSQRSNLHIHQRVHTGERPYKCGECGKGFSQSSNLHIHRCIHTGEKPYQCYECGKGFSQSSDLRIHLRVHTGEKPYHCGKCGKGFSQSSKLLIHQRVHTGEKPYECSKCGKGFSQSSNLHIHQRVHKKDPR

SEQ ID NO: 752471 - protein, 177 aa, Homo sapiens
QYDITVSDLNQPMLVSLLKKKRNDNSEPQLAHLIPELCFLTGLTDQATSDFQLMKAVAEKTRLSPSGRQQRLARLVDNIQRNTNARFELETWGLHFGSQISLTGRIVPSEKILMQDHICQPVSAADWSKDIRTCKILNAQSLNTWLILCSDRTEYVAESFLNCLRRVAGSMGFNVDY

SEQ ID NO: 752472 - protein, 107 aa, Homo sapiens
CLKEKKRKLVSFLNCIENFINNRSPRESHTAKLSLSANEMYYFQPPLFKNNIIFIPVPFILLCIFESAGCLKISISNLWQSSFCFFDSMTLIFSRGSWCQFEKHPEE

SEQ ID NO: 752473 - protein, 363 aa, Homo sapiens
GDHTPRCPQHPTQVTMASLFSGRILIRNNSDQDELDTEAEVSRRLENRLVLLFFGAGACPQCQAFVPILKDFFVRLTDEFYVLRAAQLALVYVSQDSTEEQQDLFLKDMPKKWLFLPFEDDLRRDLGRQFSVERLPAVVVLKPDGDVLTRDGADEIQRLGTACFANWQEAAEVLDRNFQLPEDLEDQEPRSLTECLRRHKSDWFLYDCRLLRHVALGLFCCGISVYLAALSIYALLLFEIETGAAAASILGSGTLVLVAVLTHTLLRAARAARRGLHELSPPSFEDDLARPAEVSKASPRAQPQQGIHRRTPYSTCPEPGDPFGSMATATAPAALEGGWESSLPASRMHRTLSAGLGHWDGVT

SEQ ID NO: 752474 - protein, 73 aa, Homo sapiens
LVYVSQDSTEEQQDLFLKDMPKKWLFLPFEDDLRSEEGQGGLPGGGGMFAESEASILTRVNEQPLCASPYTGN

SEQ ID NO: 752475 - protein, 227 aa, Homo sapiens
GDHTPRCPQHPTQVTMASLFSGRILIRNNSDQDELDTEAEVSRRLENRLVLLFFGAGACPQCQAFVPILKDFFVRLTDEFYVLRAAQLALVYVSQDSTEEQQDLFLKDMPKKWLFLPFEDDLRRDLGRQFSVERLPAVVVLKPDGDVLTRDGADEIQRLGTACFANWQEAAEVLDRNFQLPEDLEDQEPRSLTECLRRHKYRVEKAARGGRDPGGGGGEEGGAGGLF

SEQ ID NO: 752476 - protein, 101 aa, Homo sapiens
GQELGAGPGLPEDAAGTLLPLAAALAALVLVLGFTCLLLAALCGHLGAELARGPGPRRSDWFLYDCRLLRHVALGLFCCGISVYLAGVCWNRTWGMGPWAG

SEQ ID NO: 752477 - protein, 507 aa, Homo sapiens
CGAVTGPAAPRLPPSPQPRRPRALSFPALPCLAFQCSSFCEMTLKASEGESGGSMHTALSDLYLEHLLQKRSRPEAVSHPLNTVTEDMYTNGSPAPGSPAQVKGQEVRKVRLIQFEKVTEEPMGITLKLNEKQSCTVARILHGGMIHRQGSLHVGDEILEINGTNVTNHSVDQLQKAMKETKGMISLKVIPNQQSRLPALQMFMRAQFDYDPKKDNLIPCKEAGLKFATGDIIQIINKDDSNWWQGRVEGSSKESAGLIPSPELQEWRVASMAQSAPSEAPSCSPFGKKKKYKDKYLAKHSSIFDQLDVVSYEEVVRLPAFKRKTLVLIGASGVGRSHIKNALLSQNPEKFVYPVPYTTRPPRKSEEDGKEYHFISTEEMTRNISANEFLEFGSYQGNMFGTKFETVHQIHKQNKIAILDIEPQTLKIVRTAELSPFIVFIAPTDQGTQTEALQQLQKDSEAIRSQYAHYFDLSLVNNGVDETLKKLQEAFDQACSSPQWVPVSWVY

SEQ ID NO: 752478 - protein, 244 aa, Homo sapiens
CGAVTGPAAPRLPPSPQPRRPRALSFPALPCLAFQCSSFCEMTLKASEGESGGSMHTALSDLYLEHLLQKRSRPEMFMRAQFDYDPKKDNLIPCKEAGLKFATGDIIQIINKDDSNWWQGRVEGSSKESAGLIPSPELQEWRVASMAQSAPSEAPSCSPFGKKKKYKDKYLAKHSSIFDQLDVVSYEEVVRLPAFKRKTLVLIGASGVGRSHIKNALLSQNPEKFVYPVPYTTRPRRFRGPLES

SEQ ID NO: 752479 - protein, 67 aa, Homo sapiens
  misc_feature (29)..(29): Xaa can be any naturally occurring amino acid
GPPTPGLWNGYLSPGPVRKLGPHSQKSEXSPALNITALSFTLPIKSVVALDYHRSTNPYCETVLHVI

SEQ ID NO: 752480 - protein, 478 aa, Homo sapiens
MTASNGQTLTGREVEESRHAARQSLSDLTKLGAIMADDEDCYVVTEAVSHPLNTVTEDMYTNGSPAPGSPAQVKGQEVRKVRLIQFEKVTEEPMGITLKLNEKQSCTVARILHGGMIHRQGSLHVGDEILEINGTNVTNHSVDQLQKAMKETKGMISLKVIPNQQSRLPALQMFMRAQFDYDPKKDNLIPCKEAGLKFATGDIIQIINKDDSNWWQGRVEGSSKESAGLIPSPELQEWRVASMAQSAPSEAPSCSPFGKKKKYKDKYLAKHSSIFDQLDVVSYEEVVRLPAFKRKTLVLIGASGVGRSHIKNALLSQNPEKFVYPVPYTTRPPRKSEEDGKEYHFISTEEMTRNISANEFLEFGSYQGNMFGTKFETVHQIHKQNKIAILDIEPQTLKIVRTAELSPFIVFIAPTDQGTQTEALQQLQKDSEAIRSQYAHYFDLSLVNNGVDETLKKLQEAFDQACSSPQWVPVSWVY

SEQ ID NO: 752481 - protein, 482 aa, Homo sapiens
CGAVTGPAAPRLPPSPQPRRPRALSFPALPCLAFQCSSFCEMTLKASEGESGGSMHTALSDLYLEHLLQKRSRPEAVSHPLNTVTEDMYTNGSPAPGSPAQVKGQEVRKVRLIQFEKVTEEPMGITLKLNEKQSCTVARILHGGMIHRQGSLHVGDEILEINGTNVTNHSVDQLQKAMKETKGMISLKVIPNQQSRLPALQMFMRAQFDYDPKKDNLIPCKEAGLKFATGDIIQIINKDDSNWWQGRVEGSSKESAGLIPSPELQEWRVASMAQSAPSEAPSCSPFGKKKKYKDKYLAKHSSIFDQLDVVSYEEVVRLPAFKRKTLVLIGASGVGRSHIKNALLSQNPEKFVYPVPYTTRPPRKSEEDGKEYHFISTEEMTRNISANEFLEFGSYQGNMFGTKFETVHQIHKQNKIAILDIEPQTEALQQLQKDSEAIRSQYAHYFDLSLVNNGVDETLKKLQEAFDQACSSPQWVPVSWVY

SEQ ID NO: 752482 - protein, 507 aa, Homo sapiens; identical to SEQ ID NO: 752477

SEQ ID NO: 752483 - protein, 215 aa, Homo sapiens [sequence omitted]

SEQ ID NO: 752484 - protein, 128 aa, Homo sapiens [sequence omitted]

SEQ ID NO: 752485 - protein, 507 aa, Homo sapiens; identical to SEQ ID NO: 752477

SEQ ID NO: 752486 - protein, 370 aa, Homo sapiens
CGAVTGPAAPRLPPSPQPRRPRALSFPALPCLAFQCSSFCEMTLKASEGESGGSMHTALSDLYLEHLLQKRSRPEAVSHPLNTVTEDMYTNGSPAPGSPAQVKGQEVRKVRLIQFEKVTEEPMGITLKLNEKQSCTVARILHGGMIHRQGSLHVGDEILEINGTNVTNHSVDQLQKAMKETKGMISLKVIPNQQSRLPALQMFMRAQFDYDPKKDNLIPCKEAGLKFATGDIIQIINKDDSNWWQGRVEGSSKESAGLIPSPELQEWRVASMAQSAPSEAPSCSPFGKKKKYKDKYLAKHSSIFDQLDVVSYEEVVRLPAFKRKTLVLIGASGVGRSHIKNALLSQNPEKFVYPVPYTTRPRRFRGPLES

SEQ ID NO: 752487 - protein, 260 aa, Homo sapiens
CGAVTGPAAPRLPPSPQPRRPRALSFPALPCLAFQCSSFCEMTLKASEGESGGSMHTALSDLYLEHLLQKRSRPEAVSHPLNTVTEDMYTNGSPAPGSPAQVKGQEVRKVRLIQFEKVTEEPMGITLKLNEKQSCTVARILHGGMIHRQGSLHVGDEILEINGTNVTNHSVDQLQKAMKETKGMISLKVIPNQQSRLPALQMFMRAQFDYDPKKDNLIPCKEAGLKFATGDIIQIINKDDSNWWQGRVEGSSKGKFQQGI

SEQ ID NO: 752488 - protein, 174 aa, Homo sapiens
CGAVTGPAAPRLPPSPQPRRPRALSFPALPCLAFQCSSFCEMTLKASEGESGGSMHTALSDLYLEHLLQKRSRPEAVSHPLNTVTEDMYTNGSPAPGSPAQVKGQEVRKVRLIQFEKVTEEPMGITLKLNEKQSCTVARILHGGMIHRQGTLWELWVGFDSGINNLLPVQWCGA

SEQ ID NO: 752489 - protein, 507 aa, Homo sapiens; identical to SEQ ID NO: 752477

SEQ ID NO: 752490 - protein, 490 aa, Homo sapiens
CGAVTGPAAPRLPPSPQPRRPRALSFPALPCLAFQCSSFCEMTLKASEGESGGSMHTALSDLYLEHLLQKRSRPEAVSHPLNTVTEDMYTNGSPAPGSPAQVKGQEGITLKLNEKQSCTVARILHGGMIHRQGSLHVGDEILEINGTNVTNHSVDQLQKAMKETKGMISLKVIPNQQSRLPALQMFMRAQFDYDPKKDNLIPCKEAGLKFATGDIIQIINKDDSNWWQGRVEGSSKESAGLIPSPELQEWRVASMAQSAPSEAPSCSPFGKKKKYKDKYLAKHSSIFDQLDVVSYEEVVRLPAFKRKTLVLIGASGVGRSHIKNALLSQNPEKFVYPVPYTTRPPRKSEEDGKEYHFISTEEMTRNISANEFLEFGSYQGNMFGTKFETVHQIHKQNKIAILDIEPQTLKIVRTAELSPFIVFIAPTDQGTQTEALQQLQKDSEAIRSQYAHYFDLSLVNNGVDETLKKLQEAFDQACSSPQWVPVSWVY

SEQ ID NO: 752491 - protein, 402 aa, Homo sapiens
MYTNGSPAPGSPAQVKGQEVRKVRLIQFEKVTEEPMGITLKLNEKQSCTVARILHGGMIHRQGSLHVGDEILEINGTNVTNHSVDQLQKAMKETKGMISLKVIPNQQSRLPALQMFMRAQFDYDPKIIQIINKDDSNWWQGRVEGSSKESAGLIPSPELQEWRVASMAQSAPSEAPSCSPFGKKKKYKDKYLAKHSSIFDQLDVVSYEEVVRLPAFKRKTLVLIGASGVGRSHIKNALLSQNPEKFVYPVPYTTRPPRKSEEDGKEYHFISTEEMTRNISANEFLEFGSYQGNMFGTKFETVHQIHKQNKIAILDIEPQTLKIVRTAELSPFIVFIAPTDQGTQTEALQQLQKDSEAIRSQYAHYFDLSLVNNGVDETLKKLQEAFDQACSSPQWVPVSWVY

SEQ ID NO: 752492 - protein, 178 aa, Homo sapiens
MFPRIDGSQAPNALLSQNPEKFVYPVPYTTRPPRKSEEDGKEYHFISTEEMTRNISANEFLEFGSYQGNMFGTKFETVHQIHKQNKIAILDIEPQTLKIVRTAELSPFIVFIAPTDQGTQTEALQQLQKDSEAIRSQYAHYFDLSLVNNGVDETLKKLQEAFDQACSSPQWVPVSWVY

SEQ ID NO: 752493 - protein, 482 aa, Homo sapiens; identical to SEQ ID NO: 752481

SEQ ID NO: 752494 - protein, 135 aa, Homo sapiens
EWVLLRTTVVAAAAFLDAFQKVADMATNTRGGTRKIGSALTRMCMRHRSIEAKLRQFSSALIDCLINPLRNYKKPSTKRAVLHSGCLSPGFTKLVEWGNPLYAPLQHLEFHPPCFKTNRAAPTSFVSASSSLQLS

SEQ ID NO: 752495 - protein, 94 aa, Homo sapiens
AASDGAGAPKGTQFCKCWKNCKLGLAPPRMNAAAEVQRHCWVAQEQETGRSQFYLSPPPSQSLYGTPWWRSLTWNPVVKSSPSPSPSPSPSLGN

SEQ ID NO: 752496 - protein, 39 aa, Homo sapiens
KHFGLLETALEEEDLASCKSPEYDTVFEDSSSSSGESSF

SEQ ID NO: 752497 - protein, 248 aa, Homo sapiens
MICTFLRAVQYTEKLHRSSAKRLLLPYIVLNKACLKTEPSLRCGLQYQKKTLRPRCILGVTQKTIWTQGPSPRKAKEDGSKQVSVHRSQRGGTAVPTSQKVKEAGRDFTYLIVVLFGISITGGLFYTIFKELFSSSSPSKIYGRALEKCRSHPEVIGVFGESVKGYGEVTRRGRRQHVRFTEYVKDGLKHTCVKFYIEGSEPGKQGTVYAQVKENPGSGEYDFRYIFVEIESYPRRTIIIEDNRSQDD

SEQ ID NO: 752498 - protein, 248 aa, Homo sapiens; identical to SEQ ID NO: 752497

SEQ ID NO: 752499 - protein, 133 aa, Homo sapiens
MICTFLRAVQYTEKLHRSSAKRLLLPYIVLNKACLKTEPSLRCGLQYQKKTLRPRCILGVTQKTIWTQGPSPRKAKEDGSKQVSVHRSQRGGTAVPTSQKVKEAGRDFTYLIVVLFGISITAKNSKYKPLNIF

SEQ ID NO: 752500 - protein, 133 aa, Homo sapiens; identical to SEQ ID NO: 752499

SEQ ID NO: 752501 - protein, 248 aa, Homo sapiens; identical to SEQ ID NO: 752497

SEQ ID NO: 752502 - protein, 248 aa, Homo sapiens; identical to SEQ ID NO: 752497

SEQ ID NO: 752503 - protein, 248 aa, Homo sapiens; identical to SEQ ID NO: 752497

SEQ ID NO: 752504 - protein, 244 aa, Homo sapiens
MIATVQYTEKLHRSSAKRLLLPYIVLNKACLKTEPSLRCGLQYQKKTLRPRCILGVTQKTIWTQGPSPRKAKEDGSKQVSVHRSQRGGTAVPTSQKVKEAGRDFTYLIVVLFGISITGGLFYTIFKELFSSSSPSKIYGRALEKCRSHPEVIGVFGESVKGYGEVTRRGRRQHVRFTEYVKDGLKHTCVKFYIEGSEPGKQGTVYAQVKENPGSGEYDFRYIFVEIESYPRRTIIIEDNRSQDD

SEQ ID NO: 752505 - protein, 133 aa, Homo sapiens [sequence omitted]

SEQ ID NO: 752506 - protein, 38 aa, Homo sapiens
MHPKSWHRDCSTKASVLLCMFEIFHNKMKNGKMGKQKW

SEQ ID NO: 752507 - protein, 142 aa, Homo sapiens
PRLPRLRMLAALSPQSLAPVSPQIRVGTTSPAGGFQPRRGPGRRNGTERESVPARWPGGAGLREPPARQQKRRRRQHPPRSAPALGVAAAGRHECYYSERRCRSIALSQWQGATGLILRAVRGVHLSPAASPAHPAAGTRGR

SEQ ID NO: 752508 - protein, 84 aa, Homo sapiens
LTAGKNTLFAPENTKTDTVAVGQLRVPAVVSGAEREAELGVCRSGPLGPPAPKAWPVASSILTVLPRPRPVGPPAHDRHRWRRF

SEQ ID NO: 752509 - protein, 69 aa, Homo sapiens
MLRKERSRASEPTGGNSYSRGPRKLLRKLPGRQGGRDHGDGEKDPEELRNPCCGRHHMSCVKSESKANP

SEQ ID NO: 752510 - protein, 68 aa, Homo sapiens
VDGHTHSVTHQPDHCSLSGLTNLSISSQGPVVLYTISLPAALPPGLDLSEDETTFPALWEPLVLCRVA

SEQ ID NO: 752511 - protein, 123 aa, Homo sapiens
FENFKIMNAAVACLQDKKPALGNRQEHSGPRTAPSPACPASSGAEVQGYQQQPRHAPPRPRTQAAGASPPCQTTSCRHSHHPWTTQSSRRPWTSCSLPPRSPRGLLMPHPRKRHEASMFRSSK

SEQ ID NO: 752512 - protein, 70 aa, Homo sapiens
MGTTLNCRMCTKASPSQGRHKVSAEPACGSDVYKCAYNEGAGCDIQEQRHPEHAAPAASCKWGLLRMRRV

SEQ ID NO: 752513 - protein, 131 aa, Homo sapiens
MPQAAHSVSAVLEKAQTHAETSKDKKPALGNRQEHSGPRTAPSPACPASSGAEVQGYQQQPRHAPPRPRTQAAGASPPCQTTSCRHSHHPWTTQSSRRPWTSCSLPPRSPRGLLMPHPRKRHEASMFRSSK

SEQ ID NO: 752514 - protein, 94 aa, Homo sapiens
NFVCEHCFGAFRSSYHLKRHILIHTGEKPFECDICDMRFIQKYHLERHKRVHSGEKPYQCERCHQCFSRTDRLLRHKRMCQGCQSKTSDGQFSL

SEQ ID NO: 752515 - protein, 94 aa, Homo sapiens; identical to SEQ ID NO: 752514

SEQ ID NO: 752516 - protein, 108 aa, Homo sapiens [sequence omitted]

SEQ ID NO: 752517 - protein, 103 aa, Homo sapiens
NFVCEHCFGAFRSSYHLKRHILIHTGEKPFECDICDMRFIQKYHLERHKRVHSGEKPYQCERCHQVRLIPATIPHTHFSFPKNQGHPPLLPDKRATSVTRHNS

SEQ ID NO: 752518 - protein, 94 aa, Homo sapiens; identical to SEQ ID NO: 752514

SEQ ID NO: 752519 - protein, 289 aa, Homo sapiens
WSRWARYEVGKHPTTHPTTYPFIHPPICQRIHPSTHPIIYPLTYPPIHLPICHPSTHPSIQSPIQPSIQPFSSVHFPSIYPSTHSLLHPPTYPFIIHLPTHPSIHPSNHLSTHPTISICSFPSIYPSTHSLIRPPIHLSPIYPSIHPLIHPFIHPPTHPSIHLPIHLSPIHPHTGLCRFINIHPCIHIYLFSIHQPSIHSYPSIHLSIQMFIEHLCSGSYLGALLTTKTFLSHIVVYRQIQKKRLSPCLISCSLPWRQDSPSAVCLERGKHTALESETWVSILSPPLIS

SEQ ID NO: 752520 - protein, 239 aa, Homo sapiens
LDEARVKIGRGSTIYPPIQLFPSVHFPPIYPSTNSLIHPPTYPFIIHLPTHPSIHPSNHLSTHPTISICSFPSIYPSTHSLIRPPIHLSPIYPSIHPLIHPFIHPPTHPSIHLPIHLSPIHPHTGLCRFINIHPCIHIYLFSIHQPSIHSYPSIHLSIQMFIEHLCSGSYLGALLTTKTFLSHIVVYRQIQKKRLSPCLISCSLPWRQDSPSAVCLERGKHTALESETWVSILSPPLIS

SEQ ID NO: 752521 - protein, 157 aa, Homo sapiens
WSRWARYEVGKHPTTHPTTYPFIHPPICQRIHPSTHPIIYPLTYPPIHLPICHPSTHPSIQSPIQPSIQPFSSVHFPSIYPSTHSLLHPPTYPFIIHLPTHPSIHPSNHLSTHPTISICSFPSIYPSTHSLIRPPIHLSPIYPSIHPTKGDDTKSSR

SEQ ID NO: 752522 - protein, 69 aa, Homo sapiens
EESFQAVAYGGEIQAESGGFFELRKPSWEFPEAKADGIHWTEHHKGESSTESALEAYRWSPFSIQLSAD

SEQ ID NO: 752523 - protein, 98 aa, Homo sapiens
PFFQTTAMMAPDARTSTTGSWRLQPYTLAEQKGGKAGLGSGRGVAGRAAGGCWGRVDGSLDIWVLGPGLLPETTVCLWGEFCVSPAPEDRLKALQGPG

SEQ ID NO: 752524 - protein, 106 aa, Homo sapiens
VYWKQLHSQVRCFFSLKISKLKAFIRGPSNGQAPPATKSQTSKSRRNCLLPNPSLLSWGRGFFLQGPWASCCWAWAYRLPCPFFPNTEKTPLEMTPKPRLLYGPKQ

SEQ ID NO: 752525 - protein, 107 aa, Homo sapiens
PVHWHARGACACVWTPCEFPFLSVVVVVLSMWLSYCVSPLSLFSGSPMFSLHVGPFGMFSAFRCVWVTQSWVNKPCGWGGATSPRPLTNSVPLGARQPLAVVLLFWI

SEQ ID NO: 752526 - protein, 106 aa, Homo sapiens
ETDSSFVTQAGVQWGNLSSLQPLPPGFKQFFCLSLLSTGTTGAHHHAQLIFVFLVETGVHHVGQAGLELLTSGDPPALASESAGITGMSHHAWLRSLFSVFSQVIS

SEQ ID NO: 752527 - protein, 199 aa, Homo sapiens
  misc_feature (141)..(141): Xaa can be any naturally occurring amino acid
  misc_feature (146)..(146): Xaa can be any naturally occurring amino acid
PGTLTGSPLQSLRSHFEQWGTLTDCVVMRDPNTKRSRGFGFVTYATVEEVDAAMNARPHKVDGRVVEPKRAVSREDSQRPGAHLTVKKIFVGGIKEDTEEHHLRDYFEQYLPLEPMTTMTAWIRWQSEISSVNGLHCEVEXPCQAXDASASPVIDVEMDLETFELVSECVFECTTIKSLRKLQGSKCFSRRLVIRIRGP

SEQ ID NO: 752528 - protein, 187 aa, Homo sapiens
MASASSSQRGRSGSGNFGGGRGGGFGGNDNFGRGGNFSGRGGFGGSRGGGGYGGSGDGYNGFGNDGGYGGGGPGYSGGSRGYGSGGQGYGNQGSGYGGSGSYDSYNNGGGGGFGGGSGSNFGGGGSYNDFGNYNNQSSNFGPMKGGNFGGRSSGPYGGGGQYFAKPRNQGGYGGSSSSSSYGSGRRF

SEQ ID NO: 752529 - protein, 131 aa, Homo sapiens
MSKSESPKEPEQLRKLFIGGLSFETTDESLRSHFEQWGTLTDCVVMRDPNTKRSRGFGFVTYATVEEVDAAMNARPHKVDGRVVEPKRAVSREDSQRPGAHLTVKKIFVGGIKEDTEEHHLRDYFEQYGKH

SEQ ID NO: 752530 - protein, 187 aa, Homo sapiens; identical to SEQ ID NO: 752528

SEQ ID NO: 752531 - protein, 187 aa, Homo sapiens; identical to SEQ ID NO: 752528

SEQ ID NO: 752532 - protein, 131 aa, Homo sapiens; identical to SEQ ID NO: 752529

SEQ ID NO: 752533 - protein, 187 aa, Homo sapiens; identical to SEQ ID NO: 752528

SEQ ID NO: 752534 - protein, 131 aa, Homo sapiens; identical to SEQ ID NO: 752529

SEQ ID NO: 752535 - protein, 131 aa, Homo sapiens; identical to SEQ ID NO: 752529

SEQ ID NO: 752536 - protein, 187 aa, Homo sapiens; identical to SEQ ID NO: 752528

SEQ ID NO: 752537 - protein, 131 aa, Homo sapiens; identical to SEQ ID NO: 752529

SEQ ID NO: 752538 - protein, 149 aa, Homo sapiens
MLLGFVPCTSPFYSSFGRCHGLPSPKEPEQLRKLFIGGLSFETTDESLRSHFEQWGTLTDCVVMRDPNTKRSRGFGFVTYATVEEVDAAMNARPHKVDGRVVEPKRAVSREDSQRPGAHLTVKKIFVGGIKEDTEEHHLRDYFEQYGKH

SEQ ID NO: 752539 - protein, 135 aa, Homo sapiens
MASASSSQRGRSGSGNFGGGRGGGFGGNDNFGRGGNFSGRGGFGGSRGGGGYGGSGDGYNGFGNDGSNFGGGGSYNDFGNYNNQSSNFGPMKGGNFGGRSSGPYGGGGQYFAKPRNQGGYGGSSSSSSYGSGRRF

SEQ ID NO: 752540 - protein, 131 aa, Homo sapiens; identical to SEQ ID NO: 752529

SEQ ID NO: 752541 - protein, 135 aa, Homo sapiens; identical to SEQ ID NO: 752539

SEQ ID NO: 752542 - protein, 131 aa, Homo sapiens; identical to SEQ ID NO: 752529

SEQ ID NO: 752543 - protein, 164 aa, Homo sapiens
MTYRAHILQKYHTVNGHNCEVRKALSKQEMASASSSQRGRSGSGNFGGGRGGGFGGNDNFGRGGNFSGRGGFGGSRGGGGYGGSGDGYNGFGNDGSNFGGGGSYNDFGNYNNQSSNFGPMKGGNFGGRSSGPYGGGGQYFAKPRNQGGYGGSSSSSSYGSGRRF

SEQ ID NO: 752544 - protein, 131 aa, Homo sapiens; identical to SEQ ID NO: 752529

SEQ ID NO: 752545 - protein, 154 aa, Homo sapiens
MDSSPLEGEGRLADTFVSLLLSARGRRRRSIVKVSLHPAVMSKSESPKEPEQLRKLFIGGLSFETTDESLRSHFEQWGTLTDCVVMRDPNTKRSRGFGFVTYATVEEVDAAMTMTAITTEAEAALAVVVEAILEVVEATMILGITTISLQILDP

SEQ ID NO: 752546 - protein, 118 aa, Homo sapiens
MSKSESPKEPEQLRKLFIGGLSFETTDESLRSHFEQWGTLTDCVVMRDPNTKRSRGFGFVTYATVEEVDAAMNARPHKVDGRVVEPKRAVSREEAILEVVEATMILGITTISLQILDP

SEQ ID NO: 752547 - protein, 131 aa, Homo sapiens; identical to SEQ ID NO: 752529

SEQ ID NO: 752548 - protein, 131 aa, Homo sapiens; identical to SEQ ID NO: 752529

SEQ ID NO: 752549 - protein, 131 aa, Homo sapiens; identical to SEQ ID NO: 752529

SEQ ID NO: 752550 - protein, 31 aa, Homo sapiens
MLLGFVPCTSPFYSSFGRCHGLPLPKFKSPF

SEQ ID NO: 752551 - protein, 131 aa, Homo sapiens; identical to SEQ ID NO: 752529

SEQ ID NO: 752552 - protein, 131 aa, Homo sapiens; identical to SEQ ID NO: 752529

SEQ ID NO: 752553 - protein, 131 aa, Homo sapiens; identical to SEQ ID NO: 752529

SEQ ID NO: 752554 - protein, 131 aa, Homo sapiens; identical to SEQ ID NO: 752529

SEQ ID NO: 752555 - protein, 135 aa, Homo sapiens; identical to SEQ ID NO: 752539

SEQ ID NO: 752556 - protein, 131 aa, Homo sapiens; identical to SEQ ID NO: 752529

SEQ ID NO: 752557 - protein, 131 aa, Homo sapiens; identical to SEQ ID NO: 752529

SEQ ID NO: 752558 - protein, 131 aa, Homo sapiens; identical to SEQ ID NO: 752529

SEQ ID NO: 752559 - protein, 146 aa, Homo sapiens
MFLYKASYVMFAKVEVVLETLVVVVEVVSVGMTTSVVEETSVVVVALVAAVVVVDMVAVGMAIMDLVMMVVMEEAALVTLEEAEAMEVVDRVMETRAVAMAGVAAMTAITTEAEAALAVVVEAILEVVEATMILGITTISLQILDP

SEQ ID NO: 752560 - protein, 108 aa, Homo sapiens
MTFHVELQLRQDCRLASAECRGMRYGGSGDGYNGFGNDGSNFGGGGSYNDFGNYNNQSSNFGPMKGGNFGGRSSGPYGGGGQYFAKPRNQGGYGGSSSSSSYGSGRRF

SEQ ID NO: 752561 - protein, 117 aa, Homo sapiens
MGRSKDPLFVCYGSGGQGYGNQGSGYGGSGSYDSYNNGGGGGFGGGSGSNFGGGGSYNDFGNYNNQSSNFGPMKGGNFGGRSSGPYGGGGQYFAKPRNQGGYGGSSSSSSYGSGRRF

SEQ ID NO: 752562 - protein, 131 aa, Homo sapiens; identical to SEQ ID NO: 752529

SEQ ID NO: 752563 - protein, 115 aa, Homo sapiens
MDSSPLEGEGRLADTFVSLLLSARGRRRRSIVKVSLHPAVMSKSESPKEPEQLRKLFIGGLSFETTDESLRSHFEQWGTLTDCVVMRDPNTKRSRGFGFVTYATVEEVDAAMNMF

SEQ ID NO: 752564 - protein, 201 aa, Homo sapiens
MDSSPLEGEGRLADTFVSLLLSARGRRRRSIVKVSLHPAVMSKSESPKEPEQLRKLFIGGLSFETTDESLRSHFEQWGTLTDCVVMRDPNTKRSRGFGFVTYATVEEVDAAMNARPHKVDGRVVEPKRAVSREDSQRPGAHLTVKKIFVGGIKEDTEEHHLRDYFEQYYDSYNNGGGGGFGGGSGRYPVIQVLGVTARLAF

SEQ ID NO: 752565 - protein, 105 aa, Homo sapiens
MSIYFPIHCPDYLRSAKMTEVMMNTQPMEEIGLSPRKDGLSYQIFPDPSDFDRCCKLKDRLPSIVVEPTEGEVESGELRWPPEEFLVQEDEQDNCEETAKENKEQ

SEQ ID NO: 752566 - protein, 105 aa, Homo sapiens; identical to SEQ ID NO: 752565

SEQ ID NO: 752567 - protein, 105 aa, Homo sapiens; identical to SEQ ID NO: 752565

SEQ ID NO: 752568 - protein, 117 aa, Homo sapiens
MSIYFPIHCPDYLRSAKMTEVMMNTQPMEEIGLSPRKDGLSYQIFPDPSDFDRCCKLKDRLPSIVVEPTEGEVESGELRWPPEEFLVQEDEQDNCEETAKENKEQYRVAKRWTQSLP

SEQ ID NO: 752569 - protein, 105 aa, Homo sapiens; identical to SEQ ID NO: 752565

SEQ ID NO: 752570 - protein, 109 aa, Homo sapiens
  misc_feature (98)..(98): Xaa can be any naturally occurring amino acid
MRTGTRMPLLALLFNVVLEVLARAIRQQQEIKAIQIGKKDELSLFMDYMILYLKNPKDYTIRLLELIGNYNKVSGYKINVQKSAVTFNLRGPKTGNHXSHFLPLGPTKI

SEQ ID NO: 752571 - protein, 68 aa, Homo sapiens
WSGWGSGGTWGLGPWTCPRTWNQGMVGGELFAWETWILLTRREWKWRPPESAAPGPPASLCLMGRWGN

SEQ ID NO: 752572 - protein, 441 aa, Homo sapiens
WWIINPDGGKSGKAPRRRAVSMDNSNKYTKSRGRTAKKKAALQTAPESADDSPSQLSKWSGSPTSRSSDELDAWTDFRSRTNSNASTVSGRLSPIMASTELDEVQDDDAPLSPMLYSSSASLSPSVSKPCTVELLRLTDMAGTMNLNDGADENLMDDLLDNITLPPSQPSPTGGLMQRSSSFPYTTKGSGLSSPTSSFNSTVFGPSSLNSLRQSPMQTIQENKPATFSSMSHYGNQTLQDLLTSDSLSHSDVMMTQSDPLMSQASTAVSAQNSRRNVMLRNDPMMSFAAQPNQGSVVNQNLLHHQHQTQGALGGSRALSNSVSNMGLSESSSLGSAKHQQQSPVSQSMQTLSDSLSGSSLYSTSANLPVMGHEKFPSDLDLDMFNGSLECDMESIIRSELMDADGLDFNFDSLISTQNVVGLNVGNFTGAKQASSQSWVPG

SEQ ID NO: 752573 - protein, 101 aa, Homo sapiens
RRHSFGAIATEEREFGLGSGHRWKFLLPFGAPGHRGEDSGSCGPQASSSPFFCFKEGLRGSGGLKSTVFEMGVMKRVPRKNVLAFDSHRLSGRFPFREGAC

SEQ ID NO: 752574 - protein, 123 aa, Homo sapiens
CHHAWLIFVFLVETEFHHVGQAGLELLTSGNPPASVSPSAGIAGVSLCARHEASLREFPLFKFSELLKFHNILLLGLLNLACILSFMPNCRIFHYSVYQSVPFQLCPGAGHYCTRQLSSYKIL

SEQ ID NO: 752575 - protein, 51 aa, Homo sapiens
TPGFLAGRGSAVPETLKELALRLLGNTPLTRIANFLLALSLSHRGSLATSF

SEQ ID NO: 752576 - protein, 108 aa, Homo sapiens
MVSTGPAHRALRDLSRPSSYLTEASPGRFSLSSGSGDRSAPPPQWPRLGRSCLLQPLKAQLLPLSGFCAPKCPPVSLSWLSSCDLAELLPPVGLYKPSLCCMVASSGP

SEQ ID NO: 752577 - protein, 405 aa, Homo sapiens
AGPLVFMSARGRWEGGGRRACRGSLGLARAQGAERVTSSEQRPAMASLGLLLLLLLTALPPLWSSSLPGLDTAESKATIADLILSALERATVFLEQRLPEINLDGMVGVRVLEEQLKSVREKWAQEPLLQPLSLRVGMLGEKLEAAIQRSLHYLKLSDPKYLREFQLTLQPGFWKLPHAWIHTDASLVYPTFGPQDSFSEERSDVCLVQLLGTGTDSSEPCGLSDLCRSLMTKPGCSGYCLSHQLLFFLWARMRGCTQGPLQQSQDYINLFCANMMDLNRRAEAIGYAYPTRDIFMENIMFCGMGGFSDFYKLRWLEAILSWQKQQEGCFGEPDAEDEELSKAIQYQQHFSRRVKRREKQFPDGCSSHNTATAVAALGGFLYILAEYPPANREPHPSTPPPPSSR

SEQ ID NO: 752578 - protein, 388 aa, Homo sapiens
  misc_feature (8)..(8): Xaa can be any naturally occurring amino acid
SGWYRPGXMDARAQGAERVTSSEQRPAMASLGLLLLLLLTALPPLWSSSLPGLDTAESKATIADLILSALERATVFLEQRLPEINLDGMVGVRVLEEQLKSVREKWAQEPLLQPLSLRVGMLGEKLEAAIQRSLHYLKLSDPKYLREFQLTLQPGFWKLPHAWIHTDASLVYPTFGPQDSFSEERSDVCLVQLLGTGTDSSEPCGLSDLCRSLMTKPGCSGYCLSHQLLFFLWARMRGCTQGPLQQSQDYINLFCANMMDLNRRAEAIGYAYPTRDIFMENIMFCGMGGFSDFYKLRWLEAILSWQKQQEGCFGEPDAEDEELSKAIQYQQHFSRRVKRREKQFPDGCSSHNTATAVAALGGFLYILAEYPPANREPHPSTPPPPSSR

SEQ ID NO: 752579 - protein, 388 aa, Homo sapiens
AGPLVFMSARGRWEGGGRRACRGSLGLARAQGAERVTSSEQRPAMASLGLLLLLLLTALPPLWSSSLPGLDTAESKATIADLILSALERATVFLEQRLPEINLDGMVGVRVLEEQLKSVREKWAQEPLLQPLSLRVGMLGEKLEAAIQRSLHYLKLSDPKYLREFQLTLQPGFWKLPHAWIHTDASLVYPTFGPQDSFSEERSDVCLVQLLGTGTDSSEPCGLSDLCRSLMTKPGCSGYCLSHQLLFFLWARMRGCTQGPLQQSQDYINLFCANMMDLNRRAEAIGYAYPTRDIFMENIMFCGMGGFSDFYKLRWLEAILSWQKQQEGCFGEPDAEDEELSKAIQYQQHFSRRVKRREKQFPDGCSSHNTATAVAALGGFLYILAESL

SEQ ID NO: 752580 - protein, 381 aa, Homo sapiens
AGPLVFMSARGRWEGGGRRACRGSLGLARAQGAERVTSSEQRPAMASLGLLLLLLLTALPPLWSSSLPGLDTAESKATIADLILSALERATVFLEQRLPEINLDGMVGVRVLEEQLKSVREKWAQEPLLQPLSLRVGMLGEKLEAAIQRSLHYLKLSDPKYLREFQLTLQPGFWKLPHAWIHTDASLVYPTFGPQDSFSEERSDVCLVQLLGTGTDSSEPCGLSDLCRSLMTKPGCSGYCLSHQLLFFLWARMRGCTQGPLQQSQDYINLFCANMMDLNRRAEAIGYAYPTRDIFMENIMFCGMGGFSDFYKLRWLEAILSWQKQQEGCFGEPDAEDEELSKAIQYQQHFSRRVKRREKQFPDPPANREPHPSTPPPPSSR

SEQ ID NO: 752581 - protein, 98 aa, Homo sapiens
WHEEGRGDRDPESWGSRVLGLHVSLLYRLSRSRHGASGHSTTPPAPGCRVWGPPGRISDPSGSSGALGRKNSQTFHSWPGRSTKTRAPARPSSTMSSS

SEQ ID NO: 752582 - protein, 162 aa, Homo sapiens
KIFFSFFPSSSFFSLLPSLPLSPPPSFSFFFFLETTDLTLREGKLVLARISKAQFYFLRQSLALVTQAGVQWRALGSLQLPTPWFRRFFSCLRIPSSWYYRRHHARINFLLLVETGFHHVGQAGLELPTSGDPPASASQSAGITGVSPSARPQSSVLPFFPR

SEQ ID NO: 752583 - protein, 120 aa, Homo sapiens
MDMFIGLESFHSVYIQHHIVPHKYTQLFRCELCPHKDGALKRTDNGGWAHEVCALYIPEVQFANDSTMEPIVLQSVPHDHCNKVETELKLICGRCSGMHWTNTSFPAATTGKSKVFYYEM

SEQ ID NO: 752584 - protein, 114 aa, Homo sapiens
MLKTLPHSCVERTFLFFSPAPQRCELCPHKDGALKRTDNGGWAHEVCALYIPEVQFANDSTMEPIVLQSVPHDHCNKVETELKLICGRCSGMHWDKHLIPAATTGKSKVFYYEM

SEQ ID NO: 752585 - protein, 208 aa, Homo sapiens
MDPFLVLLHSVSSSLSSSELTELKFLCLGRVGKRKLERVQSGLDLFSMLLEQNDLEPGHTELLRELLASLRRHDLLRRVDDFEAGAAAGAAPGEEDLCAAFNVICDNVGKDWRRLARQLKVSDTKIDSIEDRYPRNLTERVRESLRIWKNTEKENATVAHLVGALRSCQMNLVADLVQEVQQARDLQNRSGAMSPMSWNSDASTSEAS

SEQ ID NO: 752586 - protein, 208 aa, Homo sapiens; identical to SEQ ID NO: 752585

SEQ ID NO: 752587 - protein, 172 aa, Homo sapiens
MRGSLSFREITVENALLSISCSESGTGVQVRGWNPWAAGQAARPGQGQRAEDRGRAEGRDLCAAFNVICDNVGKDWRRLARQLKVSDTKIDSIEDRYPRNLTERVRESLRIWKNTEKENATVAHLVGALRSCQMNLVADLVQEVQQARDLQNRSGAMSPMSWNSDASTSEAS

SEQ ID NO: 752588 - protein, 208 aa, Homo sapiens; identical to SEQ ID NO: 752585

SEQ ID NO: 752589 - protein, 208 aa, Homo sapiens; identical to SEQ ID NO: 752585

SEQ ID NO: 752590 - protein, 263 aa, Homo sapiens
PRVIGRGVNQAPECRFGGGILGPLGKRRDLARASEPRTEGARRAGPQPRPLADPAMDPFLVLLHSVSSSLSSSELTELKFLCLGRVGKRKLERVQSGLDLFSMLLEQNDLEPGHTELLRELLASLRRHDLLRRVDDFEAGAAAGAAPGEEDLCAAFNVICDNVGKDWRRLARQLKVSDTKIDSIEDRYPRNLTERVRESLRIWKNTEKENATVAHLVGALRSCQMNLVADLVQEVQQARDLQNRSGAMSPMSWNSDASTSEAS

SEQ ID NO: 752591 - protein, 208 aa, Homo sapiens; identical to SEQ ID NO: 752585

SEQ ID NO: 752592 - protein, 194 aa, Homo sapiens
MDPFLVLLHSVSSSLSSSELTELKFLCLGRVGKRKLERVQSGLDLFSMLLEQNDLEPGHDLLRRVDDFEAGAAAGAAPGEEDLCAAFNVICDNVGKDWRRLARQLKVSDTKIDSIEDRYPRNLTERVRESLRIWKNTEKENATVAHLVGALRSCQMNLVADLVQEVQQARDLQNRSGAMSPMSWNSDASTSEAS

SEQ ID NO: 752593 - protein, 135 aa, Homo sapiens [sequence omitted]

SEQ ID NO: 752594 - protein, 103 aa, Homo sapiens
MKGFYMEVKKWPGCTHSRVHLHEGPWCLEEIGQLDPRTRRRSLGIWEWNCPASLMALAQLLQGEGKTLPTPLLQKHCGRLKGRKYPAAPRREDAARARVICTW

SEQ ID NO: 752595 - protein, 112 aa, Homo sapiens
PRAVTMMEGASLLVSETHLQPLSPGGLVCITCCSPWGHPLCSRWAELRGSGSSSDELGLVERRTWGWGCPWIMQGAVAFLVGTGALGKVAIQGGASSCGTQRMVAASPPASH

SEQ ID NO: 752596 - protein, 450 aa, Homo sapiens
MEGSKTSNNSTMQVSFVCQRCSQPLKLDTSFKILDRVTIQELTAPLLTTAQAKPGETQEEETNSGEEPFIETPRQDGVSRRFIPPARMMSTESANSFTLIGEASDGGTMENLSRRLKVTGDLFDIMSGQTDVDHPLCEECTDTLLDQLDTQLNVTENECQNYKRCLEILEQMNEDDSEQLQMELKELALEEERLIQELEDVEKNRKIVAENLEKVQAEAERLDQEEAQYQREYSEFKRQQLELDDELKSVENQMRYAQTQLDKLKKTNVFNATFHIWHSGQFGTINNFRLGRLPSVPVEWNEINAAWGQTVLLLHALANKMGLKFQRYRLVPYGNHSYLESLTDKSKELPLYCSGGLRFFWDNKFDHAMVAFLDCVQQFKEEVEKGETRFCLPYRMDVEKGKIEDTGGSGGSYSIKTQFNSEEQWTKALKFMLTNLKWGLAWVSSQFYNK

SEQ ID NO: 752597 - protein, 450 aa, Homo sapiens; identical to SEQ ID NO: 752596

SEQ ID NO: 752598 - protein, 412 aa, Homo sapiens
MEGSKTSNNSTMQVSFVCQRCSQPLKLDTSFKILDRVTIQELTAPLLTTAQAKPGETQEEETNSGEEPFIETPRQDGVSRRFIPPARMMSTESANSFTLIGEASDGGTMENLSRRLKVTGDLFDIMSGQTDVDHPLCEECTDTLLDQLDTQLNVTENECQNYKRCLEILEQMNEDDSEQLQMELKELALEEERLIQELEDVEKNRKIVAENLEKVQAEAERLDQEEAQYQREYSEFKRQQLELDDELKSVENQMRYAQTQLDKLKKTNVFNATFHIWHSGQFGTINNFRLGRLPSVPVEWNEINAAWGQTVLLLHALANKMGLKFQRSCRYTVLGGCGFSGTTSLTMQWWLSWTVCSSSKKRLRKARHVFVFPTGWMWRKARLKTQEAVAAPIPSKPSLTLRSSGQKLSSSC

SEQ ID NO: 752599 - protein, 363 aa, Homo sapiens
MMSTESANSFTLIGEASDGGTMENLSRRLKVTGDLFDIMSGQTDVDHPLCEECTDTLLDQLDTQLNVTENECQNYKRCLEILEQMNEDDSEQLQMELKELALEEERLIQELEDVEKNRKIVAENLEKVQAEAERLDQEEAQYQREYSEFKRQQLELDDELKSVENQMRYAQTQLDKLKKTNVFNATFHIWHSGQFGTINNFRLGRLPSVPVEWNEINAAWGQTVLLLHALANKMGLKFQRYRLVPYGNHSYLESLTDKSKELPLYCSGGLRFFWDNKFDHAMVAFLDCVQQFKEEVEKGETRFCLPYRMDVEKGKIEDTGGSGGSYSIKTQFNSEEQWTKALKFMLTNLKWGLAWVSSQFYNK

SEQ ID NO: 752600 - protein, 397 aa, Homo sapiens [sequence omitted]

SEQ ID NO: 752601 - protein, 388 aa, Homo sapiens
MEGSKTSNNSTMQVSFVCQRCSQPLKLDTSFKILDRVTIQELTAPLLTTAQAKPGETQEEETNSGEEPFIETPRQDGVSRRFIPPARMMSTESANSFTLIGEASDGGTMENLSRRLKVTGDLFDIMSGQTDVDHPLCEECTDTLLDQLDTQLNVTENECQNYKRCLEILEQMNEDDSEQLQMELKELALEEERLIQELEDVEKNRKIVAENLEKVQAEAERLDQEEAQYQREYSEFKRQQLELDDELKSVENQMRYAQTQLDKLKKTNVFNATFHIWHSGQFGTINNFRLGRLPSVPVEWNEINAAWGQTVLLLHALANKMGLKFQRYRLVPYGNHSYLESLTDKSKAEVQWHDLGLLQPPPPGFKQFPCLSLLSIWDYRHAPPRPAN

SEQ ID NO: 752602 - protein, 374 aa, Homo sapiens
MEGSKTSNNSTMQVSFVCQRCSQPLKLDTSFKILDRVTIQELTAPLLTTAQAKPGETQEEETNSGEEPFIETPRQDGVSRRFIPPARRCLEILEQMNEDDSEQLQMELKELALEEERLIQELEDVEKNRKIVAENLEKVQAEAERLDQEEAQYQREYSEFKRQQLELDDELKSVENQMRYAQTQLDKLKKTNVFNATFHIWHSGQFGTINNFRLGRLPSVPVEWNEINAAWGQTVLLLHALANKMGLKFQRYRLVPYGNHSYLESLTDKSKELPLYCSGGLRFFWDNKFDHAMVAFLDCVQQFKEEVEKGETRFCLPYRMDVEKGKIEDTGGSGGSYSIKTQFNSEEQWTKALKFMLTNLKWGLAWVSSQFYNK

SEQ ID NO: 752603 - protein, 450 aa, Homo sapiens; identical to SEQ ID NO: 752596

SEQ ID NO: 752604 - protein, 114 aa, Homo sapiens
MIHSQFSLLGQELPLYCSGGLRFFWDNKFDHAMVAFLDCVQQFKEEVEKGETRFCLPYRMDVEKGKIEDTGGSGGSYSIKTQFNSEEQWTKALKFMLTNLKWGLAWVSSQFYNK

SEQ ID NO: 752605 - protein, 146 aa, Homo sapiens
ISPHLSAFLCRHSGQFGTINNFRLGRLPSVPVEWNEINAAWGQTVLLLHALANKMGLKFQRSCRYTVLGGCGFSGTTSLTMQWWLSWTVCSSSKKRLRKARHVFVFPTGWMWRKARLKTQEAVAAPIPSKPSLTLRSSGQKLSSSC

SEQ ID NO: 752606 - protein, 364 aa, Homo sapiens
MEGSKTSNNSTMQVSFVCQRCSQPLKLDTSFKILDRVTIQELTAPLLTTAQAKPGETQEEETNSGEEPFIETPRQDGVSRRFIPPARMMSTESANSFTLIGEASDGGTMENLSRRLKVTGDLFDIMSGQTDVDHPLCEECTDTLLDQLDTQLNVTENECQNYKRCLEILEQMNEDDSEQLQMELKELALEEERLIQELEDVEKNRKIVAENLEKVQAEAERLDQEEAQYQREYSEFKRQQLELDDELKSVENQMRYAQTQLDKLKKTNVFNATFHIWHSGQFGTINNFRLGRLPSVPVEWNEINAAWGQTVLLLHALANKMGLKFQRYRLVPYGNHSYLESLTDKSKSCRYTVLVARFFLDTPR

SEQ ID NO: 752607 - protein, 162 aa, Homo sapiens
MSKRSPVTFSLRLRFSMVPPSDASPIRVKLLALSVDIILAGGMNLRETPSWRGVSINGSSPELVSSSWVSPGFAWAVVSNGAVSSWMVTRSRILKLVSSFRGWLQRWHTKLTCMVLLLDVLDPSIPREPGARHPSPVYRGGTVASGRPRSEASRTTIALSSA

SEQ ID NO: 752608 - protein, 450 aa, Homo sapiens; identical to SEQ ID NO: 752596

SEQ ID NO: 752609 - protein, 450 aa, Homo sapiens; identical to SEQ ID NO: 752596

SEQ ID NO: 752610 - protein, 388 aa, Homo sapiens; identical to SEQ ID NO: 752601

SEQ ID NO: 752611 - protein, 450 aa, Homo sapiens; identical to SEQ ID NO: 752596

SEQ ID NO: 752612 - protein, 388 aa, Homo sapiens
PSWRGVSINGSSPELVSRRFIPPARMMSTESANSFTLIGEASDGGTMENLSRRLKVTGDLFDIMSGQTDVDHPLCEECTDTLLDQLDTQLNVTENECQNYKRCLEILEQMNEDDSEQLQMELKELALEEERLIQELEDVEKNRKIVAENLEKVQAEAERLDQEEAQYQREYSEFKRQQLELDDELKSVENQMRYAQTQLDKLKKTNVFNATFHIWHSGQFGTINNFRLGRLPSVPVEWNEINAAWGQTVLLLHALANKMGLKFQRYRLVPYGNHSYLESLTDKSKELPLYCSGGLRFFWDNKFDHAMVAFLDCVQQFKEEVEKGETRFCLPYRMDVEKGKIEDTGGSGGSYSIKTQFNSEEQWTKALKFMLTNLKWGLAWVSSQFYNK

SEQ ID NO: 752613 - protein, 382 aa, Homo sapiens
MEGSKTSNNSTMQVSFVCQRCSQPLKLDTSFKILDRVTIQELTAPLLTTAQAKPGETQEEETNSGEEPFIETPRQDGVSRRFIPPARMMSTESANSFTLIGEASDGGTMENLSRRLKVTGDLFDIMSGQTDVDHPLCEECTDTLLDQLDTQLNVTENECQNYKRCLEILEQMNEDDSEQLQMELKELALEEERLIQELEDVEKNRKIVAENLEKVQAEAERLDQEEAQYQREYSEFKRQQLELDDELKSVENQMRYAQTQLDKLKKTNVFNATFHIWHSGQFGTINNFRLGRLPSVPVEWNEINAAWGQTVLLLHALANKMGLKFQRMDVEKGKIEDTGGSGGSYSIKTQFNSEEQWTKALKFMLTNLKWGLAWVSSQFYNK

SEQ ID NO: 752614 - protein, 283 aa, Homo sapiens
MEGSKTSNNSTMQVSFVCQRCSQPLKLDTSFKILDRVTIQELTAPLLTTAQAKPGETQEEETNSGEEPFIETPRQDGVSRRFIPPARMMSTESANSFTLIGEASDGGTMENLSRRLKVTGDLFDIMSGQTDVDHPLCEECTDTLLDQLDTQLNVTENECQNYKRCLEILEQMNEDDSEQLQMELKELALEEERLIQELEDVEKNRKIVAENLEKVQAEAERLDQEEAQMDVEKGKIEDTGGSGGSYSIKTQFNSEEQWTKALKFMLTNLKWGLAWVSSQFYNK

SEQ ID NO: 752615 - protein, 450 aa, Homo sapiens; identical to SEQ ID NO: 752596

SEQ ID NO: 752616 - protein, 450 aa, Homo sapiens; identical to SEQ ID NO: 752596

SEQ ID NO: 752617 - protein, 159 aa, Homo sapiens
MEGSKTSNNSTMQVSFVCQRCSQPLKLDTSFKILDRVTIQELTAPLLTTAQAKPGETQEEETNSGEEPFIETPRQDGVSRRFIPPARMMSTESANSFTLIGEASDGGTMENLSRRLKVTGDLFDIMSGQTDVDHPLCEECTDTLLDQLDTQLNVTEGYT

SEQ ID NO: 752618 - protein, 47 aa, Homo sapiens
MQWWLSWTVCSSSKKRLRKARHVFVFPTDDVEKGKIEDTGVIFCRTG

SEQ ID NO: 752619 - protein, 66 aa, Homo sapiens
WARGLWALQLTLRALEDEKKKTDTLLYSVLPPSVCACALGHMGPVRRRVGFLHVGLSSGQRVPAPT

SEQ ID NO: 752620 - protein, 619 aa, Homo sapiens
MYGFVNHALELLVIRNYGPEVWEDIKKEAQLDEEGQFLVRIIYDDSKTYDLVAAASKVLNLNAGEILQMFGKMFFVFCQESGYDTILRVLGSNVREFLQNLDALHDHLATIYPGMRAPSFRCTDAEKGKGLILHYYSEREGLQDIVIGIIKTVAQQIHGTEIDMKVIQQRNEECDHTQFLIEEKESKEEDFYEDLDRFEENGTQESRISPYTFCKAFPFHIIFDRDLVVTQCGNAIYRVLPQLQPGNCSLLSVFSLVRPHIDISFHGILSHINTVFVLRSKEGLLDVEKLECEDELTGTEISCLRLKGQMIYLPEADSILFLCSPSVMNLDDLTRRGLYLSDIPLHDATRDLVLLGEQFREEYKLTQELEILTDRLQLTLRALEDEKKKTDTLLYSVLPPSVANELRHKRPVPAKRYDNVTILFSGIVGFNAFCSKHASGEGAMKIVNLLNDLYTRFDTLTDSRKNPFVYKVETVGDKYMTVSGLPEPCIHHARSICHLALDMMEIAGQVQVDGESVQITIGIHTGEVVTGVIGQRMPRYCLFGNTVNLTSRTETTGEKGKINVSEYTYRCLMSPENSDPQFHLEHRGPVSMKGKKEPMQVWFLSRKNTGTEETKQDDD

SEQ ID NO: 752621 - protein, 619 aa, Homo sapiens; identical to SEQ ID NO: 752620

SEQ ID NO: 752622 - protein, 547 aa, Homo sapiens
MFFVFCQESGYDTILRVLGSNVREFLQNLDALHDHLATIYPGMRAPSFRCTDAEKGKGLILHYYSEREGLQDIVIGIIKTVAQQIHGTEIDMKVIQQRNEECDHTQFLIEEKESKEEDFYEDLDRFEENGTQESRISPYTFCKAFPFHIIFDRDLVVTQCGNAIYRVLPQLQPGNCSLLSVFSLVRPHIDISFHGILSHINTVFVLRSKEGLLDVEKLECEDELTGTEISCLRLKGQMIYLPEADSILFLCSPSVMNLDDLTRRGLYLSDIPLHDATRDLVLLGEQFREEYKLTQELEILTDRLQLTLRALEDEKKKTDTLLYSVLPPSVANELRHKRPVPAKRYDNVTILFSGIVGFNAFCSKHASGEGAMKIVNLLNDLYTRFDTLTDSRKNPFVYKVETVGDKYMTVSGLPEPCIHHARSICHLALDMMEIAGQVQVDGESVQITIGIHTGEVVTGVIGQRMPRYCLFGNTVNLTSRTETTGEKGKINVSEYTYRCLMSPENSDPQFHLEHRGPVSMKGKKEPMQVWFLSRKNTGTEETKQDDD

SEQ ID NO: 752623 - protein, 553 aa, Homo sapiens
MYGFVNHALELLVIRNYGPEVWEDIKKEAQLDEEGQFLVRIIYDDSKTYDLVAAASKVLNLNAGEILQMFGKMFFVFCQESGYDTILRVLGSNVREFLQVIQQRNEECDHTQFLIEEKESKEEDFYEDLDRFEENGTQESRISPYTFCKAFPFHIIFDRDLVVTQCGNAIYRVLPQLQPGNCSLLSVFSLVRPHIDISFHGILSHINTVFVLRSKEGLLDVEKLECEDELTGTEISCLRLKGQMIYLPEADSILFLCSPSVMNLDDLTRRGLYLSDIPLHDATRDLVLLGEQFREEYKLTQELEILTDRLQLTLRALEDEKKKTDTLLYSVLPPSVANELRHKRPVPAKRYDNVTILFSGIVGFNAFCSKHASGEGAMKIVNLLNDLYTRFDTLTDSRKNPFVYKVETVGDKYMTVSGLPEPCIHHARSICHLALDMMEIAGQVQVDGESVQITIGIHTGEVVTGVIGQRMPRYCLFGNTVNLTSRTETTGEKGKINVSEYTYRCLMSPENSDPQFHLEHRGPVSMKGKKEPMQVWFLSRKNTGTEETKQDDD

SEQ ID NO: 752624 - protein, 116 aa, Homo sapiens
MEIAGQVQVDGESVQITIGIHTGEVVTGVIGQRMPRYCLFGNTVNLTSRTETTGEKGKINVSEYTYRCLMSPENSDPQFHLEHRGPVSMKGKKEPMQVWFLSRKNTGTEETKQDDD

SEQ ID NO: 752625 - protein, 105 aa, Homo sapiens
MFGKMFFVFCQESGYDTILRVLGSNVREFLQNLDALHDHLATIYPGMRAPSFRCTDAEKGKGLILHYYSEREGLQDIVIGIIKTVAQQIHGTEIDMKVTNSNGDF

SEQ ID NO: 752626 - protein, 619 aa, Homo sapiens; identical to SEQ ID NO: 752620

SEQ ID NO: 752627 - protein, 586 aa, Homo sapiens
MYGFVNHALELLVIRNYGPEVWEDIKKEAQLDEEGQFLVRIIYDDSKTYDLVAAASKVLNLNAGEILQMFGKMFFVFCQESGYDTILRVLGSNVREFLQNLDALHDHLATIYPGMRAPSFRCTDAEKGKGLILHYYSEREGLQDIVIGIIKTVAQQIHGTEIDMKVIQQRNEECDHTQFLIEEKESKEEDFYEDLDRFEENGTQESRISPYTFCKAFPFHIIFDRDLVVTQCGNAIYRVLPQLQPGNCSLLSVFSLVRPHIDISFHGILSHINTVFVLRSKEGLLDVEKLECEDELTGTEISCLRLKGQMIYLPEADSILFLCSPSVMNLDDLTRRGLYLSDIPLHDATRDLVLLGEQFREEYKLTQELEILTDRLQLTLRALEDEKKKTDTGIVGFNAFCSKHASGEGAMKIVNLLNDLYTRFDTLTDSRKNPFVYKVETVGDKYMTVSGLPEPCIHHARSICHLALDMMEIAGQVQVDGESVQITIGIHTGEVVTGVIGQRMPRYCLFGNTVNLTSRTETTGEKGKINVSEYTYRCLMSPENSDPQFHLEHRGPVSMKGKKEPMQVWFLSRKNTGTEETKQDDD

SEQ ID NO: 752628 - protein, 602 aa, Homo sapiens
MFGKMFFVFCQESGYDTILRVLGSNVREFLQISQWSEGCATCAASLICPLDSDLTRFHILLSQSLLSLRKHCLLVSLSSLLQNLDALHDHLATIYPGMRAPSFRCTDAEKGKGLILHYYSEREGLQDIVIGIIKTVAQQIHGTEIDMKVIQQRNEECDHTQFLIEEKESKEEDFYEDLDRFEENGTQESRISPYTFCKAFPFHIIFDRDLVVTQCGNAIYRVLPQLQPGNCSLLSVFSLVRPHIDISFHGILSHINTVFVLRSKEGLLDVEKLECEDELTGTEISCLRLKGQMIYLPEADSILFLCSPSVMNLDDLTRRGLYLSDIPLHDATRDLVLLGEQFREEYKLTQELEILTDRLQLTLRALEDEKKKTDTLLYSVLPPSVANELRHKRPVPAKRYDNVTILFSGIVGFNAFCSKHASGEGAMKIVNLLNDLYTRFDTLTDSRKNPFVYKVETVGDKYMTVSGLPEPCIHHARSICHLALDMMEIAGQVQVDGESVQITIGIHTGEVVTGVIGQRMPRYCLFGNTVNLTSRTETTGEKGKINVSEYTYRCLMSPENSDPQFHLEHRGPVSMKGKKEPMQVWFLSRKNTGTEETKQDDD

SEQ ID NO: 752629 - protein, 347 aa, Homo sapiens
  misc_feature (322)..(322): Xaa can be any naturally occurring amino acid
  misc_feature (328)..(328): Xaa can be any naturally occurring amino acid
  misc_feature (330)..(330): Xaa can be any naturally occurring amino acid
  misc_feature (346)..(346): Xaa can be any naturally occurring amino acid
MFGKMFFVFCQESGYDTILRVLGSNVREFLQISQWSEGCATCAASLICPLDSDLTRFHILLSQSLLSLRKHCLLVSLSSLLQNLDALHDHLATIYPGMRAPSFRCTDAEKGKGLILHYYSEREGLQDIVIGIIKTVAQQIHGTEIDMKVIQQRNEECDHTQFLIEEKESKEEDFYEDLDRFEENGTQESRISPYTFCKAFPFHIIFDRDLVVTQCGNAIYRVLPQLQPGNCSLLSVFSLVRPHIDISFHGILSHINTVFVLRSKEGLLDVEKLECEDELTGTEISCLRLKGQMIYLPEADSILFLCSPSGHGTLDQFWPKGXRGWFPXVXNSLLAMDGQRPPNSLXS

SEQ ID NO: 752630 - protein, 831 aa, Homo sapiens
MKVHMHTKFCLICLLTFIFHHCNHCHEEHDHGPEALHRQHRGMTELEPSKFSKQAAENEKKYYIEKLFERYGENGRLSFFGLEKLLTNLGLGERKVVEINHEDLGHDHVSHLDILAVQEGKHFHSHNHQHSHNHLNSENQTVTSVSTKRNHKCDPEKETVEVSVKSDDKHMHDHNHRLRHHHRLHHHLDHNNTHHFHNDSITPSERGEPSNEPSTETNKTQEQSDVKLPKGKRKKKGRKSNENSEVITPGFPPNHDQGEQYEHNRVHKPDRVHNPGHSHVHLPERNGHDPGRGHQDLDPDNEGELRHTRKREAPHVKNNAIISLRKDLNEDDHHHECLNVTQLLKYYGHGANSPISTDLFTYLCPALLYQIDSRLCIEHFDKLLVEDINKDKNLVPEDEANIGASAWICGIISITVISLLSLLGVILVPIINQGCFKFLLTFLVALAVGTMSGDALLHLLPHSQGGHDHSHQHAHGHGHSHGHESNKFLEEYDAVLKGLVALGGIYLLFIIEHCIRMFKHYKQQRGKQKWFMKQNTEESTIGRKLSDHKLNNTPDSDWLQLKPLAGTDDSVVSEDRLNETELTDLEGQQESPPKNYLCIEEEKIIDHSHSDGLHTIHEHDLHAAAHNHHGENKTVLRKHNHQWHHKHSHHSHGPCHSGSDLKETGIANIAWMVIMGDGIHNFSDGLAIGAAFSAGLTGGISTSIAVFCHELPHELGDFAVLLKAGMTVKQAIVYNLLSAMMAYIGMLIGTAVGQYANNITLWIFAVTAGMFLYVALVDMLPEMLHGDGDNEEHGFCPVGQFILQNLGLLFGFAIMLVIALYEDKIVFDIQF

SEQ ID NO: 752631 - protein, 831 aa, Homo sapiens; identical to SEQ ID NO: 752630

SEQ ID NO: 752632 - protein, 831 aa, Homo sapiens; identical to SEQ ID NO: 752630

SEQ ID NO: 752633 - protein, 831 aa, Homo sapiens; identical to SEQ ID NO: 752630

SEQ ID NO: 752634 - protein, 381 aa, Homo sapiens
MSGDALLHLLPHSQGGHDHSHQHAHGHGHSHGHESNKFLEEYDAVLKGLVALGGIYLLFIIEHCIRMFKHYKQQRGKQKWFMKQNTEESTIGRKLSDHKLNNTPDSDWLQLKPLAGTDDSVVSEDRLNETELTDLEGQQESPPKNYLCIEEEKIIDHSHSDGLHTIHEHDLHAAAHNHHGENKTVLRKHNHQWHHKHSHHSHGPCHSGSDLKETGIANIAWMVIMGDGIHNFSDGLAIGAAFSAGLTGGISTSIAVFCHELPHELGDFAVLLKAGMTVKQAIVYNLLSAMMAYIGMLIGTAVGQYANNITLWIFAVTAGMFLYVALVDMLPEMLHGDGDNEEHGFCPVGQFILQNLGLLFGFAIMLVIALYEDKIVFDIQF

SEQ ID NO: 752635 - protein, 618 aa, Homo sapiens
MKVHMHTKFCLICLLTFIFHHCNHCHEEHDHGPEALHRQHRGMTELEPSKFSKQAADRVHNPGHSHVHLPERNGHDPGRGHQDLDPDNEGELRHTRKREAPHVKNNAIISLRKDLNEDDHHHECLNVTQLLKYYGHGANSPISTDLFTYLCPALLYQIDSRLCIEHFDKLLVEDINKDKNLVPEDEANIGASAWICGIISITVISLLSLLGVILVPIINQGCFKFLLTFLVALAVGTMSGDALLHLLPHSQGGHDHSHQHAHGHGHSHGHESNKFLEEYDAVLKGLVALGGIYLLFIIEHCIRMFKHYKQQRGKQKWFMKQNTEESTIGRKLSDHKLNNTPDSDWLQLKPLAGTDDSVVSEDRLNETELTDLEGQQESPPKNYLCIEEEKIIDHSHSDGLHTIHEHDLHAAAHNHHGENKTVLRKHNHQWHHKHSHHSHGPCHSGSDLKETGIANIAWMVIMGDGIHNFSDGLAIGAAFSAGLTGGISTSIAVFCHELPHELGDFAVLLKAGMTVKQAIVYNLLSAMMAYIGMLIGTAVGQYANNITLWIFAVTAGMFLYVALVDMLPEMLHGDGDNEEHGFCPVGQFILQNLGLLFGFAIMLVIALYEDKIVFDIQF

SEQ ID NO: 752636 - protein, 106 aa, Homo sapiens [sequence omitted]

SEQ ID NO: 752637 - protein, 108 aa, Homo sapiens
MKSVTGALHLSWKGHTPRLSLLLTRETVNIPKPSTTCTRRQLARAFSTEPSGGEGARFGLASPEHQVPLLAPSSPPCSSGASPRQSPRLPYVGMRGGRVTWARGRGRP

SEQ ID NO: 752638 - protein, 86 aa, Homo sapiens
ETNENKDTTYQNLWDTAQTVLRGKFIALNVHIKKLDISQLNNLTSQLKELENQEKTNLKVSRRQGITKNRAELKEIETPPKYSKDQ

SEQ ID NO: 752639 - protein, 613 aa, Homo sapiens
MCCWPLLLLWGLLPGTAAGGSGRTYPHRTLLDSEGKYWLGWSQRGSQIAFRLQVRTAGYVGFGFSPTGAMASADIVVGGVAHGRPYLQDYFTNANRELKKDAQQDYHLEYAMENSTHTIIEFTRELHTCDINDKSITDSTVRVIWAYHHEDAGEAGPKYHDSNRGTKSLRLLNPEKTSVLSTALPYFDLVNQDVPIPNKDTTYWCQMFKIPVFQEKHHVIKVEPVIQRGHESLVHHILLYQCSNNFNDSVLESGHECYHPNMPDAFLTCETVIFAWAIGGEGFSYPPHVGLSLGTPLDPHYVLLEVHYDNPTYEEGLIDNSGLRLFYTMDIRKYDAGVIEAGLWVSLFHTIPPGMPEFQSEGHCTLECLEEALEAEKPSGIHVFAVLLHAHLAGRGIRLRHFRKGKEMKLLAYDDDFDFNFQEFQYLKEEQTILPGDNLITECRYNTKDRAEMTWGGLSTRSEMCLSYLLYYPRINLTRCASIPDIMEQLQFIGVKEIYRPVTTWPFIIKSPKQYKNLSFMDAMNKFKWTKKEGLSFNKLVLSLPVNVRCSKTDNAEWSIQGMTALPPDIERPYKAEPLVCGTSSSSSLHRDFSINLLVCLLLLSCTLSTKSL

SEQ ID NO: 752640 - protein, 613 aa, Homo sapiens; identical to SEQ ID NO: 752639

SEQ ID NO: 752641 - protein, 545 aa, Homo sapiens
MNSFLSVFRYPDFSFPYFPQDYFTNANRELKKDAQQDYHLEYAMENSTHTIIEFTRELHTCDINDKSITDSTVRVIWAYHHEDAGEAGPKYHDSNRGTKSLRLLNPEKTSVLSTALPYFDLVNQDVPIPNKDTTYWCQMFKIPVFQEKHHVIKVEPVIQRGHESLVHHILLYQCSNNFNDSVLESGHECYHPNMPDAFLTCETVIFAWAIGGEGFSYPPHVGLSLGTPLDPHYVLLEVHYDNPTYEEGLIDNSGLRLFYTMDIRKYDAGVIEAGLWVSLFHTIPPGMPEFQSEGHCTLECLEEALEAEKPSGIHVFAVLLHAHLAGRGIRLRHFRKGKEMKLLAYDDDFDFNFQEFQYLKEEQTILPGDNLITECRYNTKDRAEMTWGGLSTRSEMCLSYLLYYPRINLTRCASIPDIMEQLQFIGVKEIYRPVTTWPFIIKSPKQYKNLSFMDAMNKFKWTKKEGLSFNKLVLSLPVNVRCSKTDNAEWSIQGMTALPPDIERPYKAEPLVCGTSSSSSLHRDFSINLLVCLLLLSCTLSTKSL

SEQ ID NO: 752642 - protein, 613 aa, Homo sapiens; identical to SEQ ID NO: 752639

SEQ ID NO: 752643 - protein, 157 aa, Homo sapiens
MFGIQENIPRGGTTMKEEPLGSGMNPVRSWMHTAGVVDANTASGVGLARAHFEKQPPSNLRKSNFFHFVLALYDRQGQPVEIERTAFVDFVEKEKEPNNEKTNNGIHYKLQLLYSNGVRTEQDLYVRLIDSMTKQAIVYEGQDKNPEMCRVLLTHEI

SEQ ID NO: 752644 - protein, 146 aa, Homo sapiens
MFGIQENIPRGGTTMKEEPLGSGMNPVRSWMHTAGVVDANTAQQPPSNLRKSNFFHFVLALYDRQGQPVEIERTAFVDFVEKEKEPNNEKTNNGIHYKLQLLYSNGVRTEQDLYVRLIDSMTKQAIVYEGQDKNPEMCRVLLTHEI

SEQ ID NO: 752645 - protein, 369 aa, Homo sapiens
MLLWLLVFSALGIQAWGDSSWNKTQAKQVSEGLQYLFENISQLTEKDVSTTVSRKAWGAEAVGCSIQLTTPVNVLVIHHVPGLECHDQTVCSQRLRELQAHHVHNNSGCDVAYNFLVGDDGRVYEGVGWNIQGVHTQGYNNISLGFAFFGTKKGHSPSPAALSAMENLITYAVQKGHLSSSYVQPLLVKGENCLAPRQKTSLKKACPGVVPRSVWGARETHCPRMTLPAKYGIIIHTAGRTCNISDECRLLVRDIQSFYIDRLKSCDIGYNFLVGQDGAIYEGVGWNVQGSSTPGYDDIALGITFMGTFTGIPPNAAALEAAQDLIQCAMVKGYLTPNYLLVGHSDVARTLSPGQALYNIISTWPHFKH

SEQ ID NO: 752646 - protein, 114 aa, Homo sapiens
MLLWLLVFSALGIQAWGDSSWNKTQAKQVSEGLQYLFENISQLTEKDVSTTVSRKAWGAEAVGCSIQLTTPVNVLVIHHVPGLECHDQTVCSQRLRELQAHHVHNNSGCDVAYK

SEQ ID NO: 752647 - protein, 51 aa, Homo sapiens
MCSLESDGCQRPVKCISDGDRDCSKSSLRKNFPVPGGKSTSHREPKRKSEG

SEQ ID NO: 752648 - protein, 313 aa, Homo sapiens
LRAPPGVPAAVMQSPAVLVTSRRLQNAHTGLDLTVPQHQEVRGKMMSGHVEYQILVVTRLAAFKSAKHRPEDVVQFLVSKKYSEIEEFYQKLSSRYAAASLPPLPRKVLFVGESDIRERRAVFNEILRCVSKDAELAGSPELLEFLGTRSPGAAGLTSRDSSVLDGTDSQTGNDEEAFDFFEEQDQVAEEGPPVQSLKGEDAEESLEEEEALDPLGIMRSKKPKKHRCEGKGLGPAGSEPPHPQGRPGRSLGHSTQNCMVPFSPGLWGQSRSLRAAGAALTLGARAQCVLFPVDMKGREGVGMPCQPEAQPQG

SEQ ID NO: 752649 - protein, 403 aa, Homo sapiens
LRAPPGVPAAVMQSPAVLVTSRRLQNAHTGLDLTVPQHQEVRGKMMSGHVEYQILVVTRLAAFKSAKHRPEDVVQFLVSKKYSEIEEFYQKLSSRYAAASLPPLPRKVLFVGESDIRERRAVFNEILRCVSKDAELAGSPELLEFLGTRSPGAAGLTSRDSSVLDGTDSQTGNDEEAFDFFEEQDQVAEEGPPVQSLKGEDAEESLEEEEALDPLGIMRSKKPKKHPKVAVKAKPSPRLTIFDEEVDPDEGLFGPGRKLSPQDPSEDVSSMDPLKLFDDPDLGGAIPLGDSLLLPAACESGGPTPSLSHRDASKELFRVEEDLDQILNLGAEPKPKPQLKPKPPVAAKPVIPRKPAVPPKAGPAEAVAGQQKPQEQIQAMDEMDILQYIQDHDTPAQAAPSLF

SEQ ID NO: 752650 - protein, 427 aa, Homo sapiens
MEAGVNRTRGVRVVMHVPGGARHSRRLQNAHTGLDLTVPQHQEVRGKMMSGHVEYQILVVTRLAAFKSAKHRPEDVVQFLVSKKYSEIEEFYQKLSSRYAAASLPPLPRKVLFVGESDIRERHGTQGPVVSTLAGIPLAGLLVLPTGNWPRKVCAKGPSPPRRLGLRKFLSTRSPGAAGLTSRDSSVLDGTDSQTGNDEEAFDFFEEQDQVAEEGPPVQSLKGEDAEESLEEEEALDPLGIMRSKKPKKHPKVAVKAKPSPRLTIFDEEVDPDEGLFGPGRKLSPQDPSEDVSSMDPLKLFDDPDLGGAIPLGDSLLLPAACESGGPTPSLSHRDASKELFRVEEDLDQILNLGAEPKPKPQLKPKPPVAAKPVIPRKPAVPPKAGPAEAVAGQQKPQEQIQAMDEMDILQYIQDHDTPAQAAPSLF

SEQ ID NO: 752651 - protein, 403 aa, Homo sapiens; identical to SEQ ID NO: 752649

SEQ ID NO: 752652 - protein, 329 aa, Homo sapiens
LRAPPGVPAAVMQSPAVLVTSRRLQNAHTGLDLTVPQHQEVRGKMMSGHVEYQILVVTRLAAFKSAKHRPEDVVQFLVSKKYSEIEEFYQKLSSRYAAASLPPLPRKVLFVGESDIRERRAVFNEILRCVSKDAELAGSPELLEFLGTRSPGAAGLTSRDSSVLDGTDSQTGNDEEAFDFFEEQDQVAEEGPPVQSLKGEDAEESLEEEEALDPLGIMRSKKPKKHPKVAVKAKPSPRLTIFDEEVDPDEGLFGPGRKLSPQDPSEDVSSMDPLKLFDDPDLGGAIPLGDSLLLPAACESGGPTPSLSHRDASKELFRYHLSPAALGQL

SEQ ID NO: 752653 - protein, 117 aa, Homo sapiens
GRPGQREAGRGRGDAGTAGSRDCAPRPESPPPSCSPRRCSSPPGEPDPRAPHRTARSPGRPGGEAGGGRRLLGQGPGAGLPSALGGLSGLGPCTALQERWRPRFTDEETEALWRVEN

SEQ ID NO: 752654 - protein, 224 aa, Homo sapiens
LRAPPGVPAAVMQSPAVLVTSRRLQNAHTGLDLTVPQHQEVRGKMMSGHVEYQILVVTRLAAFKSAKHRPEDVVQFLVSKKYSEIEEFYQKLSSRYAAASLPPLPRKVLFVGESDIRERRAVFNEILRCVSKDAELAGSPELLEFLGTRSPGAAGLTSRDSSVLDGTDSQTGNDEEAFDFFEEQDQVAEEGPPVQSLKGEDAEESLEEEEALDPLGIMRLVSCC

SEQ ID NO: 752655 - protein, 324 aa, Homo sapiens
LRAPPGVPAAVMQSPAVLVTSRRLQNAHTGLDLTVPQHQEVRGKMMSGHVEYQILVVTRLAAFKSAKHRPEDVVQFLVSKKYSEIEEFYQKLSSRYAAASLPPLPRKVLFVGESDIRERRAVFNEILRCVSKDAELAGSPELLEFLGTRSPGAAGLTSRDSSVLDGTDSQTGNDEEAFDFFEEQDQVAEEGPPVQSLKGEDAEESLEEEEALDPLGIMRSKKPKKHPKVAVKAKPSPRLTIFDEEVDPDEGLFGPGRKLSPQDPSEDVSSMDPLKLFDDPDLGGAIPLGDSLLLPAACESGGPTPSLSHRDASKELFRQIQKEP

SEQ ID NO: 752656 - protein, 332 aa, Homo sapiens
LRAPPGVPAAVMQSPAVLVTSRRLQNAHTGLDLTVPQHQEVRGKMMSGHVEYQILVVTRLAAFKSAKHRPEDVVQFLVSKKYSEIEEFYQKLSSRYAAASLPPLPRKVLFVGESDIRERRAVFNEILRCVSKDAELAGSPELLEFLGTRSPGAAGLTSRDSSVLDGTDSQTGNDEEAFDFFEEQDQVAEEGPPVQSLKGEDAEESLEEEEALDPLGIMRSKKPKKHPKVAVKAKPSPRLTIFDEEVDPDEGLFGPGRKLSPQDPSEDVSSMDPLKLFDDPDLGGAIPLGDSLLLPAACESGGPTPSLSHRDASKELFRWDHLVAGKQAQGSH

SEQ ID NO: 752657 - protein, 264 aa, Homo sapiens
MAGLRNESEQEPLLGDTPGSREWDILETEEHYKSRWRSIRILYLTMFLSSVGFSVVMMSIWPYLQKIDPTADTSFLGWVIASYSLGQMVASPIFGLWSNYRPRKEPLIVSILISVAANCLYAYLHIPASHNKYYMLVARGLLGIGAGNVAVVRSYTAGATSLQERTSSMANISMCQALGFILGPVFQTCFTFLGEKGVTWDVIKLQINMYTTPVLLSAFLGILNIILILAILREHRVDDSGRQCEKYKFRKKQVPDEAQVPQGN

SEQ ID NO: 752658 - protein, 162 aa, Homo sapiens
MAGLRNESEQEPLLGDTPGSREWDILETEEHYKSRWRSIRILYLTMFLSSVGFSVVMMSIWPYLQKIDPTADTSFLGWVIASYSLGQMVASPIFGLWSNYRPRKEPLIVSILISVAANCLYAYLHIPASHNKYYMLVARGLLGIGAGKVVCICLVVSYSHSF

SEQ ID NO: 752659 - protein, 208 aa, Homo sapiens
MMSIWPYLQKIDPTADTSFLGWVIASYSLGQMVASPIFGLWSNYRPRKEPLIVSILISVAANCLYAYLHIPASHNKYYMLVARGLLGIGAGNVAVVRSYTAGATSLQERTSSMANISMCQALGFILGPVFQTCFTFLGEKGVTWDVIKLQINMYTTPVLLSAFLGILNIILILAILREHRVDDSGRQCEKYKFRKKQVPDEAQVPQGN

SEQ ID NO: 752660 - protein, 206 aa, Homo sapiens
MAGLRNESEQEPLLGDTPGSREWDILETEEHYKSRWRSIRILYLTMFLSSVGFSVVMMSIWPYLQKIDPTADTSFLGWVIASYSLGQMVASPIFGLWSNYRPRKEPLIVSILISVAANCLYAYLHIPASHNKYYMLVARGLLGIGAGNVAVVRSYTAGATSLQERTSSMANISMCQALGFILGPASTDEAQVPQGNIDQVAVVAIN

SEQ ID NO: 752661 - protein, 162 aa, Homo sapiens; identical to SEQ ID NO: 752658

SEQ ID NO: 752662 - protein, 139 aa, Homo sapiens
ARALVPTAWFLGPRHPSRPKAGQKRAPRTGSSGTGNPSRGDQRQSTGPSRGRRRRWVMLRHSPSLWELVEEHVPLRERREVKRILGEAAVDLSLELRAEVGRGKVGHAPGLPHDSGDFPPPAGPWPCRVTPEILSWSPL

SEQ ID NO: 752663 - protein, 139 aa, Homo sapiens; identical to SEQ ID NO: 752662

SEQ ID NO: 752664 - protein, 117 aa, Homo sapiens [sequence omitted]

SEQ ID NO: 752665 - protein, 296 aa, Homo sapiens
ARALVPTAWFLGPRHPSRPKAGQKRAPRTGSSGTGNPSRGDQRQSTGPSRGRRRRWVMLRHSPSLWELVEEHVPLRERREVKRILGEAAVDLSLELRAEVGNSCLDSDIWVLKAWGEQHAESDSDFIASSGHRDLSIIKDQLNVSNIDQVARHLRGLLEEECHTLEREILILQRCLEEEYLRPCHPSEAALEPTLAELKEQKKAMEQELQASVGPSCVSPNHRQRPLGSSTQGLRPPLPLCGVAPLQCCLPAPPLEPYLRPRGQSATHRWGRQLQCSPREGPASTPMSSAAPQAPA

SEQ ID NO: 752666 - protein, 139 aa, Homo sapiens; identical to SEQ ID NO: 752662

SEQ ID NO: 752667 - protein, 139 aa, Homo sapiens; identical to SEQ ID NO: 752662

SEQ ID NO: 752668 - protein, 366 aa, Homo sapiens
ARALVPTAWFLGPRHPSRPKAGQKRAPRTGSSGTGNPSRGDQRQSTGPSRGRRRRWVMLRHSPSLWELVEEHVPLRERREVKRILGEAAVDLSLELRAEVGWRCYGHCSKRLDPLKPPAPAAISDPSSLLAPPPLLKDLLRQELRQLLQGLRHKAICEGRDQAQAWVQYSPRVLHFALEEPRCDLPEQEIFQMRGGGAQSGHRDLSIIKDQLNVSNIDQVARHLRGLLEEECHTLEREILILQRCLEEEYLRPCHPSEAALEPTLAELKEQKKAMEQELQASVGPSCVSPNHRQRPLGSSTQGLRPPLPLCGVAPLQCCLPAPPLEPYLRPRGQSATHRWGRQLQCSPREGPASTPMSSAAPQAPA

SEQ ID NO: 752669 - protein, 243 aa, Homo sapiens
AGFGERCRRARGTSRTLTCGPRSEPGTAASVGHAPALPLAVGAGGGARSAPGATRSEEDSGGGGGGPEPGAAGGGGSGHRDLSIIKDQLNVSNIDQVARHLRGLLEEECHTLEREILILQRCLEEEYLRPCHPSEAALEPTLAELKEQKKAMEQELQASVGPSCVSPNHRQRPLGSSTQGLRPPLPLCGVAPLQCCLPAPPLEPYLRPRGQSATHRWGRQLQCSPREGPASTPMSSAAPQAPA

SEQ ID NO: 752670 - protein, 121 aa, Homo sapiens
MGDTWDAPRGLPSLFLGPSAVAARSRPPYFPRERAPSHENCQRGGGGSRPQSGEQRRRAAGWGVDSALCPASRPPRGVGRVQAATPRRPAAISRPGRRSRFTQLSEEGKAEPAHTPAFLEA

SEQ ID NO: 752671 - protein, 359 aa, Homo sapiens
RAHSRTVIDAMSALLRLLRTGAPAAACLRLGTSAGTGSRRAMALYHTEERGQPCSQNYRLFFKNVTGHYISPFHDIPLKVNSKEDTEAQGIFIDLSEDLENGIPMKKARNDEYENLFNMIVEIPRWTNAKMEIATKEPMNPIKQYVKDGKLRYVANIFPYKGYIWNYGTLPQTWEDPHEKDKSTNCFGDNDPIDVCEIGSKILSCGEVIHVKILGILALIDEGETDWKLIAINANDPEASKFHDIDDVKKFKPGYLEATLNWFRLYKVPDGKPENQFAFNGEFKNKAFALEVIKSTHQCWKALLMKNCNGGAINCTNVQISDSPFRCTQEEARSLVESVSSSPNKESNEEEQVWHFLGK

SEQ ID NO: 752672 - protein, 315 aa, Homo sapiens
RAHSRTVIDAMSALLRLLRTGAPAAACLRLGTSAGTGSRRAMALYHTEERGQPCSQNYRLFFKNVTGHYISPFHDIPLKVNSKEENGIPMKKARNDEYENLFNMIVEIPRWTNAKMEIATKEPMNPIKQYVKDGKLRYVANIFPYKGYIWNYGTLPQILSCGEVIHVKILGILALIDEGETDWKLIAINANDPEASKFHDIDDVKKFKPGYLEATLNWFRLYKVPDGKPENQFAFNGEFKNKAFALEVIKSTHQCWKALLMKNCNGGAINCTNVQISDSPFRCTQEEARSLVESVSSSPNKESNEEEQVWHFLGK

SEQ ID NO: 752673 - protein, 164 aa, Homo sapiens
RAHSRTVIDAMSALLRLLRTGAPAAACLRLGTSAGTGSRRAMALYHTEERGQPCSQNYRLFFKNVTGHYISPFHDIPLKVNSKEENGIPMKKARNDEYENLFNMIVEIPRWTNAKMEIATKEPMNPIKQYVKDGKLRYVANIFPYKGYIWNYGTLPQVTFLLQW

SEQ ID NO: 752674 - protein, 344 aa, Homo sapiens
RAHSRTVIDAMSALLRLLRTGAPAAACLRLGTSAGTGSRRAMALYHTEERGQPCSQNYRLFFKNVTGHYISPFHDIPLKVNSKEENGIPMKKARNDEYENLFNMIVEIPRWTNAKMEIATKEPMNPIKQYVKDGKLRYVANIFPYKGYIWNYGTLPQTWEDPHEKDKSTNCFGDNDPIDVCEIGSKILSCGEVIHVKILGILALIDEGETDWKLIAINANDPEASKFHDIDDVKKFKPGYLEATLNWFRLYKVPDGKPENQFAFNGEFKNKAFALEVIKSTHQCWKALLMKNCNGGAINCTNVQISDSPFRCTQEEARSLVESVSSSPNKESNEEEQVWHFLGK

SEQ ID NO: 752675 - protein, 178 aa, Homo sapiens
RAHSRTVIDAMSALLRLLRTGAPAAACLRLGTSAGTGSRRAMALYHTEERGQPCSQNYRLFFNIDDVKKFKPGYLEATLNWFRLYKVPDGKPENQFAFNGEFKNKAFALEVIKSTHQCWKALLMKNCNGGAINCTNVQISDSPFRCTQEEARSLVESVSSSPNKESNEEEQVWHFLGK

SEQ ID NO: 752676 - protein, 241 aa, Homo sapiens [sequence omitted]

SEQ ID NO: 752677 - protein, 183 aa, Homo sapiens
RAHSRTVIDAMSALLRLLRTGAPAAACLRLGTSAGTGSRRAMALYHTEERGQPCSQNYRLFFKNVTGHYISPFHDIPLKVNSKEENGIPMKKARNDEYENLFNMIVEIPRWTNAKMEIATKEPMNPIKQYVKDGKLRYVANIFPYKGYIWNYGTLPQTWEDPHENSFLWRSYSCEDPWNFGSY

SEQ ID NO: 752678 - protein, 116 aa, Homo sapiens
MQPSVSTASQESEKPQMMDGLAEVISRDRPRTWSISPSNSPNLRALWGCRARQCPATLAWMADLQQWGTKSLPRHEENEFMKFINGVYKCYKQGAACFHSVWIFLSALFIYCCQFN

SEQ ID NO: 752679 - protein, 618 aa, Homo sapiens
GRCHPVDGTCACEPGYRGKYCREPCPAGFYGLGCRRRCGQCKGQQPCTVAEGRCLTCEPGWNGTKCDQPCATGFYGEGCSHRCPPCRDGHACNHVTGKCTRCNAGWIGDRCETKCSNGTYGEDCAFVCADCGSGHCDFQSGRCLCSPGVHGPHCNVTCPPGLHGADCAQACSCHEDTCDPVTGACHLETNQRKGVMGAGALLVLLVCLLLSLLGCCCACRGKDPTRRELSLGRKKAPHRLCGRFSRISMKLPRIPLRRQKLPKVVVAHHDLDNTLNCSFLEPPSGLEQPSPSWSSRASFSSFDTTDEGPVYCVPHEEAPAESRDPEVPTVPAEAPAPSPVPLTTPASAEEAIPLPASSDSERSASSVEGPGGALYARVARREARPARARGEIGGLSLSPSPERRKPPPPDPATKPKVSWIHGKHSAAAAGRAPSPPPPGSEAAPSPSKRKRTPSDKSAHTVEHGSPRTRDPTPRPPGLPEEATALAAPSPPRARARGRGPGLLEPTDAGGPPRSAPEAASMLAAELRGKTRSLGRAEVALGAQGPREKPAPPQKAKRSVPPASPARAPPATETPGPEKAATDLPAPETPRKKTPIQKPPRKKSREAAGELGRAGAPTL

SEQ ID NO: 752680 - protein, 132 aa, Homo sapiens
PKKYDSGPSLDVNLVRGPSHYCDIACTWFYRGEIGGLSLSPSPERRKPPPPDPATKPKVSWIHGKHSAAAAGRAPSPPPPGSEAAPSPSKRKRTPSDKSAHTVEHGSPRTRDPKRSGTLPRGRTSRWALEGR

SEQ ID NO: 752681 - protein, 509 aa, Homo sapiens
GRCHPVDGTCACEPGYRGKYCREPCPAGFYGLGCRRRCGQCKGQQPCTVAEGRCLTCEPGWNGTKCDQPCATGFYGEGCSHRCPPCRDGHACNHVTGKCTRCNAGWIGDRCETKCSNGTYGEDCAFVCADCGSGHCDFQSGRCLCSPGVHGPHCNVTCPPGLHGADCAQACSCHEDTCDPVTGACHLETNQRKGVMGAGALLVLLVCLLLSLLGCCCACRGKDPTRRELSLGRKKAPHRLCGRFSRISMKLPRIPLRRQKLPKVVVAHHDLDNTLNCSFPGEIGGLSLSPSPERRKPPPPDPATKPKVSWIHGKHSAAAAGRAPSPPPPGSEAAPSPSKRKRTPSDKSAHTVEHGSPRTRDPTPRPPGLPEEATALAAPSPPRARARGRGPGLLEPTDAGGPPRSAPEAASMLAAELRGKTRSLGRAEVALGAQGPREKPAPPQKAKRSVPPASPARAPPATETPGPEKAATDLPAPETPRKKTPIQKPPRKKSREAAGELGRAGAPTL

SEQ ID NO: 752682 - protein, 287 aa, Homo sapiens
CAPCSPRIGLVLVTPSTFVTAGANEGTGWGRVDPWQLCLILPQWPTTTWITHSTAASRGEIGGLSLSPSPERRKPPPPDPATKPKVSWIHGKHSAAAAGRAPSPPPPGSEAAPSPSKRKRTPSDKSAHTVEHGSPRTRDPTPRPPGLPEEATALAAPSPPRARARGRGPGLLEPTDAGGPPRSAPEAASMLAAELRGKTRSLGRAEVALGAQGPREKPAPPQKAKRSVPPASPARAPPATETPGPEKAATDLPAPETPRKKTPIQKPPRKKSREAAGELGRAGAPTL

SEQ ID NO: 752683 - protein, 618 aa, Homo sapiens; identical to SEQ ID NO: 752679

SEQ ID NO: 752684 - protein, 423 aa, Homo sapiens
MGAGALLVLLVCLLLSLLGCCCACRGKDPTRRELSLGRKKAPHRLCGRFSRISMKLPRIPLRRQKLPKVVVAHHDLDNTLNCSFLEPPSGLEQPSPSWSSRASFSSFDTTDEGPVYCVPHEEAPAESRDPEVPTVPAEAPAPSPVPLTTPASAEEAIPLPASSDSERSASSVEGPGGALYARVARREARPARARGEIGGLSLSPSPERRKPPPPDPATKPKVSWIHGKHSAAAAGRAPSPPPPGSEAAPSPSKRKRTPSDKSAHTVEHGSPRTRDPTPRPPGLPEEATALAAPSPPRARARGRGPGLLEPTDAGGPPRSAPEAASMLAAELRGKTRSLGRAEVALGAQGPREKPAPPQKAKRSVPPASPARAPPATETPGPEKAATDLPAPETPRKKTPIQKPPRKKSREAAGELGRAGAPTL

SEQ ID NO: 752685 - protein, 605 aa, Homo sapiens
GRCHPVDGTCACEPGYRGKYCREPCPAGFYGLGCRRRCGQCKGQQPCTVAEGRCLTCEPGWNGTKCDQPCATGFYGEGCSHRCPPCRDGHACNHVTGKCTRCNAGWIGDRCETKCSNGTYGEDCAFVCADCGSGHCDFQSGRCLCSPGVHGPHCNVTCPPGLHGADCAQACSCHEDTCDPVTGACHLETNQRKGVMGAGALLVLLVCLLLSLLGCCCACRGKDPTRRELSLGRKKAPHRLCGRFSRISMKLPRIPLRRQKLPKVVVAHHDLDNTLNCSFLEPPSGLEQPSPSWSSRASFSSFDTTDEGPVYCVPHEEAPAESRDPEVPTVPAEAPAPSPVPLTTPASAEEAIPLPASSDSERSASSVEGPGGALYARVARREARPARARGEIGGLSLSPSPERRKPPPPDPATKPKVSWIHGKHSAAAAGRAPSPPPPGSEAAPSPSKRKRTPSDKSAHTVEHGSPRTRDPTPRPPGLPEEATALAAPSPPRARARGRGPGLLEPTDAGGPPRSAPEAASMLAAELRGKTRSLGRAEVALGAQGPREKPAPPQKAKRSVPPASPARAPPATETPGPEKAATDLPAPETPRKKTPIQKPRDLQGRL

SEQ ID NO: 752686 - protein, 47 aa, Homo sapiens
MERQVGGTLPPGWGKVTHNSSKDDPCDRLTFQGRYLENGRLGTRVGA

SEQ ID NO: 752687 - protein, 452 aa, Homo sapiens
ARSRRRGNRPRTYQCSECGNAFRRRSLLIQHRRLHSGEKPYECKECGKLFMWHTAFLKHQRLHAGEKLEECEKTFSKDEELRKEQRTHQEKKVYWCNQCSRTFQGSSDLIRHQVTHTREKPYECKECGKTQSELRPSETSRIHSGEKPYVCNKCGESFRSSSDLIKHHRVHTGEKPHECSECGKVFSQRSHLVTHQKIHTGEKPYQCTECEKAFRRRSLLIQRRRIHSGEKPYECKECGKLFMWHTAFLKHQRLHAGEKLEECEKTFSKDEELRGEQKIHQEEKAYWCNQCGRAFQGSSDLIGHQVTHTGEKPYECKECGKTFNQSSDLLRHHRIHSGEKPYVCNKCGKSFRGSSDLIRHHRVHTGEKPYECPECWKAFSQNSHLVSHQRIHTREKPFECSNCGKAFSGWTAFLKHQKLHIGKEFEDCKSLQTGPILIGSRNLMNAVKLGKV

SEQ ID NO: 752688 - protein, 87 aa, Homo sapiens
RAGGRGACVHRQARSGAELICLWGEAWGTAGGCRRRVRMTGPSCSRSASWSRRAPFPALSRYSCLFQFPPVGTANGIFPRPRIHRQA

SEQ ID NO: 752689 - protein, 1119 aa, Homo sapiens
MKEWKSKMEISEEKKSARAASEKLQRQITQECELVETSNSEDRLLKHWVSPLKDAMRHLPSQESGIREMHIIPQKAIVGEIGHGCNEGEKILSAGESSHRYEVSGQNFKQKSGLTEHQKIHNINKTYECKECEKTFNRSSNLIIHQRIHTGNKPYVCNECGKDSNQSSNLIIHQRIHTGKKPYICHECGKDFNQSSNLVRHKQIHSGGNPYECKECGKAFKGSSNLVLHQRIHSRGKPYLCNKCGKAFSQSTDLIIHHRIHTGEKPYECYDCGQMFSQSSHLVPHQRIHTGEKPLKCNECEKAFRQHSHLTEHQRLHSGEKPYECHRCGKTFSGRTAFLKHQRLHAGEKIEECEKTFSKDEELREEQRIHQEEKAYWCNQCGRNFQGTSDLIRHQVTHTGEKPYECKECGKTFNQSSDLLRHHRIHSGEKPCVCSKCGKSFRGSSDLIRHHRVHTGEKPYECSECGKAFSQRSHLVTHQKIHTGEKPYQCTECGKAFRRRSLLIQHRRIHSGEKPYECKECGKLFIWRTAFLKHQSLHTGEKLECEKTFSQDEELRGEQKIHQEAKAYWCNQCGRAFQGSSDLIRHQVTHTREKPYECKECGKTFNQSSDLLRHHRIHSGEKPYVCNKCGKSFRGSSDLIKHHRIHTGEKPYECSECGKAFSQRSHLATHQKIHTGEKPYQCSECGNAFRRRSLLIQHRRLHSGEKPYECKECGKLFMWHTAFLKHQRLHAGEKLEECEKTFSKDEELRKEQRTHQEKKVYWCNQCSRTFQGSSDLIRHQVTHQERNHMNVKNVGKLNQSSDLLRHHRIHSGEKPYVCNKCGESFRSSSDLIKHHRVHTGEKPHECSECGKVFSQRSHLVTHQKIHTGEKPYQCTECEKAFRRRSLLIQRRRIHSGEKPYECKECGKLFMWHTAFLKHQRLHAGEKLEECEKTFSKDEELRGEQKIHQEEKAYWCNQCGRAFQGSSDLIGHQVTHTGEKPYECKECGKTFNQSSDLLRHHRIHSGEKPYVCNKCGKSFRGSSDLIRHHRVHTGEKPYECPECWKAFSQNSHLVSHQRIHTREKPFECSNCGKAFSGWTAFLKHQKLHIGKEFEDCKSLQTGPILIGSRNLMNAVKLGKV

SEQ ID NO: 752690 - protein, 258 aa, Homo sapiens
ADDAHKALSDDALVRRAVGESCAGADSAASAAVGVVGPRAALTMTQQGAALQNYNNELVKCERRSRDGEVGRAAGPGSRLAAGCPWTRLAAGIARLSRALRAGGRVSVARALAGSQAPRRALGGGACLWLPRVEGGPPSAAALLPWAHSACPPGPQAYEELCQKREELCRQIQEEEDEKQRLQNEVRQLTEKLARVNENLARKIASRNEFDRTIAETEAAYLKMLESSQTLLSVLKREAGNLTKATASDQKSSGGRDS

SEQ ID NO: 752691 - protein, 117 aa, Homo sapiens
QQGMALQNYNNELVKCIEELCQKREELCRQIQEEEDEKQRLQNEVRQLTEKLARVNENLARKIASRNEFDRTIAETEAAYLKMLESSQTLLSVLKREAGNLTKATASDQKSSGGRDS

SEQ ID NO: 752692 - protein, 137 aa, Homo sapiens
TISPSLRPLLQHSLLLSIAREPPIPDTLLLLSSQMDPGQDAAGGAGGESCPIYHQHSKKGSKRPRAPEDAMGSTSTWIPGSKPLDFRSKQGQPFGLSLLLLRKARKNPETSSPRPSSTSGDRVSPRNFTREEKSELI

SEQ ID NO: 752693 - protein, 511 aa, Homo sapiens
MSYHSFQPGSRCGSQSFSSYSAVMPRMVTHYAVSKGPCRPGGGRGLRALGCLGSRSLCNVGFGRPRVASRCGGTLPGFGYRLGATCGPSACITPVTINESLLVPLALEIDPTVQRVKRDEKEQIKCLNNRFASFINKFLEQKNKLLETKWNFMQQQRCCQTNIEPIFEGYISALRRQLDCVSGDRVRLESELCSLQAALEGYKKKYEEELSLRPCVENEFVALKKDVDTAFLMKADLETNAEALVQEIDFLKSLYEEEICLLQSQISETSVIVKMDNSRELDVDGIIAEIKAQYDDIASRSKAEAEAWYQCRYEELRVTAGNHCDNLRNRKNEILEMNKLIQRLQQETENVKAQRCKLEGAIAEAEQQGEAALNDAKCKLAGLEEALQKAKQDMACLLKEYQEVMNSKLGLDIEIATYRRLLEGEEHRLCEGIGPVNISVSSSKGAFLYEPCGVSTPVLSTGVLRSNGGCSIVGTGELYVPCEPQGLLSCGSGRKSSMTLGAGGSSPSHKH

SEQ ID NO: 752694 - protein, 95 aa, Homo sapiens
EDGHGCLFFPKGWVVQGQVADAKLVLPTGRVLVHCAMGVSRSATLVLAFLMIYENMTLVEAIQTVQAHRNICPNSGFLRQLQVLDNRLGRETGRF

SEQ ID NO: 752695 - protein, 224 aa, Homo sapiens
AQPCSAQAESCPCTHSPIPGPRPCPRMDSLQKQDLRRPKIHGAVQASPYQPPTLASLQRLLWVRQAATLNHIDEVWPSLFLGDAYAARDKSKLIQLGITHVVNAAAGKFQVDTGAKFYRGMSLEYYGIEADDNPFFDLSVYFLPVARYIRAALSVPQGRVLVHCAMGVSRSATLVLAFLMIYENMTLVEAIQTVQAHRNICPNSGFLRQLQVLDNRLGRETGRF

SEQ ID NO: 752696 - protein, 198 aa, Homo sapiens
MDSLQKQDLRRPKIHGAVQASPYQPPTLASLQRLLWVRQAATLNHIDEVWPSLFLGDAYAARDKSKLIQLGITHVVNAAAGKFQVDTGAKFYRGMSLEYYGIEADDNPFFDLSVYFLPVARYIRAALSVPQGRVLVHCAMGVSRSATLVLAFLMIYENMTLVEAIQTVQAHRNICPNSGFLRQLQVLDNRLGRETGRF

SEQ ID NO: 752697 - protein, 240 aa, Homo sapiens
MGLCHFATLALILLVLLEALAQADTQKMVEAQRGVGPRACYSIWLLLAPTPPLSHCLQSPQKQHQVCGDRRLKAGSTNCPSEKCTAWARYSHRMDSLQKQDLRRPKIHGAVQASPYQPPTLASLQRLLWVRQAATLNHIDEVWPSLFLGDAYAARDKSKLIQLGITHVVNAAAGRVLVHCAMGVSRSATLVLAFLMIYENMTLVEAIQTVQAHRNICPNSGFLRQLQVLDNRLGRETGRF

SEQ ID NO: 752698 - protein, 502 aa, Homo sapiens
VTTEAEGWAGWPMAETSLPELGGEDKATPCPSILELEELLRAGKSSCSRVDEVWPNLFIGDAATANNRFELWKLGITHVLNAAHKGLYCQGGPDFYGSSVSYLGVPAHDLPDFDISAYFSSAADFIHRALNTPGAKVLVHCVVGVSRSATLVLAYLMLHQRLSLRQAVITVRQHRWVFPNRGFLHQLCRLDQQLRGAGQELRGQSWSLLPAMGLCHFATLALILLVLLEALAQADTQKMVEAQRGVGPRACYSIWLLLAPTPPLSHCLQSPQKQHQVCGDRRLKAGSTNCPSEKCTAWARYSHRMDSLQKQDLRRPKIHGAVQASPYQPPTLASLQRLLWVRQAATLNHIDEVWPSLFLGDAYAARDKSKLIQLGITHVVNAAAGKFQVDTGAKFYRGMSLEYYGIEADDNPFFDLSVYFLPVARYIRAALSVPQGRVLVHCAMGVSRSATLVLAFLMIYENMTLVEAIQTVQAHRNICPNSGFLRQLQVLDNRLGRETGRF

SEQ ID NO: 752699 - protein, 451 aa, Homo sapiens
VTTEAEGWAGWPMAETSLPELGGEDKATPCPSILELEELLRAGKSSCSRVDEVWPNLFIGDAATANNRFELWKLGITHVLNAAHKGLYCQGGPDFYGSSVSYLGVPAHDLPDFDISAYFSSAADFIHRALNTPGAKVLVHCVVGVSRSATLVLAYLMLHQRLSLRQAVITVRQHRWVFPNRGFLHQLCRLDQQLRGAGQELRGQSWSLLPAMGLCHFATLALILLVLLEALAQADTQKMVEAQRGVGPRACYSIWLLLAPTPPLSHCLQSPQKQHQVCGDRRLKAGSTNCPSEKCTAWARYSHRMDSLQKQDLRRPKIHGAVQASPYQPPTLASLQRLLWVRQAATLNHIDEVWPSLFLGDAYAARDKSKLIQLGITHVVNAAAGRVLVHCAMGVSRSATLVLAFLMIYENMTLVEAIQTVQAHRNICPNSGFLRQLQVLDNRLGRETGRF

SEQ ID NO: 752700 - protein, 118 aa, Homo sapiens
ARLGPALPGPAALSGGVGIQVARRPAQSTSSLPASRPTPWMRKLKLRGDVTDPRPGISSSGARHKKLLAPHDVNALGPSQEVETREGPTQSWITRKTGSSTPPWSFPVTRGHKHTSAC

SEQ ID NO: 752701 - protein, 122 aa, Homo sapiens
HLLCWLAFYLTKGEGKGKGQERKREKQWTATRQSLASTVLGWNKPTDSRSSLLQPQITLHSPPQLQPLGPSLCPSPSSQASEQWFFSPTMSSQIYQNYSTEVKAAASCLVHLHLQASSIYLS

SEQ ID NO: 752702 - protein, 78 aa, Homo sapiens
MCKVPEGGLVPKSLYWTMEELENEDLKLWTETIYHSASIFKGAPHKILIQIVDASSVTTWNFDMYKGDIVFNIYHSKR

SEQ ID NO: 752703 - protein, 82 aa, Homo sapiens
VRGMITAYQGQPYSKRGRQYELCPTAAKECQDVPLEVWSLLEFSWDSSAPYLEFTVHFLFSRKPSYFSMWGKQGASFSCILL

SEQ ID NO: 752704 - protein, 31 aa, Homo sapiens
LFECRHDSQKTCSLEHFGFQIWDAQPVMQIF

SEQ ID NO: 752705 - protein, 54 aa, Homo sapiens
CGRPAGSLKALSVCLSDCGACRRSKGSVCLSDCGTCRRSKGSVAPCLELRIRCR

SEQ ID NO: 752706 - protein, 88 aa, Homo sapiens
PPARRPQPKEAAPPQGRSRGYCSESHAEPGLGLGLLVLGLPPLRGLPLRRVLLGPRLNRDASFRCLRSRSHTFTPPRAGGEASGRYRY

SEQ ID NO: 752707 - protein, 123 aa, Homo sapiens
YQSFILLLISPFTTCVSEPFLVQAWNSSVSRWPPCLSEYQPVFLVYREWRVPQASGETGPALLGGPPSWVPSPPPRRQRGRLFPLMLVLNLSPYFSPHPLPSPLQYCCLLIRSSPAPIFAMDF

SEQ ID NO: 752708 - protein, 123 aa, Homo sapiens; identical to SEQ ID NO: 752707

SEQ ID NO: 752709 - protein, 92 aa, Homo sapiens
GALGRICGGLRGRSGPVNKGFDYMDIFKRGRPRIVKSSGPHLKTSSWPWAKVSSVPQKALTPRQCLLAPKGKHSPLGTNFLDCFPSPAPTTR

SEQ ID NO: 752710 - protein, 125 aa, Homo sapiens
  misc_feature (4)..(4): Xaa can be any naturally occurring amino acid
FGTXIWGAYDGKFEKTISGHKLGISDVAWSSDSNLLVSASDDKTLKIWDVSSGKCLKTLKGHSNYVFCCNFNPQSNLIVSGSFDESVRIWDVKTGKCLKTLLAHSDPVSAIHFNRDGFLIVSSSY

SEQ ID NO: 752711 - protein, 120 aa, Homo sapiens
MGLENPWGSQKQSPTDTEGQLYLPARVRATKSTVLLGRLQTGQTFLTLILLLREAWRNIVKPEASLGGVLCVGVREGIHRLITWAGRERPCQGKRPRQQGGRSTPRGRQGGADLRSGATA

SEQ ID NO: 752712 - protein, 1061 aa, Homo sapiens
MSAYSVPSTFAQASLPVHNQVLPSIESVDGSDPLATLQTPLGRLEAKEEEDEDEDEDTEEDEEEDGEDTDLDDWEPDPPRPFDPHDLWCEECNNAHASVCPKHGPLHPIPNRPVLTRARASLPLVLYIDRFLGGVFSKRRIPKRTQFGPVEGPLVRGSELKDCYIHLKVSLDKGDRKERDLHEDLWFELSDETLCNWMMFVRPAQNHLEQNLVAYQYGHHVYYTTIKNVEPKQELKVWYAASYAEFVNQKIHDISEEERKVLREQEKNWPCYECNRRFISSEQLQQHLNSHDEKLDVFSRTRGRGRGRGKRRFGPGRRPGRPPKFIRLEITSENGEKSDDGTQDLLHFPTKEQFDEAEPATLNGLDQPEQTTIPIPQLPQETQSSLEHEPETHTLHLQPQHEESVVPTQSTLTADDMRRAKRIRLELQNAALQHLFIRKSFRPFKCLQCGKAFREKDKLDQHLRFHGREGNCPLTCDLCNKGFISSTSLESHMKLHSDQKTYSCIFCPESFDRLDLLKDHVAIHINDGYFTCPTCKKRFPDFIQVKKHVRSFHSEKIYQCTECDKAFCRPDKLRLHMLRHSDRKDFLCSTCGKQFKRKDKLREHMQRMHNPEREAKKADRISRSKTFKPRITSTDYDSFTFKCRLCMMGFRRRGMLVNHLSKRHPDMKIEEVPELTLPIIKPNRDYFCQYCDKVYKSASKRKAHILKNHPGAELPPSIRKLRPAGPGEPDPMLSTHTQLTGTIATPPVCCPHCSKQYSSKTKMVQHIRKKHPEFAQLSNTIHTPLTTAVISATPAVLTTDSATGETVVTTDLLTQAMTELSQTLTTDYRTPQGDYQRIQYIPVSQSASGLQQPQHIQLQVVQVASATSPHQSQQSTVDVGQLHDPQPYPQHAIQVQHIQVSGQPLSPSAQQAQQGLSPSHIQGSSSTQGQALQQQQQQQQNSSVQHTYLPSAWNSFRGYSSEIQMMTLPPGQFVITDSGVATPVTTGQVKAVTSGHYVLSESQSELEEKQTSALSGGVQVEPPAHSDSLDPQTNSQQQTTQYIITTTTNGNGSSEVHITKP

SEQ ID NO: 752713 - protein, 139 aa, Homo sapiens
VKLKKMKYSFQLWIAMMSAKGHDGKEPVKFVDLLGDHGKHVSPLWELIKWCLGLSVYTIPSIGLALLEEKLRYSNEKYQKFKAVEESLRKELVDMLGDDGVFLYPSHPTVAPKHHVPLTRPFNFAYTGVCTQRSLGPFI

SEQ ID NO: 752714 - protein, 139 aa, Homo sapiens
WVTRVSSWESSLQGPCSSRWVQFVTSCRGDLRDEVRNLWLKKILHEPPPTCLPLLIRGRFILGHPILEGDATAQLRPGGTELSEQQAPDGLPLAQAVIVTFETEPQLFALADVGELEHLPPFLAFAFAISTATFPGLEE

SEQ ID NO: 752715 - protein, 105 aa, Homo sapiens
MQAKVPGDPGSHLTVPYRPPEGVLELQCCVFLASTLGVPPTPTVQGFQWTLRGTDVETSPFGAPRATSHGVGRMKSCQIPQVARALEQPHKGEGNIFTVVLSLIG

SEQ ID NO: 752716 - protein, 105 aa, Homo sapiens
MQAKVPGDPGSHLTVPYRPPEGVLELQCCVFLASTLGVPPTPTVQGFQWTLRGTDVETSPFGAPRATSHGVGRMKSCQIPQMELFLFSLGSNATAPSQLTATSTS

SEQ ID NO: 752717 - protein, 269 aa, Homo sapiens
MQAKVPGDPGSHLTVPYRPPEGVLELQCCVFLASTLGVPPTPTVQGFQWTLRGTDVETSPFGAPRATSHGVGRMKSCQIPQVARALEQPHKALEDKMVKQNNIIPGETQILVRFTGWESKVNAKKQPPVGIKCEPMDQDGYLARWPQSTSLLSESALLTVLSALSGGTSNLVFVVKDPKVLWGVIIIFDNIPDSTSSATNVSMVVSAGPLSSEKAEMNILEINEKLRPQLAEKKQQFRNLKREMFSNSSGRLPGQRQKKYQYEECKDLI

SEQ ID NO: 752718 - protein, 125 aa, Homo sapiens
ASISISNPTIKDNGTFSCAVKNPPDVHHNIPMTELTVTERGFGTMLSSVALLSILVFVPSAVVVALLLVRMGRKAAGLKKRSRSGYKKSSIEVSDDTDQEEEEACMARLCVRCAECLDSDYEETY

SEQ ID NO: 752719 - protein, 794 aa, Homo sapiens
MADAWEEIRRLAADFQRAQFAEATQRLSERNCIEIVNKLIAQKQLEVVHTLDGKEYITPAQISKEMRDELHVRGGRVNIVDLQQVINVDLIHIENRIGDIIKSEKHVQLVLGQLIDENYLDRLAEEVNDKLQESGQVTISELCKTYDLPGNFLTQALTQRLGRIISGHIDLDNRGVIFTEAFVARHKARIRGLFSAITRPTAVNSLISKYGFQEQLLYSVLEELVNSGRLRGTVVGGRQDKAVFVPDIYSRTQSTWVDSFFRQNGYLEFDALSRLGIPDAVSYIKKRYKTTQLLFLKAACVGQGLVDQVEASVEEAISSGTWVDIAPLLPTSLSVEDAAILLQQVMRAFSKQASTVVFSDTVVVSEKFINDCTELFRELMHQKAEKEMKNNPVHLITEEDLKQISTLESVSTSKKDKKDERRRKATEGSGSMRGGGGGNAREYKIKKVKKKGRKDDDSDDESQSSHTGKKKPEISFMFQDEIEDFLRKHIQDAPEEFISELAEYLIKPLNKTYLEVVRSVFMSSTTSASGTGRKRTIKDLQEEVSNLYNNIRLFEKGMKFFADDTQAALTKHLLKSVCTDITNLIFNFLASDLMMAVDDPAAITSEIRKKILSKLSEETKVALTKLHNSLNEKSIEDFISCLDSAAEACDIMVKRGDKKRERQILFQHRQALAEQLKVTEDPALILHLTSVLLFQFSTHSMLHAPGRCVPQIIAFLNSKIPEDQHALLVKYQGLVVKQLVSQSKKTGQGDYPLNNELDKEQEDVASTTRKELQELSSSIKDLVLKSRKSSVTEE

SEQ ID NO: 752720 - protein, 132 aa, Homo sapiens
SSSASTASQAVMADAWEEIRRLAADFQRAQFAEATQRCPTLPLLCGAQIRPWADTPVSGTLDPRPCIPGLLAACHHSLLLPLSRAWIAVPSPRLGGKVLSLGRPGAPQPSCSEMLARPAPPWTGPVISSCLY

SEQ ID NO: 752721 - protein, 794 aa, Homo sapiens; identical to SEQ ID NO: 752719

SEQ ID NO: 752722 - protein, 103 aa, Homo sapiens
CISLQRSLCIEMSGKRDSWMKHLPQFASRWVFGFLDPLTQLPDGHAFENRQLGTLQSPGVFLLRHVSISLKKKMLPTFLHSHQKRNLLTCNENFKKLIQKLSF

SEQ ID NO: 752723 - protein, 107 aa, Homo sapiens
LLSPRLEYSGVILAHCNLCLLGSSDSPASASRVAEITGTGHHTQLIFVVLVETGFHHVGQAALELLTSGDPPASASQRAGITGMSHCAWPELRRNGEKWPLKGPKFP

SEQ ID NO: 752724 - protein, 81 aa, Homo sapiens
LLLRRLSTAQLQLKRSFGPGLSCKKRSSARRTTRSEACGWRRGAWTAAANIEPSSIPCPPYDQQKASHAKNLTAVLRKTSF

SEQ ID NO: 752725 - protein, 96 aa, Homo sapiens
MVVSLYFPTHPDSFPVLLCLVLCPGRLILRDCIPQTPFVIDFCLGLVNGMPWHSFGGKKREDNVFLHCSHSDLGYVLLAGTASLQDFSFFQKSPPP

SEQ ID NO: 752726 - protein, 569 aa, Homo sapiens
MASCSTAAFDKQPQSRERGITLDLGFSCFSVPLPARLRSSLPEFQAAPEAEPEPGEPLLQVTLVDCPGHASLIRTIIGGAQIIDLMMLVIDVTKGMQTQSAECLVIGQIACQKLVVVLNKIDLLPEGKRQAAIDKMTKKMQKTLENTKFRGAPIIPVAAKPGGPEAPETEAPQGIPELIELLTSQISIPTRDPSGPFLMSVDHCFSIKGQGTVMTGTILSGSISLGDSVEIPALKVVKKVKSMQMFHMPITSAMQGDRLGICVTQFDPKLLERGLVCAPESLHTVHAALISVEKIPYFRGPLQTKAKFHITVGHETVMGRLMFFSPAPDNFDQEPILDSFNFSQEYLFQEQYLSKDLTPAVTDNDEADKKAGQATEGHCPRQQWALVEFEKPVTCPRLCLVIGSRLDADIHTNTCRLAFHGILLHGLEDRNYADSFLPRLKVYKLKHKHGLVERAMDDYSVIGRSLFKKETNIQLFVGLKVHLSTGELGIIDSAFGQSGKFKIHIPGGLSPESKKILTPALKKRARAGRGEATRQEESAERSEPSQHVVLSLTFKRYVFDTHKRMVQSP

SEQ ID NO: 752727 - protein, 507 aa, Homo sapiens
  misc_feature (1)..(1): Xaa can be any naturally occurring amino acid
XDIVDPRAPVRGGGGGMAGRRVNVNVGVLGHIDSGKTALARALSTTASTAAFDKQPQSRERGITLDLGFSCFSVPLPARLRSSLPEFQAAPEAEPEPGEPLLQVTLVDCPGHASLIRTIIGGAQIIDLMMLVIDVTKGMQTQSAECLVIGQIACQKLVVVLNKIDLLPEGKRQAAIDKMTKKMQKTLENTKFRGAPIIPVAAKPGGPEAPETEAPQGIPELIELLTSQISIPTRDPSGPFLMSVDHCFSIKGQGTVMTGTILSGSISLGDSVEIPALKVVKKVKSMQMFHMPITSAMQGDRLGICVTQFDPKLLERGLVCAPESLHTVHAALISVEKIPYFRGPLQTKAKFHITVGHETVMGRLMFFSPAPDNFDQEPILDSFNFSQEYLFQEQYLSKDLTPAVTDNDEADKKAGQATEGHCPRQQWALVEFEKPVTCPRLCLVIGSRLDADIHTNTCRLAFHGILLHGLEDRNYADSFLPRLKVYKLKHKHGLVERVASAPSPRRS

SEQ ID NO: 752728 - protein, 612 aa, Homo sapiens
  misc_feature (1)..(1): Xaa can be any naturally occurring amino acid
XDIVDPRAPVRGGGGGMAGRRVNVNVGVLGHIDSGKTALARALSTTASTAAFDKQPQSRERGITLDLGFSCFSVPLPARLRSSLPEFQAAPEAEPEPGEPLLQVTLVDCPGHASLIRTIIGGAQIIDLMMLVIDVTKGMQTQSAECLVIGQIACQKLVVVLNKIDLLPEGKRQAAIDKMTKKMQKTLENTKFRGAPIIPVAAKPGGPEAPETEAPQGIPELIELLTSQISIPTRDPSGPFLMSVDHCFSIKGQGTVMTGTILSGSISLGDSVEIPALKVVKKVKSMQMFHMPITSAMQGDRLGICVTQFDPKLLERGLVCAPESLHTVHAALISVEKIPYFRGPLQTKAKFHITVGHETVMGRLMFFSPAPDNFDQEPILDSFNFSQEYLFQEQYLSKDLTPAVTDNDEADKKAGQATEGHCPRQQWALVEFEKPVTCPRLCLVIGSRLDADIHTNTCRLAFHGILLHGLEDRNYADSFLPRLKVYKLKHKHGLVERAMDDYSVIGRSLFKKETNIQLFVGLKVHLSTGELGIIDSAFGQSGKFKIHIPGGLSPESKKILTPALKKRARAGRGEATRQEESAERSEPSQHVVLSLTFKRYVFDTHKRMVQSP

SEQ ID NO: 752729 - protein, 612 aa, Homo sapiens; identical to SEQ ID NO: 752728
  misc_feature (1)..(1): Xaa can be any naturally occurring amino acid

SEQ ID NO: 752730 - protein, 557 aa, Homo sapiens
  misc_feature (1)..(1): Xaa can be any naturally occurring amino acid
XDIVDPRAPVRGGGGGMAGRRVNVNVGVLGHIDSGKTALARALSTTASTAAFDKQPQSRERGITLDLGFSCFSVPLPARLRSSLPEFQAAPEAEPEPGEPLLQVTLVDCPGHASLIRTIIGGAQIIDLMMLVIDVTKGMQTQSAECLVIGQIACQKLVVVLNKIDLLPEGKRQAAIDKMTKKMQKTLENTKFRGAPIIPVAAKPGGPEAPETEAPQGIPELIEVVKKVKSMQMFHMPITSAMQGDRLGICVTQFDPKLLERGLVCAPESLHTVHAALISVEKIPYFRGPLQTKAKFHITVGHETVMGRLMFFSPAPDNFDQEPILDSFNFSQEYLFQEQYLSKDLTPAVTDNDEADKKAGQATEGHCPRQQWALVEFEKPVTCPRLCLVIGSRLDADIHTNTCRLAFHGILLHGLEDRNYADSFLPRLKVYKLKHKHGLVERAMDDYSVIGRSLFKKETNIQLFVGLKVHLSTGELGIIDSAFGQSGKFKIHIPGGLSPESKKILTPALKKRARAGRGEATRQEESAERSEPSQHVVLSLTFKRYVFDTHKRMVQSP

SEQ ID NO: 752731 - protein, 612 aa, Homo sapiens; identical to SEQ ID NO: 752728
  misc_feature (1)..(1): Xaa can be any naturally occurring amino acid

SEQ ID NO: 752732 - protein, 675 aa, Homo sapiens
  misc_feature (1)..(1): Xaa can be any naturally occurring amino acid
XDIVDPRAPVRGGGGGMAGRRVNVNVGVLGHIDSGKTALARALSTTASTAAFDKQPQSRERGITLDLGFSCFSVPLPARLRSSLPEFQAAPEAEPEPGEPLLQVTLVDCPGHASLIRTIIGGAQIIDLMMLVIDVTKGMQTQSAECLVIGQIACQKLVVVLNKIDLLPEGKRQAAIDKMTKKMQKTLENTKFRGAPIIPVAAKPGGPEAPETEAPQGIPELIELLTSQISIPTRDPSGPFLMSVDHCFSIKGQGTVMTGTILSGSISLGDSVEIPALKSLGLVLREGCYPRVERMCVRHLSCAPWTLANVGGVSYSVDGERPSKLARREMTKRKACFSHSEVVKKVKSMQMFHMPITSAMQGDRLGICVTQFDPKLLERGLVCAPESLHTVHAALISVEKIPYFRGPLQTKAKFHITVGHETVMGRLMFFSPAPDNFDQEPILDSFNFSQEYLFQEQYLSKDLTPAVTDNDEADKKAGQATEGHCPRQQWALVEFEKPVTCPRLCLVIGSRLDADIHTNTCRLAFHGILLHGLEDRNYADSFLPRLKVYKLKHKHGLVERAMDDYSVIGRSLFKKETNIQLFVGLKVHLSTGELGIIDSAFGQSGKFKIHIPGGLSPESKKILTPALKKRARAGRGEATRQEESAERSEPSQHVVLSLTFKRYVFDTHKRMVQSP

SEQ ID NO: 752733 - protein, 541 aa, Homo sapiens
  misc_feature (1)..(1): Xaa can be any naturally occurring amino acid
XDIVDPRAPVRGGGGGMAGRRVNVNVGVLGHIDSGKTALARALSTTASTAAFDKQPQSRERGITLDLGFSCFSVPLPARLRSSLPEFQAAPEAEPEPGEPLLQVTLVDCPGHASLIRTIIGGAQIIDLMMLVIDVTKGMQTQSAECLVIGQIACQKLVVVLNKIDLLPEGKRQAAIDKMTKKMQKTLENTKFRGAPIIPVAAKPGGPEAPETEAPQGIPELIELLTSQISIPTRDPSGPFLMSVDHCFSIKGQGTVMTGTILSGSISLGDSVEIPALKVVKKVKSMQMFHMPITSAMQGDRLGICVTQFDPKLLERGLVCAPESLHTVHAALISVEKIPYFRGPLQTKAKFHITVGHETVMGRLMFFSPAPDNFDQEPILDSFNFSQEYLFQEQYLSKDLTPAVTDNDEADKKAGQATEGHCPRQQWALVEFEKPVTCPRLCLVIGSRLDADIHTNTCRLAFHGILLHGLEDRNYADSFLPRLKVYKLKHKHGLVERAMDDYSVIGRSLLGNWASSTVPSARAASSRSTSQVASAPSPRRS

SEQ ID NO: 752734 - protein, 244 aa, Homo sapiens
MSVVLRLRNPGLNITALMWCLLCARHCFKNFTDVKTTVVYPATEKHLQKYLRQDLRLIRETGDDYRNITLPHLESQSLSIQWVYNILDKKAEADRIVFENPDPSDGFVLIPDLKWNQQQLDDLYLIAICHRRGIRSLRDLTPEHLPLLRNILHQGQEAILQRYRMKGDHLRVYLHYLPSYYHLHVHFTALGFEAPGSGVERAHLLAEVIENLECDPRHYQQRTLTFALRADDPLLKLLQEAQQS

SEQ ID NO: 752735 - protein, 244 aa, Homo sapiens; identical to SEQ ID NO: 752734

SEQ ID NO: 752736 - protein, 344 aa, Homo sapiens
GLRVRGSMADAAPQLGKRKRELDVEEAHAASTEEKEAGVGNGTCAPVRLPFSGFRLQKVLRESARDKIIFLHGKVNEASEDGDGEDAVVILEKTPFQVEQVAQLLTGSPELQLQFSNDIYSTYHLFPPRQLNDVKTTVVYPATEKHLQKYLRQDLRLIRETGDDYRNITLPHLESQSLSIQWVYNILDKKAEADRIVFENPDPSDGFVLIPDLKWNQQQLDDLYLIAICHRRGIRSLRDLTPEHLPLLRNILHQGQEAILQRYRMKGDHLRVYLHYLPSYYHLHVHFTALGFEAPGSGVERAHLLAEVIENLECDPRHYQQRTLTFALRADDPLLKLLQEAQQS

SEQ ID NO: 752737 - protein, 201 aa, Homo sapiens
EDSGVSPTCSDHCPYQSPPSKANRQLCSRSRSSSGSSPCHSWSPATRRNFRCESRGPCSDRTPSIRHARKRREKAIGEGRVVYIQNLSSDMSSRELKRRFEVFGEIEECEVLTRNRRGEKYGFITYRCSEHAALSLTKGAALRKRNEPSFQLSYGGLRHFCWPRYTDYDSNSEEALPASGKSKYEAMDFDSLLKEAQQSLH

SEQ ID NO: 752738 - protein, 538 aa, Homo sapiens
MLQIGEDVDYLLIPREVRLAGGVWRVISKPATKEAEFRERLTQFLEEEGRTLEDVARIMEKSTPHPPQPPKKPKEPRVRRRVQQMVTPPPRLVVGTYDSSNASDSEFSDFETSRDKSRQGPRRGKKVRKMPVSYLGSKFLGSDLESEDDEELVEAFLRRQEKQPSAPPARRRVNLPVPMFEDNLGPQLSKADRWREYVSQVSWGKLKRRVKGWAPRAGPGVGEARLASTAVESAGVSSAPEGTSPGDRLGNAGDVCVPQASPRRWRPKINWASFRRRRKEQTAPTGQGADIEADQGGEAADSQREEAIADQREGAAGNQRAGAPADQGAEAADNQREEAADNQRAGAPAEEGAEAADNQREEAADNQRAEAPADQRSQGTDNHREEAADNQRAEAPADQGSEVTDNQREEAVHDQRERAPAVQGADNQRAQARAGQRAEAAHNQRAGAPGIQEAEVSAAQGTTGTAPGARARKQVKTVRFQTPGRFSWFCKRRRAFWHTPRLPTLPKRVPRAGEARNLRVLRAEARAEAEQGEQEDQL

SEQ ID NO: 752739 - protein, 538 aa, Homo sapiens; identical to SEQ ID NO: 752738

SEQ ID NO: 752740 - protein, 538 aa, Homo sapiens; identical to SEQ ID NO: 752738

SEQ ID NO: 752741 - protein, 331 aa, Homo sapiens
MLQIGEDVDYLLIPREVRLAGGVWRVISKPATKEAEFRERLTQFLEEEGRTLEDVARIMEKSTPHPPQPPKKPKEPRVRRRVQQMVTPPPRLVVGTYDSSNASDSEFSDFETSRDKSRQGPRRGKKVRKMPVSYLGSKFLGSDLESEDDEELVEAFLRRQEKQPSAPPARRRVNLPVPMFEDNLGPQLSKADRWREYVSQVSWGKLKRRVKGWAPRAGPGVGEARLASTAVESAGVSSAPEGTSPGDRLGNAGDVCVPQASPRRWRPKINWASFRRRRKEQTAPTGQGADIEADQGGEAADSQREEAIADQREGAAGNQRAGAPADQGAVA

SEQ ID NO: 752742 - protein, 138 aa, Homo sapiens
MLQIGEDVDYLLIPREVRLAGGVWRVISKPATKEAEFRERLTQFLEEEGRTLEDVARIMEKSTPHPPQPPQKAQGAPSEEESAADGDSSALAVRSTPILDDGDTCVYVVTSLAILMPRALLVWRGQGPWFAHLTRSWL

SEQ ID NO: 752743 - protein, 538 aa, Homo sapiens; identical to SEQ ID NO: 752738

SEQ ID NO: 752744 - protein, 232 aa, Homo sapiens; identical to SEQ ID NO: 752373

SEQ ID NO: 752745 - protein, 88 aa, Homo sapiens
MATGSCWSPPAPNFQQNLWNPRSRLVCPGLCRPSSDQLRTLAGSVVLYINSAAAWLSCRDCCLTGDVLASRGPSRWVPRHCRAAHSLL

SEQ ID NO: 752746 - protein, 118 aa, Homo sapiens
QPQPPPQQQHQPPPRPVHLQPMQFSTHIQQPPPPQGQQPPHPPPGQQPPPPQPAKPQQVIQHHHSPRHHKSDPYSTGHLREAPSPLMIHSPQMSQFQSLTHQSPPQQNVQPKKQVTGR

SEQ ID NO: 752747 - protein, 1296 aa, Homo sapiens
MELEKSGALLESGTYEDNYYGTPKPPAEPAPLLLNVTDQILPGATPSAEGKRKRNKSVSNMEKASIEPPEEEEEERPVVNGNGVVVTPESSEHEDKSAGASGEMPSQPYPAPVYSQPEELKEQMDDTKPTKPEDNEEPDPLPDNWEMAYTEKGEVYFIDHNTKTTSWLDPRLAKKAKPPEECKENELPYGWEKIDDPIYGTYYVDHINRRTQFENPVLEAKRKLQQHNMPHTELGTKPLQAPGFREKPLFTRDASQLKGTFLSTTLKKSNMGFGFTIIGGDEPDEFLQVKSVIPDGPAAQDGKMETGDVIVYINEVCVLGHTHADVVKLFQSVPIGQSVNLVLCRGYPLPFDPEDPANSMVPPLAIMERPPPVMVNGRHNYETYLEYISRTSQSVPDITDRPPHSLHSMPTDGQLDGTYPPPVHDDNVSMASSGATQAELMTLTIVKGAQGFGFTIADSPTGQRVKQILDIQGCPGLCEGDLIVEINQQNVQNLSHTEVVDILKDCPIGSETSLIIHRGGFFSPWKTPKPIMDRWENQGSPQTSLSAPAIPQNLPFPPALHRSSFPDSTEAFDPRKPDPYELYEKSRAIYESRRPDYKELDVHLRRMESGFGFRILGGDEPGQPILIGAVIAMGSADRDGRLHPGDELVYVDGIPVAGKTHRYVIDLMHHAARNGQVNLTVRRKVLCGGEPCPENGRSPGSVSTHHSSPRSDYATYTNSNHAAPSSNASPPEGFASHSLQTSDVVIHRKENEGFGFVIISSLNRPESGSTITVPHKIGRIIDGSPADRCAKLKVGDRILAVNGQSIINMPHADIVKLIKDAGLSVTLRIIPQEELNSPTSAPSSEKQSPMAQQSPLAQQSPLAQPSPATPNSPIAQPAPPQPLQLQGHENSYRSEVKARQDVKPDIRQPPFTDYRQPPLDYRQPPGGDYQQPPPLDYRQPPLLDYRQHSPDTRQYPLSDYRQPQDFDYFTVDMEKGAKGFGFSIRGGREYKMDLYVLRLAEDGPAIRNGRMRVGDQIIEINGESTRDMTHARAIELIKSGGRRVRLLLKRGTGQVPEYDEPAPWSSPAAAAPGLPEVGVSLDDGLAPFSPSHPAPPSDPSHQISPGPTWDIKREHDVRKPKELSACGQKKQRLGEQRERSASPQRAARPRLEEAPGGQGRPEAGRPASEARAPGLAAADAADAARAGGKEAPRAAAGSELCRREGPGAAPAFAGPGRRRQRRAGGRGQGGCARGSPAGARDPRGAPRRARPPSRRGPGRCRVLTSCPASSNPAPRPPADEPRGHGQPARPGAGSSS

SEQ ID NO: 752748 - protein, 98 aa, Homo sapiens
AGRLEEDPPLAKLKVFYRILAVNGQSIINMPHADIVKLIKDAGLSVTLRIIPQEGECLRQPCREAANTWTHSPGVLSLPARVAECTCLPSLWCQSVRG

SEQ ID NO: 752749 - protein, 1473 aa, Homo sapiens
MSKSLKKKSHWTSKVHESVIGRNPEGQLGFELKGGAENGQFPYLGEVKPGKVAYESGSKLVSEELLLEVNETPVAGLTIRDVLAVIKHCKDPLRLKCVKQGGIVDKDLRHYLNLRFQKGSVDHELQQIIRDNLYLRTVPCTTRPHKEGEVPGVDYIFITVEDFMELEKSGALLESGTYEDNYYGTPKPPAEPAPLLLNVTDQILPGATPSAEGKRKRNKSVSNMEKASIEPPEEEEEERPVVNGNGVVVTPESSEHEDKSAGASGEMPSQPYPAPVYSQPEELKEQMDDTKPTKPEDNEEPDPLPDNWEMAYTEKGEVYFIDHNTKTTSWLDPRLAKKAKPPEECKENELPYGWEKIDDPIYGTYYVDHINRRTQFENPVLEAKRKLQQHNMPHTELGTKPLQAPGFREKPLFTRDASQLKGTFLSTTLKKSNMGFGFTIIGGDEPDEFLQVKSVIPDGPAAQDGKMETGDVIVYINEVCVLGHTHADVVKLFQSVPIGQSVNLVLCRGYPLPFDPEDPANSMVPPLAIMERPPPVMVNGRHNYETYLEYISRTSQSVPDITDRPPHSLHSMPTDGQLDGTYPPPVHDDNVSMASSGATQAELMTLTIVKGAQGFGFTIADSPTGQRVKQILDIQGCPGLCEGDLIVEINQQNVQNLSHTEVVDILKDCPIGSETSLIIHRGGFFSPWKTPKPIMDRWENQGSPQTSLSAPAIPQNLPFPPALHRSSFPDSTEAFDPRKPDPYELYEKSRAIYESRQQVPPRTSFRMDSSGPDYKELDVHLRRMESGFGFRILGGDEPGQPILIGAVIAMGSADRDGRLHPGDELVYVDGIPVAGKTHRYVIDLMHHAARNGQVNLTVRRKVLCGGEPCPENGRSPGSVSTHHSSPRSDYATYTNSNHAAPSSNASPPEGFASHSLQTSDVVIHRKENEGFGFVIISSLNRPESGSTITVPHKIGRIIDGSPADRCAKLKVGDRILAVNGQSIINMPHADIVKLIKDAGLSVTLRIIPQEELNSPTSAPSSEKQSPMAQQSPLAQQSPLAQPSPATPNSPIAQPAPPQPLQLQGHENSYRSEVKARQDVKPDIRQPPFTDYRQPPLDYRQPPGGDYQQPPPLDYRQPPLLDYRQHSPDTRQYPLSDYRQPQDFDYFTVDMEKGAKGFGFSIRGGREYKMDLYVLRLAEDGPAIRNGRMRVGDQIIEINGESTRDMTHARAIELIKSGGRRVRLLLKRGTGQVPEYDEPAPWSSPAAAAPGLPEVGVSLDDGLAPFSPSHPAPPSDPSHQISPGPTWDIKREHDVRKPKELSACGQKKQRLGEQRERSASPQRAARPRLEEAPGGQGRPEAGRPASEARAPGLAAADAADAARAGGKEAPRAAAGSELCRREGPGAAPAFAGPGRRRQRRAGGRGQGGCARGSPAGARDPRGAPRRARPPSRRGPGRCRVLTSCPASSNPAPRPPADEPRGHGQPARPGAGSSS

SEQ ID NO: 752750 - protein, 1473 aa, Homo sapiens; identical to SEQ ID NO: 752749

SEQ ID NO: 752751 - protein, 1340 aa, Homo sapiens
MELEKSGALLESGTYEDNYYGTPKPPAEPAPLLLNVTDQILPGATPSAEGKRKRNKSVSNMEKASIEPPEEEEEERPVVNGNGVVVTPESSEHEDKSAGASGEMPSQPYPAPVYSQPEELKEQMDDTKPTKPEDNEEPDPLPDNWEMAYTEKGEVYFIDHNTKTTSWLDPRLAKKAKPPEECKENELPYGWEKIDDPIYGTYYVDHINRRTQFENPVLEAKRKLQQHNMPHTELGTKPLQAPGFREKPLFTRDASQLKGTFLSTTLKKSNMGFGFTIIGGDEPDEFLQVKSVIPDGPAAQDGKMETGDVIVYINEVCVLGHTHADVVKLFQSVPIGQSVNLVLCRGYPLPFDPEDPANSMVPPLAIMERPPPVMVNGRHNYETYLEYISRTSQSVPDITDRPPHSLHSMPTDGQLDGTYPPPVHDDNVSMASSGATQAELMTLTIVKGAQGFGFTIADSPTGQRVKQILDIQGCPGLCEGDLIVEINQQNVQNLSHTEVVDILKDCPIGSETSLIIHRGGFFSPWKTPKPIMDRWENQGSPQTSLSAPAIPQNLPFPPALHRSSFPDSTEAFDPRKPDPYELYEKSRAIYESRQQVPPRTSFRMDSSGPDYKELDVHLRRMESGFGFRILGGDEPGQPILIGAVIAMGSADRDGRLHPGDELVYVDGIPVAGKTHRYVIDLMHHAARNGQVNLTVRRKVLCGGEPCPENGRSPGSVSTHHSSPRSDYATYTNSNHAAPSSNASPPEGFASHSLQTSDVVIHRKENEGFGFVIISSLNRPESGSTITVPHKIGRIIDGSPADRCAKLKVGDRILAVNGQSIINMPHADIVKLIKDAGLSVTLRIIPQEELNSPTSAPSSEKQSPMAQQSPLAQQSPLAQPSPATPNSPIAQPAPPQPLQLQGHENSYRSEVKARQDVKPDIRQPPFTDYRQPPLDYRQPPGGDYQQPPPLDYRQPPLLDYRQHSPDTRQYPLSDYRQPQDFDYFTVDMEKGAKGFGFSIRGGREYKMDLYVLRLAEDGPAIRNGRMRVGDQIIEINGESTRDMTHARAIELIKSGGRRVRLLLKRGTGQVPEYGMVPSSLSMCMKSDKHGSPYFYLLGHPKDTDEPAPWSSPAAAAPGLPEVGVSLDDGLAPFSPSHPAPPSDPSHQISPGPTWDIKREHDVRKPKELSACGQKKQRLGEQRERSASPQRAARPRLEEAPGGQGRPEAGRPASEARAPGLAAADAADAARAGGKEAPRAAAGSELCRREGPGAAPAFAGPGRRRQRRAGGRGQGGCARGSPAGARDPRGAPRRARPPSRRGPGRCRVLTSCPASSNPAPRPPADEPRGHGQPARPGAGSSS

SEQ ID NO: 752752 - protein, 1473 aa, Homo sapiens; identical to SEQ ID NO: 752749

SEQ ID NO: 752753 - protein, 802 aa, Homo sapiens
MELEKSGALLESGTYEDNYYGTPKPPAEPAPLLLNVTDQILPGATPSAEGKRKRNKSVSNMEKASIEPPEEEEEERPVVNGNGVVVTPESSEHEDKSAGASGEMPSQPYPAPVYSQPEELKEQMDDTKPTKPEDNEEPDPLPDNWEMAYTEKGEVYFIDHNTKTTSWLDPRLAKKAKPPEECKENELPYGWEKIDDPIYGTYYVDHINRRTQFENPVLEAKRKLQQHNMPHTELGTKPLQAPGFREKPLFTRDASQLKGTFLSTTLKKSNMGFGFTIIGGDEPDEFLQVKSVIPDGPAAQDGKMETGDVIVYINEVCVLGHTHADVVKLFQSVPIGQSVNLVLCRGYPLPFDPEDPANSMVPPLAIMERPPPVMVNGRHNYETYLEYISRTSQSVPDITDRPPHSLHSMPTDGQLDGTYPPPVHDDNVSMASSGATQAELMTLTIVKGAQGFGFTIADSPTGQRVKQILDIQGCPGLCEGDLIVEINQQNVQNLSHTEVVDILKDCPIGSETSLIIHRGGFFSPWKTPKPIMDRWENQGSPQTSLSAPAIPQNLPFPPALHRSSFPDSTEAFDPRKPDPYELYEKSRAIYESRQQVPPRTSFRMDSSGPDYKELDVHLRRMESGFGFRILGGDEPGQPILIGAVIAMGSADRDGRLHPGDELVYVDGIPVAGKTHRYVIDLMHHAARNGQVNLTVRRKVLCGGEPCPENGRSPGSVSTHHSSPRSDYATYTNSNHAAPSSNASPPEGFASHSLQTSDVVIHRKENEGFGFVIISSLNRPESGSTIIFQSSFSSLQAVEQKRG

SEQ ID NO: 752754 - protein, 104 aa, Homo sapiens
AELLGKMDEARRWYEEALALSPTHVKSMQRLALILHQLGRYSLAEKILRDAVQVNSTAHEVWNGLGEVLQAQGNDAAATECFLTALELEASSPAVPFTIIPRVL

SEQ ID NO: 752755 - protein, 135 aa, Homo sapiens
HNERSYKCNKCDRFFRYRSYIAIHHRTHAGEKPYKCHDCGKVFSQVSSYAKHRRIHTGEKLTSVMIVAKRLLHIHTSIDIRESMLDRNLTNVISVVRSSVRDHSLQTIRQFLLETVVSNAISIASHQALIDITVK

SEQ ID NO: 752756 - protein, 138 aa, Homo sapiens
MCHAHSRVITHVHTGTYSAHAHTLTHCAHTFTHTMHTCNYTHMHTGTHTTHAHTPSHTCAHTFTHTMPTHVITHMHTYAFTCTHMQIHSCLHTVIHMHTHAHTKIYVHTHAHNAFTCTHSYTHSTCPLMQLHVSTHIH

SEQ ID NO: 752757 - protein, 104 aa, Homo sapiens
FPRGSPALQPAHHLPCQPPHRERAGGYREKRGCPEHKGTRPNPFSPQGSSPGDSLSFPQLHCLAPSCPDLSRPRRKYVEARGPLAVSDSRGCLSLHGLVRHCRF

SEQ ID NO: 752758 - protein, 104 aa, Homo sapiens; identical to SEQ ID NO: 752757

SEQ ID NO: 752759 - protein, 455 aa, Homo sapiens
REPDGSALGLTRGLGRCCPGGSAWAGRQPRDTAVPTPSEHPKPDAATPRRGPQGHGRGHPVVQVEPPCVCMTLTSRRQDSQEARPECQAWTGTLLLGTCLLYCARSSMPICTVSMSQDFGWNKKEAGIVLSSFFWGYCLTQVVGGHLGDRIGGEKVILLSASAWGSITAVTPLLAHLSSAHLAFMTFSRILMGLLQGVYFPALTSLLSQKVRESERAFTYSIVGAGSQFGTLLTGAVGSLLLEWYGWQSIFYFSGGLTLLWVWYVYRSHPGLGCPGPKPAGVQAQQSPLETALPEACCLGSRVSQLSAACSFFILLSWLPTFFEETFPDAKGWIFNVVPWLVAIPASLFSGFLSDHLINQGYRAITVRKLMQGMGLGLSSVFALCLGHTSSFCESVVFASASIGLQTFNHSGISVNIQDLAPSCAGFLFGVANTAGALAGEGRASVPRSSPVCGV

SEQ ID NO: 752760 - protein, 398 aa, Homo sapiens
MQPPPDEARRDMAGDTQWSRPECQAWTGTLLLGTCLLYCARSSMPICTVSMSQDFGWNKKEAGIVLSSFFWGYCLTQVVGGHLGDRIGGEKVILLSASAWGSITAVTPLLAHLSSAHLAFMTFSRILMGLLQGVYFPALTSLLSQKVRESERAFTYSIVGAGSQFGTLLTGAVGSLLLEWYGWQSIFYFSGGLTLLWVWYVYRYLLSEKDLILALGVLAQSRPVSRHSRVPWRRLFRKPAVWAAVVSQLSAACSFFILLSWLPTFFEETFPDAKGWIFNVVPWLVAIPASLFSGFLSDHLINQGYRAITVRKLMQGMGLGLSSVFALCLGHTSSFCESVVFASASIGLQTFNHSGISVNIQDLAPSCAGFLFGVANTAGALAGEGRASVPRSSPVCGV

SEQ ID NO: 752761 - protein, 436 aa, Homo sapiens
MQPPPDEARRDMAGDTQWSRPECQAWTGTLLLGTCLLYCARSSMPICTVSMSQDFGWNKKEAGIVLSSFFWGYCLTQVVGGHLGDRIGGEKVILLSASAWGSITAVTPLLAHLSSAHLAFMTFSRILMGLLQGVYFPALTSLLSQKVRESERAFTYSIVGAGSQFGTLLTGAVGSLLLEWYGWQSIFYFSGGLTLLWVWYVYRYLLSEKDLILALGVLAQSRPVSRHSRVPWRRLFRKPAVWAAVVSQLSAACSFFILLSWLPTFFEETFPDAKGWIFNVVPWLVAIPASLFSGFLSDHLINQGYRAITVRKLMQGMGLGLSSVFALCLGHTSSFCESVVFASASIGLQTFNHSGISVNIQDLAPSCAGFLFGVANTAGALAGVVGVCLGGYLMETTGSWTCLFNLVAIISNLGLCTFLVFGQAQRVDLSSTHEDL

SEQ ID NO: 752762 - protein, 132 aa, Homo sapiens
MNYTQRELQMAAPTHLNHTVVGTPCGNQTLATTRRKHLAWRERRPAHTTPARARDGNPNIGVGAADKPPSLLNHARRSSLPNRPPRSTGGDESLITHNPSYSHGRRAILHACVVPHHTERRVASIICRPGPR

SEQ ID NO: 752763 - protein, 113 aa, Homo sapiens
REAGAHVQPEAWTRPADPSGTTPKSPILWQRVAPPALIAISLKPLLPQISSWPWVSWPKAGRCPGTAESPGDGSSGSLLSGQPSSPSSLQPAPSSSSSPGCPPSSRRPSPTPR

SEQ ID NO: 752764 - protein, 411 aa, Homo sapiens
MFPRPGALSWTVRRHTPRQVEPPCVCMTLTSRRQDSQEARPECQAWTGTLLLGTCLLYCARSSMPICTVSMSQDFGWNKKEAGIVLSSFFWGYCLTQVVGGHLGDRIGGEKVILLSASAWGSITAVTPLLAHLSSAHLAFMTFSRILMGLLQGVYFPALTSLLSQKVRESERAFTYSIVGAGSQFGTLLTGAVGSLLLEWYGWQSIFYFSGGLTLLWVWYVYRSHPGLGCPGPKPAGVQAQQSPLETALPEACCLGSRVSQLSAACSFFILLSWLPTFFEETFPDAKGWIFNVVPWLVAIPASLFSGFLSDHLINQGYRAITVRKLMQGMGLGLSSVFALCLGHTSSFCESVVFASASIGLQTFNHSGISVNIQDLAPSCAGFLFGVANTAGALAGEGRASVPRSSPVCGV

SEQ ID NO: 752765 - protein, 493 aa, Homo sapiens
REPDGSALGLTRGLGRCCPGGSAWAGRQPRDTAVPTPSEHPKPDAATPRRGPQGHGRGHPVVQVEPPCVCMTLTSRRQDSQEARPECQAWTGTLLLGTCLLYCARSSMPICTVSMSQDFGWNKKEAGIVLSSFFWGYCLTQVVGGHLGDRIGGEKVILLSASAWGSITAVTPLLAHLSSAHLAFMTFSRILMGLLQGVYFPALTSLLSQKVRESERAFTYSIVGAGSQFGTLLTGAVGSLLLEWYGWQSIFYFSGGLTLLWVWYVYRSHPGLGCPGPKPAGVQAQQSPLETALPEACCLGSRVSQLSAACSFFILLSWLPTFFEETFPDAKGWIFNVVPWLVAIPASLFSGFLSDHLINQGYRAITVRKLMQGMGLGLSSVFALCLGHTSSFCESVVFASASIGLQTFNHSGISVNIQDLAPSCAGFLFGVANTAGALAGVVGVCLGGYLMETTGSWTCLFNLVAIISNLGLCTFLVFGQAQRVDLSSTHEDL

SEQ ID NO: 752766 - protein, 493 aa, Homo sapiens; identical to SEQ ID NO: 752765

SEQ ID NO: 752767 - protein, 161 aa, Homo sapiens
IHENTLLIFHRYRAEGKYKDDPVDLRLDIERRKKHKERDLKRGKSRESVDSRDSSHSRERSAEKTEKTHKGSKKQKKHRRARDRSRSSSSSSQSSHSYKAEEYTEETEEREESTTGFDKSRLGTKDFVGPSERGGGRARGTFPLPLGLLCCFPLTLLHFYS

SEQ ID NO: 752768 - protein, 955 aa, Homo sapiens
MSKTNKSKSGSRSSRSRSASRSRSRSFSKSRSRSRSLSRSRKRRLSSRSRSRSYSPAHNRERNHPRVYQNRDFRGHNRGYRRPYYFRGRNRGFYPWGQYNRGGYGNYRSNWQNYRQAYSPRRGRSRSRSPKRRSPSPRSRSHSRNSDKSSSDRSRRSSSSRSSSNHSRVESSKRKSAKEKKSSSKDSRPSQAAGDNQGDEVKEQTFSGGTSQDTKASESSKPWPDATYGTGSASRASAVSELSPRERSPALKSPLQSVVVRRRSPRPSPVPKPSPPLSSTSQMGSTLPSGAGYQSGTHQGQFDHGSGSLSPSKKSPVGKSPPSTGSTYGSSQKEESAASGGAAYTKRYLEEQKTENGKDKEQKQTNTDKEKIKEKGSFSDTGLGDGKMKSDSFAPKTDSEKPFRGSQSPKRYKLRDDFEKKMADFHKEEMDDQDKDKAKGRKESEFDDEPKFMSKVIGANKNQEEEKSGKWEGLVYAPPGKEKQRKTEELEEESFPERSKKEDRGKRSEGGHRGFVPEKNFRVTAYKAVQEKSSSPPPRKTSESRDKLGAKGDFPTGKSSFSITREAQVNVRMDSFDEDLARPSGLLAQERKLCRDLVHSNKKEQEFRSIFQHIQSAQSQRSPSELFAQHIVTIVHHVKEHHFGSSGMTLHERFTKYLKRGTEQEAAKNKKSPEIHRRIDISPSTFRKHGLAHDEMKSPREPGYKAEGKYKDDPVDLRLDIERRKKHKERDLKRGKSRESVDSRDSSHSRERSAEKTEKTHKGSKKQKKHRRARDRSRSSSSSSQSSHSYKAEEYTEETEEREESTTGFDKSRLGTKDFVGPSERGGGRARGTFQFRARGRGWGRGNYSGNNNNNSNNDFQKRNREEEWDPEYTPKSKKYYLHDDREGEGSDKWVSRGRGRGAFPRGRGRFMFRKSSTSPKWAHDKFSGEEGEIEDDESGTENREEKDNIQPTTE

SEQ ID NO: 752769 - protein, 955 aa, Homo sapiens; identical to SEQ ID NO: 752768

SEQ ID NO: 752770 - protein, 955 aa, Homo sapiens; identical to SEQ ID NO: 752768

SEQ ID NO: 752771 - protein, 955 aa, Homo sapiens; identical to SEQ ID NO: 752768

SEQ ID NO: 752772 - protein, 955 aa, Homo sapiens; identical to SEQ ID NO: 752768

SEQ ID NO: 752773 - protein, 955 aa, Homo sapiens; identical to SEQ ID NO: 752768

SEQ ID NO: 752774 - protein, 955 aa, Homo sapiens; identical to SEQ ID NO: 752768

SEQ ID NO: 752775 - protein, 884 aa, Homo sapiens
MSKTNKSKSGSRSSRSRSASRSRSRSFSKSRSRSRSLSRSRKRRLSSRSRSRSYSPAHNRERNHPRVYQNRDFRGHNRGYRRPYYFRGRNRGFYPWGQYNRGGYGNYRSNWQNYRQAYSPRRGRSRSRSPKRRSPSPRSRSHSRNSDKSSSDRSRRSSSSRSSSNHSRVESSKRKSAKEKKSSSKDSRPSQAAGDNQGDEVKEQTFSGGTSQDTKASESSKPWPDATYGTGSASRASAVSELSPRERSPALKSPLQSVVVRRRSPRPSPVPKPSPPLSSTSQMGSTLPSGAGYQSGTHQGQFDHGSGSLSPSKKSPVGKSPPSTGSTYGSSQKEESAASGGAAYTKRYLEEQKTENGKDKEQKQTNTDKEKIKEKGSFSDTGLGDGKMKSDSFAPKTDSEKPFRGSQSPKRYKLRDDFEKKMADFHKEEMDDQDKDKAKGRKETLILERENKSMWINFEVFTSVWDQTAWFFVKTGFVCQGDFPTGKSSFSITREAQVNVRMDSFDEDLARPSGLLAQERKLCRDLVHSNKKEQEFRSIFQHIQSAQSQRSPSELFAQHIVTIVHHVKEHHFGSSGMTLHERFTKYLKRGTEQEAAKNKKSPEIHRRIDISPSTFRKHGLAHDEMKSPREPGYKAEGKYKDDPVDLRLDIERRKKHKERDLKRGKSRESVDSRDSSHSRERSAEKTEKTHKGSKKQKKHRRARDRSRSSSSSSQSSHSYKAEEYTEETEEREESTTGFDKSRLGTKDFVGPSERGGGRARGTFQFRARGRGWGRGNYSGNNNNNSNNDFQKRNREEEWDPEYTPKSKKYYLHDDREGEGSDKWVSRGRGRGAFPRGRGRFMFRKSSTSPKWAHDKFSGEEGEIEDDESGTENREEKDNIQPTTE

SEQ ID NO: 752776 - protein, 955 aa, Homo sapiens; identical to SEQ ID NO: 752768

SEQ ID NO: 752777 - protein, 955 aa, Homo sapiens; identical to SEQ ID NO: 752768

SEQ ID NO: 752778 - protein, 1087 aa, Homo sapiens
MSKTNKSKSGSRSSRSRSASRSRSRSFSKSRSRSRSLSRSRKRRLSSRSRSRSYSPAHNRERNHPRVYQNRDFRGHNRGYRRPYYFRGRNRGFYPWGQYNRGGYGNYRSNWQNYRQAYSPRRGRSRSRSPKRRSPSPRSRSHSRNSDKSSSDRSRRSSSSRSSSNHSRVESSKRKSAKEKKSSSKDSRPSQAAGDNQGDEVKEQTFSGGTSQDTKASESSKPWPDATYGTGSASRASAVSELSPRERSPALKSPLQSVVVRRRSPRPSPVPKPSPPLSSTSQMGSTLPSGAGYQSGTHQGQFDHGSGSLSPSKKSPVGKSPPSTGSTYGSSQKEESAASGGAAYTKSINFLYDYSAMMFSHLKFALDSTNVSQRTVEICGSAIKKKYGLCQNEWPLELLDPLAPTIYYVRSASAYHGEELHPQYPPVEETGQNGKGQGIVQEGLVLKPQGGCMSQEKPTRLRVRRGHDSASVFLPWGTRYLEEQKTENGKDKEQKQTNTDKEKIKEKGSFSDTGLGDGKMKSDSFAPKTDSEKPFRGSQSPKRYKLRDDFEKKMADFHKEEMDDQDKDKAKGRKESEFDDEPKFMSKVIGANKNQEEEKSGKWEGLVYAPPGKEKQRKTEELEEESFPERSKKEDRGKRSEGGHRGFVPEKNFRVTAYKAVQEKSSSPPPRKTSESRDKLGAKGDFPTGKSSFSITREAQVNVRMDSFDEDLARPSGLLAQERKLCRDLVHSNKKEQEFRSIFQHIQSAQSQRSPSELFAQHIVTIVHHVKEHHFGSSGMTLHERFTKYLKRGTEQEAAKNKKSPEIHRRIDISPSTFRKHGLAHDEMKSPREPGYKAEGKYKDDPVDLRLDIERRKKHKERDLKRGKSRESVDSRDSSHSRERSAEKTEKTHKGSKKQKKHRRARDRSRSSSSSSQSSHSYKAEEYTEETEEREESTTGFDKSRLGTKDFVGPSERGGGRARGTFQFRARGRGWGRGNYSGNNNNNSNNDFQKRNREEEWDPEYTPKSKKYYLHDDREGEGSDKWVSRGRGRGAFPRGRGRFMFRKSSTSPKWAHDKFSGEEGEIEDDESGTENREEKDNIQPTTE

SEQ ID NO: 752779 - protein, 955 aa, Homo sapiens; identical to SEQ ID NO: 752768

SEQ ID NO: 752780 - protein, 955 aa, Homo sapiens; identical to SEQ ID NO: 752768

SEQ ID NO: 752781 - protein, 905 aa, Homo sapiens
RTRGSTHASGERNHPRVYQNRDFRGHNRGYRRPYYFRGRNRGFYPWGQYNRGGYGNYRSNWQNYRQAYSPRRGRSRSRSPKRRSPSPRSRSHSRNSDKSSSDRSRRSSSSRSSSNHSRVESSKRKSAKEKKSSSKDSRPSQAAGDNQGDEVKEQTFSGGTSQDTKASESSKPWPDATYGTGSASRASAVSELSPRERSPALKSPLQSVVVRRRSPRPSPVPKPSPPLSSTSQMGSTLPSGAGYQSGTHQGQFDHGSGSLSPSKKSPVGKSPPSTGSTYGSSQKEESAASGGAAYTKRYLEEQKTENGKDKEQKQTNTDKEKIKEKGSFSDTGLGDGKMKSDSFAPKTDSEKPFRGSQSPKRYKLRDDFEKKMADFHKEEMDDQDKDKAKGRKESEFDDEPKFMSKVIGANKNQEEEKSGKWEGLVYAPPGKEKQRKTEELEEESFPERSKKEDRGKRSEGGHRGFVPEKNFRVTAYKAVQEKSSSPPPRKTSESRDKLGAKGDFPTGKSSFSITREAQVNVRMDSFDEDLARPSGLLAQERKLCRDLVHSNKKEQEFRSIFQHIQSAQSQRSPSELFAQHIVTIVHHVKEHHFGSSGMTLHERFTKYLKRGTEQEAAKNKKSPEIHRRIDISPSTFRKHGLAHDEMKSPREPGYKAEGKYKDDPVDLRLDIERRKKHKERDLKRGKSRESVDSRDSSHSRERSAEKTEKTHKGSKKQKKHRRARDRSRSSSSSSQSSHSYKAEEYTEETEEREESTTGFDKSRLGTKDFVGPSERGGGRARGTFQFRARGRGWGRGNYSGNNNNNSNNDFQKRNREEEWDPEYTPKSKKYYLHDDREGEGSDKWVSRGRGRGAFPRGRGRFMFRKSSTSPKWAHDKFSGEEGEIEDDESGTENREEKDNIQPTTE

SEQ ID NO: 752782 - protein, 936 aa, Homo sapiens
MSKTNKSKSGSRSSRSRSASRSRSRSFSKSRSRSRSLSRSRKRRLSSRSRSRSYSPAHNRERNHPRVYQNRDFRGHNRGYRRPYYFRGRNRGFYPWGQYNRGGYGNYRSNWQNYRQAYSPRRGRSRSRSPKRRSPSPRSRSHSRNSDKSSSDRSRRSSSSRSSSNHSRVESSKRKSAKEDEVKEQTFSGGTSQDTKASESSKPWPDATYGTGSASRASAVSELSPRERSPALKSPLQSVVVRRRSPRPSPVPKPSPPLSSTSQMGSTLPSGAGYQSGTHQGQFDHGSGSLSPSKKSPVGKSPPSTGSTYGSSQKEESAASGGAAYTKRYLEEQKTENGKDKEQKQTNTDKEKIKEKGSFSDTGLGDGKMKSDSFAPKTDSEKPFRGSQSPKRYKLRDDFEKKMADFHKEEMDDQDKDKAKGRKESEFDDEPKFMSKVIGANKNQEEEKSGKWEGLVYAPPGKEKQRKTEELEEESFPERSKKEDRGKRSEGGHRGFVPEKNFRVTAYKAVQEKSSSPPPRKTSESRDKLGAKGDFPTGKSSFSITREAQVNVRMDSFDEDLARPSGLLAQERKLCRDLVHSNKKEQEFRSIFQHIQSAQSQRSPSELFAQHIVTIVHHVKEHHFGSSGMTLHERFTKYLKRGTEQEAAKNKKSPEIHRRIDISPSTFRKHGLAHDEMKSPREPGYKAEGKYKDDPVDLRLDIERRKKHKERDLKRGKSRESVDSRDSSHSRERSAEKTEKTHKGSKKQKKHRRARDRSRSSSSSSQSSHSYKAEEYTEETEEREESTTGFDKSRLGTKDFVGPSERGGGRARGTFQFRARGRGWGRGNYSGNNNNNSNNDFQKRNREEEWDPEYTPKSKKYYLHDDREGEGSDKWVSRGRGRGAFPRGRGRFMFRKSSTSPKWAHDKFSGEEGEIEDDESGTENREEKDNIQPTTE

SEQ ID NO: 752783 - protein, 364 aa, Homo sapiens
PNFRSFNSSNKKEQEFRSIFQHIQSAQSQRSPSELFAQHIVTIVHHVKEHHFGSSGMTLHERFTKYLKRGTEQEAAKNKKSPEIHRRIDISPSTFRKHGLAHDEMKSPREPGYKAEGKYKDDPVDLRLDIERRKKHKERDLKRGKSRESVDSRDSSHSRERSAEKTEKTHKGSKKQKKHRRARDRSRSSSSSSQSSHSYKAEEYTEETEEREESTTGFDKSRLGTKDFVGPSERGGGRARGTFQFRARGRGWGRGNYSGNNNNNSNNDFQKRNREEEWDPEYTPKSKKYYLHDDREGEGSDKWVSRGRGRGAFPRGRGRFMFRKSSTSPKWAHDKFSGEEGEIEDDESGTENREEKDNIQPTTE

SEQ ID NO: 752784 - protein, 899 aa, Homo sapiens
MSKTNKSKSGSRSSRSRSASRSRSRSFSKSRSRSRSLSRSRKRRLSSRSRSRSYSPAHNRERNHPRVYQNRDFRGHNRGYRRPYYFRGRNRGFYPWGQYNRGGYGNYRSNWQNYRQAYSPRRGRSRSRSPKRRSPSPRSRSHSRNSDKSSSDRSRRSSSSRSSSNHSRVESSKRKSAKEKKSSSKDSRPSQAAGDNQGDEVKEQTFSGGTSQDTKASESSKPWPDATYGTGSASRASAVSELSPRERSPALKSPLQSVVVRRRSPRPSPVPKPSPPLSSTSQMGSTLPSGAGYQSGTHQGQFDHGSGSLSPSKKSPVGKSPPSTGSTYGSSQKEESAASGGAAYTKRYLEEQKTENGKDKEQKQTNTDKEKIKEKGSFSDTGLGDGKMKSDSFAPKTDSEKPFRGSQSPKRYKLRDDFEKKMADFHKEEMDDQDKDKAKGRKESEFDDEPKFMSKVIGANKNQEEEKSGKWEGLVYAPPGKEKQRKTEELEEESFPERSKKEDRGKRSEGGHRGFVPEKNFRVTAYKAVQEKSSSPPPRKTSESRDKLGAKGDFPTGKSSFSITREAQVNVRMDSFDEDLARPSGLLAQERKLCRDLVHSNKKEQEFRSIFQHIQSAQSQRSPSELFAQHIVTIVHHVKEHHFGSSGMTLHERFTKYLKRGTEQEAAKNKKSPEIHRRIDISPSTFRKHGLAHDEMKSPREPGYKAEGKYKDDPVDLRLDIERRKKHKERDLKRGKSRESVDSRDSSHSRERSAEKTEKTHKGSKKQKKHRRARDRSRSSSSSSQSSHSYKAEEYTEETEEREESTTGFDKSRLGTKDFVGPSERGGGRARGTFQFRARGRGWGRGNYSGNNNNNSNNDFQKRNREEEWDPEYTPKSKKYYLHMTVKRRQYVPHPDSST

SEQ ID NO: 752785 - protein, 201 aa, Homo sapiens
CSATAERMPPGLLRENTKMILLISALILNVVKNIRREILNEVNRENQWIPETPVTQGKGQLKKQRKLIKDQRNRRSIGEQETGPDPPPLPPSHLTPTKQKSTLKRQRKERRAPRALTNQDWGPKTLWVQVKEEVAELEEPFSFEPEEEAGAEATTLGTITTTATTIFKKETGKRSGTQSTHPKARSITCMMTVKAKAVTSG

SEQ ID NO: 752786 - protein, 720 aa, Homo sapiens [sequence omitted]

SEQ ID NO: 752787 - protein, 87 aa, Homo sapiens
PPYQLRPKSKKYYLHDDREGEGSDKWVSRGRGRGAFPRGRGRFMFRKSSTSPKWAHDKFSGEEGEIEDDESGTENREEKDNIQPTTE

SEQ ID NO: 752788 - protein, 708 aa, Homo sapiens
MSKTNKSKSGSRSSRSRSASRSRSRSFSKSRSRSRSLSRSRKRRLSSRSRSRSYSPAHNRERNHPRVYQNRDFRGHNRGYRRPYYFRGRNRGFYPWGQYNRGGYGNYRSNWQNYRQAYSPRRGRSRSRSPKRRSPSPRSRSHSRNSDKSSSDRSRRSSSSRSSSNHSRVESSKRKSAKEKKSSSKDSRPSQAAGDNQGDEVKEQTFSGGTSQDTKASESSKPWPDATYGTGSASRASAVSELSPRERSPALKSPLQSVVVRRRSPRPSPVPKPSPPLSSTSQMGSTLPSGAGYQSGTHQGQFDHGSGSLSPSKKSPVGKSPPSTGSTYGSSQKEESAASGGAAYTKRYLEEQKTENGKDKEQKQTNTDKEKIKEKGSFSDTGLGDGKMKSDSFAPKTDSEKPFRGSQSPKRYKLRDDFEKKMADFHKEEMDDQDKDKAKGRKESEFDDEPKFMSKVIGANKNQEEEKSGKWEGLVYAPPGKEKQRKTEELEEESFPERSKKEDRGKRSEGGHRGFVPEKNFRVTAYKAVQEKSSSPPPRKTSESRDKLGAKGDFPTGKSSFSITREAQVNVRMDSFDEDLARPSGLLAQERKLCRDLVHSNKKEQEFRSIFQHIQSAQSQRSPSELFAQHIVTIVHHVKEHHFGSSGMTLHERFTKYLKRGTEQEAAKNKKSPEIHRRIDISPSTFRKHGLAHDEMKSPREPGYKVNC

SEQ ID NO: 752789 - protein, 955 aa, Homo sapiens; identical to SEQ ID NO: 752768

SEQ ID NO: 752790 - protein, 955 aa, Homo sapiens; identical to SEQ ID NO: 752768

SEQ ID NO: 752791 - protein, 886 aa, Homo sapiens
MIYRTLAHRGYRRPYYFRGRNRGFYPWGQYNRGGYGNYRSNWQNYRQAYSPRRGRSRSRSPKRRSPSPRSRSHSRNSDKSSSDRSRRSSSSRSSSNHSRVESSKRKSAKEKKSSSKDSRPSQAAGDNQGDEVKEQTFSGGTSQDTKASESSKPWPDATYGTGSASRASAVSELSPRERSPALKSPLQSVVVRRRSPRPSPVPKPSPPLSSTSQMGSTLPSGAGYQSGTHQGQFDHGSGSLSPSKKSPVGKSPPSTGSTYGSSQKEESAASGGAAYTKRYLEEQKTENGKDKEQKQTNTDKEKIKEKGSFSDTGLGDGKMKSDSFAPKTDSEKPFRGSQSPKRYKLRDDFEKKMADFHKEEMDDQDKDKAKGRKESEFDDEPKFMSKVIGANKNQEEEKSGKWEGLVYAPPGKEKQRKTEELEEESFPERSKKEDRGKRSEGGHRGFVPEKNFRVTAYKAVQEKSSSPPPRKTSESRDKLGAKGDFPTGKSSFSITREAQVNVRMDSFDEDLARPSGLLAQERKLCRDLVHSNKKEQEFRSIFQHIQSAQSQRSPSELFAQHIVTIVHHVKEHHFGSSGMTLHERFTKYLKRGTEQEAAKNKKSPEIHRRIDISPSTFRKHGLAHDEMKSPREPGYKAEGKYKDDPVDLRLDIERRKKHKERDLKRGKSRESVDSRDSSHSRERSAEKTEKTHKGSKKQKKHRRARDRSRSSSSSSQSSHSYKAEEYTEETEEREESTTGFDKSRLGTKDFVGPSERGGGRARGTFQFRARGRGWGRGNYSGNNNNNSNNDFQKRNREEEWDPEYTPKSKKYYLHDDREGEGSDKWVSRGRGRGAFPRGRGRFMFRKSSTSPKWAHDKFSGEEGEIEDDESGTENREEKDNIQPTTE

SEQ ID NO: 752792 - protein, 568 aa, Homo sapiens
MKSDSFAPKTDSEKPFRGSQSPKRYKLRDDFEKKMADFHKEEMDDQDKDKAKGRKESEFDDEPKFMSKVIGANKNQEEEKSGKWEGLVYAPPGKEKQRKTEELEEESFPERSKKEDRGKRSEGGHRGFVPEKNFRVTAYKAVQEKSSSPPPRKTSESRDKLGAKGDFPTGKSSFSITREAQVNVRMDSFDEDLARPSGLLAQERKLCRDLVHSNKKEQEFRSIFQHIQSAQSQRSPSELFAQHIVTIVHHVKEHHFGSSGMTLHERFTKYLKRGTEQEAAKNKKSPEIHRRIDISPSTFRKHGLAHDEMKSPREPGYKAEGKYKDDPVDLRLDIERRKKHKERDLKRGKSRESVDSRDSSHSRERSAEKTEKTHKGSKKQKKHRRARDRSRSSSSSSQSSHSYKAEEYTEETEEREESTTGFDKSRLGTKDFVGPSERGGGRARGTFQFRARGRGWGRGNYSGNNNNNSNNDFQKRNREEEWDPEYTPKSKKYYLHDDREGEGSDKWVSRGRGRGAFPRGRGRFMFRKSSTSPKWAHDKFSGEEGEIEDDESGTENREEKDNIQPTTE

SEQ ID NO: 752793 - protein, 209 aa, Homo sapiens
MVELTALNPRNLNFGLSFDRLRENTKMILLISALILNVVKNIRREILNEVNRENQWIPETPVTQGKGQLKKQRKLIKDQRNRRSIGEQETGPDPPPLPPSHLTPTKQKSTLKRQRKERRAPRALTNQDWGPKTLWVQVKEEVAELEEPFSFEPEEEAGAEATTLGTITTTATTIFKKETGKRSGTQSTHPKARSITCMMTVKAKAVTSG

SEQ ID NO: 752794 - protein, 186 aa, Homo sapiens
MYSVVEANSTEEWMDKWGLEDFVSMMKTCIEEREESTTGFDKSRLGTKDFVGPSERGGGRARGTFQFRARGRGWGRGNYSGNNNNNSNNDFQKRNREEEWDPEYTPKSKKYYLHDDREGEGSDKWVSRGRGRGAFPRGRGRFMFRKSSTSPKWAHDKFSGEEGEIEDDESGTENREEKDNIQPTTE

SEQ ID NO: 752795 - protein, 170 aa, Homo sapiens
AAGDNQGDEVKEQTFSGGTSQDTKASESSKPWPDATYGTGSASRASAVSELSPRERSPALKSPLQSVVVRRRSPRPSPVPKPSPPLSSTSQMGSTLPSGAGYQSGTHQGQFDHGSGSLSPSKKSPVGKSPPSTGSTYGSSQKEESAASGGAAYTKRQVSHFPCLVVFLSH

SEQ ID NO: 752796 - protein, 346 aa, Homo sapiens
CQPRPDSRQVLVAMVIAGASWMLGRAAASPTQTPPTTSTIRVARRSRVALVAMVIAAAGSGGPGRAEPQLSQPSLDCGRMRSSLTPLGPPVSRDRVIASFPKWYTPEACLQLREHFHGQVSAACQRRNTGTVGLKLSKVVVVGDLYVGKTSLIHRFCKNVFDRDYKATIGVDFEIERFEIAGIPYSLQIWDTAGQEKFKCIASAYYRGAQVIITAFDLTDVQTLEHTRQWLEDALRENEAGSCFIFLVGTKKDLLSGAACEQAEADAVHLAREMQAEYWSVSAKTGENVKAFFSRVAALAFEQSVLQDLERQSSARLQVGDGDLIQMEGSPPETQESKRPSSLGCC

SEQ ID NO: 752797 - protein, 237 aa, Homo sapiens
MVIAGASWMLGRAAASPTQTPPTTSTIRVARRSRVALVAMVIAAAGSGGPGRAEPQLSQPSLDCGRMRSSLTPLGPPVSRDRVIASFPKWYTPEACLQLREHFHGQVSAACQRRNTGTVGLKLSKVVVVGDLYVGKTSLIHRFCKNVFDRDYKATIGVDFEIERFEIAGIPYSLQIWDTAGQEKFKCIASAYYRGAQGEQHATSGLNCMQQRGPCRAPQWESRVLCTGTSFLSSKTH

SEQ ID NO: 752798 - protein, 346 aa, Homo sapiens; identical to SEQ ID NO: 752796

SEQ ID NO: 752799 - protein, 204 aa, Homo sapiens
MENLQSCISLRVCIFSNNFITDIHPLQSCIKLIKLDLHGNQIKSLPNTKFWNGLKNLKLLYLHDNGFAKLKNICVLSACPTLIALTMFDCPVSLKKGYRHVLVNSIWPLKALDHHVISDEEIIQNWHLPERFKACNHRLFFNFCPALRKGTTYEEEINNIKHITSKINAILAHNSPVLIVQRWIRGFLVRKNLRYVLFSLPFEY

SEQ ID NO: 752800 - protein, 158 aa, Homo sapiens [sequence omitted]

SEQ ID NO: 752801 - protein, 108 aa, Homo sapiens
GPVAPSRLQVGDITILVNNAAVVHGKSLMDSDDDALLKSQHINTLGQFWTTKAFLPRMLELQNGHIVCLNSVLALSAIPGAIDYCTSKASAFAFMESLTLVACPCMLV

SEQ ID NO: 752802 - protein, 414 aa, Homo sapiens
  misc_feature (5)..(5): Xaa can be any naturally occurring amino acid
MVQAXVFPGSAAGARNFLLELSTSGFPLHLFYRPNLRRRFFSPRGEFIFFFFFFFFFSPGALHLGRGDFKSGQVGRLSPPYSVYYLLFGVFFNSCIARPGEFRPLPGSAARRMVWKRLGALVMFPLQMIYLVVKAAVGLVLPAKLRDLSRENVLITGGGRGIGRQLAREFAERGARKIVLWGRTEKCLKETTEEIRQMGTECHYFICDVGNREEVYQTAKAVREKVGDITILVNNAAVVHGKSLMDSDDDALLKSQHINTLGQFWTTKAFLPRMLELQNGHIVCLNSVLALSAIPGAIDYCTSKASAFAFMESLTLGLLDCPGVSATTVLPFHTSTEMFQGMRVRFPNLFPPLKPETVARRTVEAVQLNQALLLLPWTMHALVILKSILPQAALEEIHKFSGTYTCMNTFKGRT

SEQ ID NO: 752803 - protein, 250 aa, Homo sapiens
GTAAAAIRGGARKIVLWGRTEKCLKETTEEIRQMGTECHYFICDVGNREEVYQTAKAVREKVGDITILVNNAAVVHGKSLMDSDDDALLKSQHINTLGQFWTTKAFLPRMLELQNGHIVCLNSVLALSAIPGAIDYCTSKASAFAFMESLTLGLLDCPGVSATTVLPFHTSTEMFQGMRVRFPNLFPPLKPETVARRTVEAVQLNQALLLLPWTMHALVILKSILPQAALEEIHKFSGTYTCMNTFKGRT

SEQ ID NO: 752804 - protein, 129 aa, Homo sapiens
MLEEPRSLGATAPGHTPEHLSIGMLLLGEQDSSCPQRRIRLPLGQSQDLCTGLMGITDPHREAGKQPEATLTLLNISSSVEFIVNCFSSLTSLSSVHRPFPGGSVPRCSASRSKTQLILSLHKLVERQE

SEQ ID NO: 752805 - protein, 302 aa, Homo sapiens
MVWKRLGALVMFPLQMIYLVVKAAVGLVLPAKLRDLSRENVLITGGGRGIGRQLAREFAERGARKIVLWGRTEKCLKETTEEIRQMGTECHYFICDVGNREEVYQTAKAVREKVGDITILVNNAAVVHGKSLMDSDDDALLKSQHINTLGQFWTTKAFLPRMLELQNGHIVCLNSVLALSAIPGAIDYCTSKASAFAFMESLTLGLLDCPGVSATTVLPFHTSTEMFQGMRVRFPNLFPPLKPETVARRTVEAVQLNQALLLLPWTMHALVILKSILPQAALEEIHKFSGTYTCMNTFKGRT

SEQ ID NO: 752806 - protein, 302 aa, Homo sapiens; identical to SEQ ID NO: 752805

SEQ ID NO: 752807 - protein, 169 aa, Homo sapiens
MVWKRLGALVMFPLQMIYLVVKAAVGLVLPAKLRDLSRENVLITGGGRGIGRQLAREFAERGARKIVLWGRTEKCLKETTEEIRQMGTECHYFICDVGNREEVYQTAKAVREKVGDITILVNNAAVVHGKSLMDSDDDALLKSQHINTLGQFWPVFDVLDLRRDISLDR

SEQ ID NO: 752808 - protein, 659 aa, Homo sapiens
MQGSSLWLSLTFRSARVLSRARFFEWQSPGLPNTAAMENGTGPYGEERPREVQETTVTEGAAKIAFPSANEVFYNPVQEFNRDLTCAVITEFARIQLGAKGIQIKVPGEKDTQKVVVDLSEQEEEKVELKESENLASGDQPRTAAVGEICEEGLHVLEGLAASGLRSIRFALEVPGLRSVVANDASTRAVDLIRRNVQLNDVAHLVQPSQADARMLMYQHQRVSERFDVIDLDPYGSPATFLDAAVQAVSEGGLLCVTCTDMAVLAGNSGETCYSKYGAMALKSRACHEMALRIVLHSLDLRANCYQRFVVPLLSISADFYVRVFVRVFTGQAKVKASASKQALVFQCVGCGAFHLQRLGKASGVPSGRAKFSAACGPPVTPECEHCGQRHQLGGPMWAEPIHDLDFVGRVLEAVSANPGRFHTSERIRGVLSVITEELPDVPLYYTLDQLSSTIHCNTPSLLQLRSALLHADFRVSLSHACKNAVKTDAPASALWDIMRCWEKECPVKRERLSETSPAFRILSVEPRLQANFTIREDANPSSRQRGLKRFQANPEANWGPRPRARPGGKAADEAMEERRRLLQNKRKEPPEDVAQRAARLKTFPCKRFKEGTCQRGDQCCYSHSPPTPRVSADAAPDCPETSNQTPPGPGAAAGPGID

SEQ ID NO: 752809 - protein, 659 aa, Homo sapiens; identical to SEQ ID NO: 752808

SEQ ID NO: 752810 - protein, 630 aa, Homo sapiens
MQGSSLWLSLTFRSARVLSRARFFEWQSPGLPNTAAMENGTGPYGEERPREVQETTVTEGAAKIAFPSANEVFYNPVQEFNRDLTCAVITEFARIQLGAKGIQIKVPGEKDTQKVVVDLSEQEEEKVELKESENLASGDQPRTAAVGEICEEGLHVLEGLAASGLRSIRFALEVPGLRSVVANDASTRAVDLIRRNVQLNDVAHLVQPSQADARMLMYQHQRVSERFDVIDLDPYGSPATFLDAAVQAVSEGGLLCVTCTDMAVLAGNSGETCYSKYGAMALKSRACHEMALRIVLHSLDLRANCYQRFVVPLLSISADFYVRVFVRVFTGQAKVKASARAKFSAACGPPVTPECEHCGQRHQLGGPMWAEPIHDLDFVGRVLEAVSANPGRFHTSERIRGVLSVITEELPDVPLYYTLDQLSSTIHCNTPSLLQLRSALLHADFRVSLSHACKNAVKTDAPASALWDIMRCWEKECPVKRERLSETSPAFRILSVEPRLQANFTIREDANPSSRQRGLKRFQANPEANWGPRPRARPGGKAADEAMEERRRLLQNKRKEPPEDVAQRAARLKTFPCKRFKEGTCQRGDQCCYSHSPPTPRVSADAAPDCPETSNQTPPGPGAAAGPGID

SEQ ID NO: 752811 - protein, 764 aa, Homo sapiens
MQGSSLWLSLTFRSARVLSRARFFEWQSPGLPNTAAMENGTGPYGEERPREVQETTVTEGAAKIAFPSANEVFYNPVQEFNRDLTCAVITEFARIQLGAKGIQIKVPGEKDTQKVVVDLSEQEEEKVELKESENLASGDQPRTAAVGEICEEGLHVLEGLAASGLRSIRFALEVPGLRSVVANDASTRAVDLIRRNVQLNDVAHLVQPSQADARMLMYQHQRVSERFDVIDLDPYGSPATFLDAAVQAVSEGGLLCVTCTDMAVLAGNSGETCYSKYGAMALKSRACHEMALRIVLHSLDLRANCYQRFVVPLLSISADFYVRVFVRVFTGQAKVKASARSARGQRAVVDERGDRTLPWGIWGFLRDRASLREELGCRGHAGNSWPLVPPTASRRWCSSVWAAGPSTFSVSAKRQESPAAGEQGGRRRRGVPGFSSLPTNHPSLFRAKFSAACGPPVTPECEHCGQRHQVGLGQGRQRSKRVLKVIVPAHLSPVRPQLGGPMWAEPIHDLDFVGRVLEAVSANPGRFHTSERIRGVLSVITEELPDVPLYYTLDQLSSTIHCNTPSLLQLRSALLHADFRVSLSHACKNAVKTDAPASALWDIMRCWEKECPVKRERLSETSPAFRILSVEPRLQANFTIREDANPSSRQRGLKRFQANPEANWGPRPRARPGGKAADEAMEERRRLLQNKRKEPPEDVAQRAARLKTFPCKRFKEGTCQRGDQCCYSHSPPTPRVSADAAPDCPETSNQTPPGPGAAAGPGID

SEQ ID NO: 752812 - protein, 568 aa, Homo sapiens
MQGSSLWLSLTFRSARVLSRARFFEWQSPGLPNTAAMENGTGPYGEERPREVQETTVTEGAAKIAFPSANEVFYNPVQEFNRDLTCAVITEFARIQLGAKGIQIKVPGEKDTQKVVVDLSEQEEEKVELKESENLASGDQPRTAAVGEICEEGLHVLEGLAASGLRSIRFALEVPGLRSVVANDASTRAVDLIRRNVQLNDVAHLVQPSQADARMLMYQHQRVSERFDVIDLDPYGSPATFLDAAVQAVSEGGLLCVTCTDMAVLAGNSGETCYSKYGAMALKSRACHEMALRIVLHSLDLRANCYQRFVVPLLSISADFYVRVFVRVFTGQAKVKASASKQALVFQCVGCGAFHLQRLGKASGVPSGRAKFSAACGPPVTPECEHCGQRHQLGGPMWAEPIHDLDFVGRVLEAVSANPGRFHTSERIRGVLSVITEELPDVPLYYTLDQLSSTIHCNTPSLLQLRSALLHADFRVSLSHACKNAVKTDAPASALWDIMRCWEKECPVKRERLSETSPAFRILSVEPRLQANFTIREDANPSSRQRGLKRFQANPEANWGPRPRARPG

SEQ ID NO: 752813 - protein, 670 aa, Homo sapiens
AHPLCQHGGAQVLIRETCTLTNSVFCGYESRARFFEWQSPGLPNTAAMENGTGPYGEERPREVQETTVTEGAAKIAFPSANEVFYNPVQEFNRDLTCAVITEFARIQLGAKGIQIKVPGEKDTQKVVVDLSEQEEEKVELKESENLASGDQPRTAAVGEICEEGLHVLEGLAASGLRSIRFALEVPGLRSVVANDASTRAVDLIRRNVQLNDVAHLVQPSQADARMLMYQHQRVSERFDVIDLDPYGSPATFLDAAVQAVSEGGLLCVTCTDMAVLAGNSGETCYSKYGAMALKSRACHEMALRIVLHSLDLRANCYQRFVVPLLSISADFYVRVFVRVFTGQAKVKASASKQALVFQCVGCGAFHLQRLGKASGVPSGRAKFSAACGPPVTPECEHCGQRHQLGGPMWAEPIHDLDFVGRVLEAVSANPGRFHTSERIRGVLSVITEELPDVPLYYTLDQLSSTIHCNTPSLLQLRSALLHADFRVSLSHACKNAVKTDAPASALWDIMRCWEKECPVKRERLSETSPAFRILSVEPRLQANFTIREDANPSSRQRGLKRFQANPEANWGPRPRARPGGKAADEAMEERRRLLQNKRKEPPEDVAQRAARLKTFPCKRFKEGTCQRGDQCCYSHSPPTPRVSADAAPDCPETSNQTPPGPGAAAGPGID

SEQ ID NO: 752814 - protein, 589 aa, Homo sapiens
MAGAGYELSPLSPTRCAVITEFARIQLGAKGIQIKVPGEKDTQKVVVDLSEQEEEKVELKESENLASGDQPRTAAVGEICEEGLHVLEGLAASGLRSIRFALEVPGLRSVVANDASTRAVDLIRRNVQLNDVAHLVQPSQADARMLMYQHQRVSERFDVIDLDPYGSPATFLDAAVQAVSEGGLLCVTCTDMAVLAGNSGETCYSKYGAMALKSRACHEMALRIVLHSLDLRANCYQRFVVPLLSISADFYVRVFVRVFTGQAKVKASASKQALVFQCVGCGAFHLQRLGKASGVPSGRAKFSAACGPPVTPECEHCGQRHQLGGPMWAEPIHDLDFVGRVLEAVSANPGRFHTSERIRGVLSVITEELPDVPLYYTLDQLSSTIHCNTPSLLQLRSALLHADFRVSLSHACKNAVKTDAPASALWDIMRCWEKECPVKRERLSETSPAFRILSVEPRLQANFTIREDANPSSRQRGLKRFQANPEANWGPRPRARPGGKAADEAMEERRRLLQNKRKEPPEDVAQRAARLKTFPCKRFKEGTCQRGDQCCYSHSPPTPRVSADAAPDCPETSNQTPPGPGAAAGPGID

SEQ ID NO: 752815 - protein, 74 aa, Homo sapiens
  misc_feature (20)..(20): Xaa can be any naturally occurring amino acid
PPPPHHPTNITASTGCVLMXDGGAQVLIRETCTLTNSVFCGYESRLGGRRRQRMSHARIVSVAKPHFPLRPGAL

SEQ ID NO: 752816 - protein, 74 aa, Homo sapiens; identical to SEQ ID NO: 752815
  misc_feature (20)..(20): Xaa can be any naturally occurring amino acid

SEQ ID NO: 752817 - protein, 106 aa, Homo sapiens
HHVSQAGLKLLTSLPKCWDYRHEPPRPAQAPAVLQHLVSPLPAHRALGGWNVGPQYMPHGTPIMLVRIGWIYAFLTRLVPPAVPQTGTVVILQMKKLRHREGILTC

SEQ ID NO: 752818 - protein, 711 aa, Homo sapiens
MQGSSLWLSLTFRSARVLSRARFFEWQSPGLPNTAAMENGTGPYGEERPREVQETTVTEGAAKIAFPSANEVFYNPVQEFNRDLTCAVITEFARIQLGAKGIQIKVPGEKDTQKVVVDLSEQEEEKVELKESENLASGDQPRTAAVGEICEEGLHVLEGLAASGLRSIRFALEVPGLRSVVANDASTRAVDLIRRNVQLNDVAHLVQPSQADARMLMYQHQRVSERFDVIDLDPYGSPATFLDAAVQAVSEGGLLCVTCTDMAVLAGNSGETCYSKYGAMALKSRACHEMALRIVLHSLDLRANCYQRFVVPLLSISADFYVRVFVRVFTGQAKVKASARSARGQRAVVDGERRQDLALGDLGLLKGQSQSKGGVGVSWSRWELVATGTPHSKQALVFQCVGCGAFHLQRLGKASGVPSGRAKFSAACGPPVTPECEHCGQRHQLGGPMWAEPIHDLDFVGRVLEAVSANPGRFHTSERIRGVLSVITEELPDVPLYYTLDQLSSTIHCNTPSLLQLRSALLHADFRVSLSHACKNAVKTDAPASALWDIMRCWEKECPVKRERLSETSPAFRILSVEPRLQANFTIREDANPSSRQRGLKRFQANPEANWGPRPRARPGGKAADEAMEERRRLLQNKRKEPPEDVAQRAARLKTFPCKRFKEGTCQRGDQCCYSHSPPTPRVSADAAPDCPETSNQTPPGPGAAAGPGID

SEQ ID NO: 752819 - protein, 736 aa, Homo sapiens
MQGSSLWLSLTFRSARVLSRARFFEWQSPGLPNTAAMENGTGPYGEERPREVQETTVTEGAAKIAFPSANEVFYNPVQEFNRDLTCAVITEFARIQLGAKGIQIKVPGEKDTQKVVVDLSEQEEEKVELKESENLASGDQPRTAAVGEICEEGLHVLEGLAASGLRSIRFALEVPGLRSVVANDASTRAVDLIRRNVQLNDVAHLVQPSQADARMLMYQHQRVSERFDVIDLDPYGSPATFLDAAVQAVSEGGLLCVTCTDMAVLAGNSGETCYSKYGAMALKSRACHEMALRIVLHSLDLRANCYQRFVVPLLSISADFYVRVFVRVFTGQAKVKASARSARGQRAVVDERGDRTLPWGIWGFLRDRASLREELGCRGHAGNSWPLVPPTASRRWCSSVWAAGPSTFSVSAKRQESPAAGEQGGRRRRGVPGFSSLPTNHPSLFRAKFSAACGPPVTPECEHCGQRHQLGGPMWAEPIHDLDFVGRVLEAVSANPGRFHTSERIRGVLSVITEELPDVPLYYTLDQLSSTIHCNTPSLLQLRSALLHADFRVSLSHACKNAVKTDAPASALWDIMRCWEKECPVKRERLSETSPAFRILSVEPRLQANFTIREDANPSSRQRGLKRFQANPEANWGPRPRARPGGKAADEAMEERRRLLQNKRKEPPEDVAQRAARLKTFPCKRFKEGTCQRGDQCCYSHSPPTPRVSADAAPDCPETSNQTPPGPGAAAGPGID

SEQ ID NO: 752820 - protein, 645 aa, Homo sapiens
MQGSSLWLSLTFRSARVLSRARFFEWQSPGLPNTAAMENGTGPYGEERPREVQETTVTEGAAKIAFPSANEVFYNPVQEFNRDLTCAVITEFARIQLGAKGIQIKVPGEKDTQKVVVDLSEQEEEKVELKESENLASGDQPRTAAVGEICEEGLHVLEGLAASGLRSIRFALEVPGLRSVVANDASTRAVDLIRRNVQLNDVAHLVQPSQADARMLMYQHQRVSERFDVIDLDPYGSPATFLDAAVQAVSEGGLLCVTCTDMAVLAGNSGETCYSKYGAMALKSRACHEMALRIVLHSLDLRANCYQRFVVPLLSISADFYVRVFVRVFTGQAKVKASARSARGQRAVVDERGDRTLPWGIWGFLRDRASLREELGCRGHAGNSWPLVPPTASRRWCSSVWAAGPSTFSVSAKRQESPAAGEQGGRRRRGVPGFSSLPTNHPSLFRAKFSAACGPPVTPECEHCGQRHQLGGPMWAEPIHDLDFVGRVLEAVSANPGRFHTSERIRGVLSVITEELPDVPLYYTLDQLSSTIHCNTPSLLQLRSALLHADFRVSLSHACKNAVKTDAPASALWDIMRCWEKECPVKRERLSETSPAFRILSVEPRLQANFTIREDANPSSRQRGLKRFQANPEANWGPRPRARPG

SEQ ID NO: 752821 - protein, 623 aa, Homo sapiens
MENGTGPYGEERPREVQETTVTEGAAKIAFPSANEVFYNPVQEFNRDLTCAVITEFARIQLGAKGIQIKVPGEKDTQKVVVDLSEQEEEKVELKESENLASGDQPRTAAVGEICEEGLHVLEGLAASGLRSIRFALEVPGLRSVVANDASTRAVDLIRRNVQLNDVAHLVQPSQADARMLMYQHQRVSERFDVIDLDPYGSPATFLDAAVQAVSEGGLLCVTCTDMAVLAGNSGETCYSKYGAMALKSRACHEMALRIVLHSLDLRANCYQRFVVPLLSISADFYVRVFVRVFTGQAKVKASASKQALVFQCVGCGAFHLQRLGKASGVPSGRAKFSAACGPPVTPECEHCGQRHQLGGPMWAEPIHDLDFVGRVLEAVSANPGRFHTSERIRGVLSVITEELPDVPLYYTLDQLSSTIHCNTPSLLQLRSALLHADFRVSLSHACKNAVKTDAPASALWDIMRCWEKECPVKRERLSETSPAFRILSVEPRLQANFTIREDANPSSRQRGLKRFQANPEANWGPRPRARPGGKAADEAMEERRRLLQNKRKEPPEDVAQRAARLKTFPCKRFKEGTCQRGDQCCYSHSPPTPRVSADAAPDCPETSNQTPPGPGAAAGPGID

SEQ ID NO: 752822 - protein, 765 aa, Homo sapiens
MQGSSLWLSLTFRSARVLSRARFFEWQSPGLPNTAAMENGTGPYGEERPREVQETTVTEGAAKIAFPSANEVFYNPVQEFNRDLTSRGQTLAWHRLVGQCGWRGRGMSCPLSPTRCAVITEFARIQLGAKGIQSEWRSRLLVGGGHTSLSPCLGSSAAQIQRGFSHIAGPGFCSFSLSAGISGTIFWRLRGGFSEGTLLFSDLCLWVAAVKVPGEKDTQKVVVDLSEQEEEKVELKESENLASGDQPRTAAVGEICEEGLHVLEGLAASGLRSIRFALEVPGLRSVVANDASTRAVDLIRRNVQLNDVAHLVQPSQADARMLMYQHQRVSERFDVIDLDPYGSPATFLDAAVQAVSEGGLLCVTCTDMAVLAGNSGETCYSKYGAMALKSRACHEMALRIVLHSLDLRANCYQRFVVPLLSISADFYVRVFVRVFTGQAKVKASASKQALVFQCVGCGAFHLQRLGKASGVPSGRAKFSAACGPPVTPECEHCGQRHQLGGPMWAEPIHDLDFVGRVLEAVSANPGRFHTSERIRGVLSVITEELPDVPLYYTLDQLSSTIHCNTPSLLQLRSALLHADFRVSLSHACKNAVKTDAPASALWDIMRCWEKECPVKRERLSETSPAFRILSVEPRLQANFTIREDANPSSRQRGLKRFQANPEANWGPRPRARPGGKAADEAMEERRRLLQNKRKEPPEDVAQRAARLKTFPCKRFKEGTCQRGDQCCYSHSPPTPRVSADAAPDCPETSNQTPPGPGAAAGPGID

SEQ ID NO: 752823 - protein, 147 aa, Homo sapiens
MKQLFPPPPGTSLTHALGAWRGRERAQAATSLLASSASQFPTAVEDALMSVLTSHCAPSTPAATRAQQTGTRGHIHPACPCQQSCVGASRPPGRPQIFLPLTTALSLEAYAADTCSAADFLHNPSSWGKVWYLNEASFDLYSYHYFW

SEQ ID NO: 752824 - protein, 257 aa, Homo sapiens
MSTSQPGACPCQGAASRPAILYALLSSSLKAVPRPRSRCLCRQHRPVQLCAPHRTCREALDVLAKTVAFLRNLPSFWQLPPQDQRRLLQGCWGPLFLLGLAQDAVTFEVAEAPVPSILKKILLEEPSSSGGSGQLPDRPQPSLAAVQWLQCCLESFWSLELSPKEYACLKGTILFNPDVPGLQAASHIGHLQQEAHWVLCEVLEPWCPAAQGRLTRVLLTASTLKSIPTSLLGDLFFRPIIGDVDIAGLLGDMLLLR

SEQ ID NO: 752825 - protein, 245 aa, Homo sapiens
MGGGYDLNLFASPPDSNFVCSVCHGVLKRPARLPCSHIFCKKCILRWLARQKTCPCCRKEVKRKKVVHMNKLRKTIGRLEVKCKNADAGCIVTCPLAHRKGHQDSCPFELTACPNEGCTSQVPRGTLAEHRQHCQQGSQQRCPLGCGATLDPAERARHNCYRELHNAWSVRQERRRPLLLSLLRRVRWLDQATSVVRRELAELSNFLEEDTALLEGAPQEEAEAAPEGNVGAEVVGEPRANIPCK

SEQ ID NO: 752826 - protein, 77 aa, Homo sapiens
LLKASSLQLLGKKDPGLCRTKPPLFSWGWHPFLWPCGTKQIDSSSEYFLFTLFHMVVSESTLDSPHKGLKNTQVMNK

SEQ ID NO: 752827 - protein, 109 aa, Homo sapiens
STPISSMTVYKCCGNVRKLPLWSKKGKHEIIYPFLANNQEKATKMGNQQPMLLLCLWSGHFFYSFTFLINLLSLYSMDLPQILSCARSKNPLLGSGLGPLSGNSIFYLC

SEQ ID NO: 752828 - protein, 260 aa, Homo sapiens
RRRKRPGDPPAACAAIAVMGASRAQCPRVQVGVGSHAAAKRWLGKLRRKRRWRRAREAGSRDPLPSAPLPDPPAPAESPKELDLGAQRERWETFRKLWGLSCEGAAKVLLDTFEYPGLVHHTGGCHCGAVRFAVWAPADLRVVDCSCRLCRKKQHRHFLVPASRFTLLQGAESIVTYRSNTHPALHSFCSRCGVQSFHAAVSDPRVYGVAPHCLDEGTVRSVVIEEVGGGDPGEEAAKEHKAIHKTSSQSAPACPREQEQ

SEQ ID NO: 752829 - protein, 367 aa, Homo sapiens
MKSLVLLLCLAQLWGCHSAPHGPGLIYRQPNCDDPETEEAALVAIDYINQNLPWGYKHTLNQIDEVKVWPQQPSGELFEIEIDTLETTCHVLDPTPVARCSVRQLKEHAVEGDCDFQLLKLDGKFSVVYAKCDSSPDSAEDVRKVCQDCPLLAPLNDTRVVHAAKAALAAFNAQNNGSNFQLEEISRAQLVPLPPSTYVEFTVSGTDCVAKEATEAAKCNLLAEKQYGFCKATLSEKLGGAEVAVTCTVFQTQPVTSQPQPEGANEAVPTPVVDPDAPPSPPLGAPGLPPAGSPPDSHVLLAAPPGHQLHRAHYDLRHTFMGVVSLGSPSGEVSHPRKTRTVVQPSVGAAAGPVVPPCPGRIRHFKV

SEQ ID NO: 752830 - protein, 367 aa, Homo sapiens; identical to SEQ ID NO: 752829

SEQ ID NO: 752831 - protein, 367 aa, Homo sapiens; identical to SEQ ID NO: 752829

SEQ ID NO: 752832 - protein, 348 aa, Homo sapiens
MKSLVLLLCLAQLWGCHSAPHGPGLIYRQPNCDDPETEEAALVAIDYINQNLPWGYKHTLNQIDEVKVWPQQPSGELFEIEIDTLETTCHVLDPTPVARCSVRQLKEHAVEGDCDFQLLKLDGKFSVVYAKCDSSPDSAEDVRKVCQDCPLLAPLNDTRVVHAAKAALAAFNAQNNGSNFQLEEISRAQLVPLPPSTYVEFTVSGTDCVAKEATEAAKCNLLAEVAVTCTVFPQPVTSQPQPEGANEAVPTPVVDPDAPPSPPLGAPGLPPAGSPPDSHVLLAAPPGHQLHRAHYDLRHTFMGVVSLGSPSGEVSHPRKTRTVVQPSVGAAAGPVVPPCPGRIRHFKV

SEQ ID NO: 752833 - protein, 367 aa, Homo sapiens; identical to SEQ ID NO: 752829

SEQ ID NO: 752834 - protein, 349 aa, Homo sapiens
MKSLVLLLCLAQLWGCHSAPHGPGLIYRQPNCDDPETEEAALVAIDYINQNLPWGYKHTLNQIDEVKVWPQQPSGELFEIEIDTLETTCHVLDPTPVARCSVRQLKEHAVEGDCDFQLLKLDGKFSVVYAKCDSSPDSAEDVRKVCQDCPLLAPLNDTRVVHAAKAALAAFNAQNNGSNFQLEEISRAQLVPLPPSTYVEFTVSGTDCVAKEATEAAKCNLLAEKQYGFCKATLSEKLGGAEVAVTCTVFQTQPVTSQPQPEGANEAVPTPVVDPDAPPSPPLGAPGLPPAGSPPDSHVLLAAPPGHQLHRAHYDLRHTFMGVVSLGSPSGEVSHPRPPCPGRIRHFKV

SEQ ID NO: 752835 - protein, 348 aa, Homo sapiens; identical to SEQ ID NO: 752832

SEQ ID NO: 752836 - protein, 367 aa, Homo sapiens; identical to SEQ ID NO: 752829

SEQ ID NO: 752837 - protein, 367 aa, Homo sapiens; identical to SEQ ID NO: 752829

SEQ ID NO: 752838 - protein, 367 aa, Homo sapiens; identical to SEQ ID NO: 752829

SEQ ID NO: 752839 - protein, 144 aa, Homo sapiens [sequence omitted]

SEQ ID NO: 752840 - protein, 367 aa, Homo sapiens; identical to SEQ ID NO: 752829

SEQ ID NO: 752841 - protein, 107 aa, Homo sapiens [sequence omitted]

SEQ ID NO: 752842 - protein, 482 aa, Homo sapiens
RLPGRRPSPAPTPAVPRTSAGGAWCGRALRSWRAAPRTLVGECVRRAGGREAGAGGAGRGSPALRAPGEERGERGARRLQLAMVRPLNPRPLPPVVLMLLLLLPPSPLPLAAGDPLPTESRLMNSCLQARRKCQADPTCSAAYHHLDSCTSSISTPLPSEEPSVPADCLEAAQQLRNSSLIGCMCHRRMKNQVACLDIYWTVHRARSLGNYELDVSPYEDTVTSKPWKMNLSKLNMLKPDSDLCLKFAMLCTLNDKCDRLRKAYGEACSGPHCQRHVCLRQLLTFFEKAAEPHAQGLLLCPCAPNDRGCGERRRNTIAPNCALPPVAPNCLELRRLCFSDPLCRSRLVDFQTHCHPMDILGTCATEQSRCLRAYLGLIGTAMTPNFVSNVNTSVALSCTCRGSGNLQEECEMLEGFFSHNPCLTEAIAAKMRFHSQLFSQDWPHPTFAVMAHQNENPAVRPQPWVPSLFSCTLPLILLLSLW

SEQ ID NO: 752843 - protein, 411 aa, Homo sapiens
MPMWNKVSGVHLSPSSPEIVLDRDHSSSIGCLSSDAIISSPENTHAANSIVSQTIPKAQIQQSTHTHLDISLFPLGLTDEKSNGTIALVDDSEDPGANVSNIQLQQKISSLEIKLKVSEEEKQRIKQDVESLMEKHNVLEKGFLKEKEQEAISFQDRYKELQEKHKQELEDMRKAGHEALSIIVDEYKALLQSSVKQQVEAIEKQYISAIEKQAHKCEELLNAQHQRLLEMLDTEKELLKEKIKEALIQQSQEQKEILEKCLEEERQRNKEALVSAAKLEKEAMKDAVLKVVEEERKNLEKAHAEERELWKTEHAKDQEKVSQEIQKAIQEQRKISQETVKAAIIEEQKRSEKAVEEAVKRTRDELIEYIKEQKRLDQVIRQRSLSSLELFLSCAQKQLSALIATEPVDIE

SEQ ID NO: 752844 - protein, 441 aa, Homo sapiens [sequence omitted]

SEQ ID NO: 752845 - protein, 411 aa, Homo sapiens; identical to SEQ ID NO: 752843

SEQ ID NO: 752846 - protein, 279 aa, Homo sapiens
MEKHNVLEKGFLKEKEQEAISFQDRYKELQEKHKQELEDMRKAGHEALSIIVDEYKALLQSSVKQQVEAIEKQYISAIEKQAHKCEELLNAQHQRLLEMLDTEKELLKEKIKEALIQQSQEQKEILEKCLEEERQRNKEALVSAAKLEKEAMKDAVLKVVEEERKNLEKAHAEERELWKTEHAKDQEKVSQEIQKAIQEQRKISQETVKAAIIEEQKRSEKAVEEAVKRTRDELIEYIKEQKRLDQVIRQRSLSSLELFLSCAQKQLSALIATEPVDIE

SEQ ID NO: 752847 - protein, 402 aa, Homo sapiens
MPMWNKVSGVHLSPSSPEIVLDRDHSSSIGCLSSDAIISSPENTHAANSIIQQSTHTHLDISLFPLGLTDEKSNGTIALVDDSEDPGANVSNIQLQQKISSLEIKLKVSEEEKQRIKQDVESLMEKHNVLEKGFLKEKEQEAISFQDRYKELQEKHKQELEDMRKAGHEALSIIVDEYKALLQSSVKQQVEAIEKQYISAIEKQAHKCEELLNAQHQRLLEMLDTEKELLKEKIKEALIQQSQEQKEILEKCLEEERQRNKEALVSAAKLEKEAMKDAVLKVVEEERKNLEKAHAEERELWKTEHAKDQEKVSQEIQKAIQEQRKISQETVKAAIIEEQKRSEKAVEEAVKRTRDELIEYIKEQKRLDQVIRQRSLSSLELFLSCAQKQLSALIATEPVDIE

SEQ ID NO: 752848 - protein, 411 aa, Homo sapiens; identical to SEQ ID NO: 752843

SEQ ID NO: 752849 - protein, 405 aa, Homo sapiens
MPMWNKVSGVHLSPSSPEIVLDRDHSSSIGCLSSDAIISSPENTHAANSIVSQTIPKAQIQQSTHTHLDISLFPLGLTDEKSNGTIALVDDSEDPGANVSNIQLQQKISSLEIKLKVSEEEKQRIKQDVESLMEKHNVLEKGFLKEKEQEAISFQDRYKELQEKHKQELEDMRKAGHEALSIIVDEYKALLQSSVKQQVEAIEKQYISAIEKQAHKCEELLNAQHQRLLEMLDTEKELLKEKIKEALIQQSQEQKEILEKCLEEERQRNKEALVSAAKLEKEAMKDAVLKVVEEERKNLEKAHAEERELWKTEHAKDQEKVSQEIQKAIQEQRKISQETVKAAIIEEQKRSEKAVEEAVKRTRDELIEYIKEQKRLDQVIRQRSLSSLELFLSCAQKQPRLTTGN

SEQ ID NO: 752850 - protein, 421 aa, Homo sapiens
MPMWNKVSGVHLSPSSPEIVLDRDHSSSIGCLSSDAIISSPENTHAANSIVSQTIPKAQIQQSTHTHLDISLFPLGLTDEKSNGTIALVDDSEDPGANVSNIQLQQKISSLEIKLKVSEEEKQRIKQDVESLMEKHNVLEKGFLKEKEQEAISFQDRYKELQEKHKQELEDMRKAGHEALSIIVDEYKALLQSSVKQQVEAIEKQYISAIEKQAHKCEELLNAQHQRLLEMLDTEKELLKEKIKEALIQQSQEQKEILEKCLEEERQRNKEALVSAAKLEKEAMKDAVLKVVEEERKNLEKAHAEERELWKTEHAKDQEKVSQEIQKAIQEQRKISQETVKAAIIEEQKRSEKAVEEAVKRTRDELIEYIKEQKRLDQVIRQRSLSSLELFLSCAQKQDTEGLLVRWQKRDMATRISLSRP

SEQ ID NO: 752851 - protein, 405 aa, Homo sapiens; identical to SEQ ID NO: 752849

SEQ ID NO: 752852 - protein, 379 aa, Homo sapiens
MPMWNKVSGVHLSPSSPEIVLDRDHSSSIGCLSSDAIISSPENTHAANSIVSQTIPKAQIQQSTHTHLDISLFPLGLTDEKSNGTIALVDDSEDPGANVSNIQLQQKISSLEIKLKVSEEEKQRIKQDVESLMEKHNVLEKGFLKEKEQEAISFQDRYKELQEKHKQELEDMRKAGHEALSIIVDEYKALLQSSVKQQVEAIEKQYISAIEKQAHKCEELLNAQHQRLLEMLDTEKELLKEKIKEALIQQSQEQKEILEKCLEEERQRNKEALVSAAKLEKEAMKDAVLKVVEEERKNLEKAHAEERELWKTEHAKDQEKVSQEIQKAIQEQRKISQETVKAAIIEEQKRSEKAVEEAVKRTRDELIEYIKEQKRVSIS

SEQ ID NO: 752853 - protein, 208 aa, Homo sapiens
MDDDDFGGFEAAETFDGGSGETQTTSPAIPWAAFPAVSGVHLSPSSPEIVLDRDHSSSIGCLSSDAIISSPENTHAANSIVSQTIPKAQIQQSTHTHLDISLFPLGLTDEKSNGTIALVDDSEDPGANVSNIQLQQKISSLEIKLKGFWGSKPGTYPGWASWWKAKASGLLKKEQSILSDSPDFETYGCGCEGSTRLGDMAWVPKQAL

SEQ ID NO: 752854 - protein, 279 aa, Homo sapiens; identical to SEQ ID NO: 752846

SEQ ID NO: 752855 - protein, 441 aa, Homo sapiens [sequence omitted]

SEQ ID NO: 752856 - protein, 237 aa, Homo sapiens
MIVSFLRPPQPCKPALLQSSVKQQVEAIEKQYISAIEKQAHKCEELLNAQHQRLLEMLDTEKELLKEKIKEALIQQSQEQKEILEKCLEEERQRNKEALVSAAKLEKEAMKDAVLKVVEEERKNLEKAHAEERELWKTEHAKDQEKVSQEIQKAIQEQRKISQETVKAAIIEEQKRSEKAVEEAVKRTRDELIEYIKEQKRLDQVIRQRSLSSLELFLSCAQKQLSALIATEPVDIE

SEQ ID NO: 752857 - protein, 411 aa, Homo sapiens; identical to SEQ ID NO: 752843

SEQ ID NO: 752858 - protein, 402 aa, Homo sapiens
MPMWNKVSGVHLSPSSPEIVLDRDHSSSIGCLSSDAIISSPENTHAANSIVSQTIPKAQIQQSTHTHLDISLFPLGLTDEKSNGTIALVDDSEDPGANVSNIQLQQKISSLEIKLKVSEEEKQRIKQDVESLMEKHNVLEKGFLKEKEQEAISFQDRYKELQEKHKQELEDMRKAGHEALSIIVDEYKALLQSSVKQQVEAIEKQYISAIEKQAHKCEELLNAQHQRLLEMLDTEKELLKEKIKEALIQQSQEQKEILEKCLEEERQRNKEALVSAAKLEKEAMKDAVLKVVEEERKNLEKAHAEERELWKTEHAKDQEKVSQEIQKAIQEQRKISQETVKAAIIEEQKRSEKAVEEAVKRTRDELIEYIKEQKRLDQVIRQRSLSSLELFLSCAQKQRSLA

SEQ ID NO: 752859 - protein, 405 aa, Homo sapiens; identical to SEQ ID NO: 752849

SEQ ID NO: 752860 - protein, 417 aa, Homo sapiens
MPMWNKVSGVHLSPSSPEIVLDRDHSSSIGCLSSDAIISSPENTHAANSIVSQTIPKAQIQQSTHTHLDISLFPLGLTDEKSNGTIALVDDSEDPGANVSNIQLQQKISSLEIKLKVSEEEKQRIKQDVESLMEKHNVLEKGFLKEKEQEAISFQDRYKELQEKHKQELEDMRKAGHEALSIIVDEYKALLQSSVKQQVEAIEKQYISAIEKQAHKCEELLNAQHQRLLEMLDTEKELLKEKIKEALIQQSQEQKEILEKCLEEERQRNKEALVSAAKLEKEAMKDAVLKVVEEERKNLEKAHAEERELWKTEHAKDQEKVSQEIQKAIQEQRKISQETVKAAIIEEQKRRKKGKEIKKALVSAAKLEKEAMKDAVLKVVEEERKNLEKAHAEERELWKTEHAKDQEKVSQEIQKAI

SEQ ID NO: 752861 - protein, 342 aa, Homo sapiens
MAEHDYHEDYGFSSFNDSSQEEHQDFLQFSKVFLPCMYLVVFVCGLVGNSLVLVISIFYHKLQSLTDVFLVNLPLADLVFVCTLPFWAYAGIHEWVFGQVMCKSLLGIYTINFYTSMLILTCITVDRFIVVVKATKAYNQQAKRMTWGKVTSLLIWVISLLVSLPQIIYGNVFNLDKLICGYHDEAISTVVLATQMTLGFFLPLLTMIVCYSVIIKTLLHAGGFQKHRSLKIIFLVMAVFLLTQMPFNLMKFIRSTHWEYYAMTSFHYTIMVTEAIAYLRACLNPVLYAFVSLKFRKNFWKLVKDIGCLPYLGVSHQWKSSEDNSKTFSASHNVEATSMFQL

SEQ ID NO: 752862 - protein, 342 aa, Homo sapiens; identical to SEQ ID NO: 752861

SEQ ID NO: 752863 - protein, 324 aa, Homo sapiens [sequence omitted]

SEQ ID NO: 752864 - protein, 212 aa, Homo sapiens
MFCGDYVQGTIFPAPNFNPIMDAQMLGGALQGFDCDKDMLINILTQRCNAQRMMIAEAYQSMYGRDLIGDLREQLSDHFKDVMAGLMYPPPLYDAHELWHAMKGVGTDENCLIEILASRTNGEIFQMREAYCLQYSNNLQEDIYSETSGHFRDTLMNLVQGTREEGYTDPAMAAQDAMVLWEACQQKTGEHKTMLQMILCNKSYQQLRLGNY

SEQ ID NO: 752865 - protein, 324 aa, Homo sapiens [sequence omitted]

SEQ ID NO: 752866 - protein, 171 aa, Homo sapiens
MDAPANGNANEENGEQEADNEVDEEEEEGGEEEAGGRTKVMVQEEAWQMQDEEAESATGKRAACKMMRMTHVDTKKQKTDEAMTRQQTKEKLNKQKKKAGGDLFQPSKFPVSRILNTGGPATESQEALPGQHGGTAGPCTSTQPHSTHTNAHHGHNFAPGHATQATTNIQA

SEQ ID NO: 752867 - protein, 105 aa, Homo sapiens
TLRTVRPGLSEAPLPPLQKKRRRGLFHFRRPRSFKGDRGPGSPTTGLLLPPPPPPPPTQESPPSPDPPSLGNNSSPCWSPEEESSLLPGFGGGRGPSFRRKMVSE

SEQ ID NO: 752868 - protein, 248 aa, Homo sapiens
GPSFRRKMGTEGSEPGEGGPAPGTAQQPRVHGVALPGLERAKGWSFDGKREGPGPDQEGSTQAWQKRRSSDDAGPGSWKPPPPPQSTKPSFSAMRRAEATWHIAEESAPNHSCQSPSPASQDGEEEKEGTLFPERTLPARNAKLQDPALAPWPPKPVAVPRGRQPPQEPGVREEAEAGDAAPGVNKPRLRLSSQQDQEEPEVQGPPDPGRRTAPLKPKRTRRAQSCDKLEPDRRRPPDPTGTSEPGTD

SEQ ID NO: 752869 - protein, 142 aa, Homo sapiens
MQLASHEEKQNLGYHPLEDGGMTVSRRICSIRCWEGISTDEETEEQRGWKCNGTISAHCNLCLPGSSNSPASASQVAEITDEKTEAQEGSNLPKGAECIREKAKLKLVLPLLFHILPEDLPPMRAGRACIFQTLYLGLPSCH

SEQ ID NO: 752870 - protein, 53 aa, Homo sapiens
MEIKEEGASEEGQHFLPTAQANDPGDCQFTSIQKTPNEPQLEFILDLNQELRD

SEQ ID NO: 752871 - protein, 924 aa, Homo sapiens
MEIKEEGASEEGQHFLPTAQANDPGDCQFTSIQKTPNEPQLEFILACKDLVAPVRDRKLNTLVQISVIHPVEQSLTRYSSTEIVEGTRDPLFLTGVTFPSEYPIYEETKIKLTVYDVKDKSHDTVRTSVLPEHKDPPPEVGRSFLGYASFKVGELLKSKEQLLVLSLRTSDGGKVVGTIEVSVVKMGEIEDGEADHITTDVQGQKCALVCECTAPESVSGKDNLPFLNSVLKNPVCKLYRFPTSDNKWMRIREQMSESILSFHIPKELISLHIKEDLCRNQEIKELGELSPHWDNLRKNVLTHCDQMVNMYQDILTELSKETGSSFKSSSSKGEKTLEFVPINLHLQRMQVHSPHLKDALYDVITVGAPAAHFQGFKNGGLRKLLHRFETERRNTGYQFIYYSPENTAKAKEVLSNINQLQPLIATHADLLLNSASQHSPDSLKNSLKMLSEKTELFVHAFKDQLVRSALLALYTARPGGILKKPPSPKSSTEESSPQDQPPVMRGQDSIPHHSDYDEEEWDRVWANVGKSLNCIIAMVDKLIERDGGSEGSGGNNDGEKEPSLTDAIPSHPREDWYEQLYPLILTLKDCMGEVVNRAKQSLTFVLLQELAYSLPQCLMLTLRRDIVFSQALAGLVCGFIIKLQTSLYDPGFLQQLHTVGLIVQYEGLLSTYSDEIGMLEDMAVGISDLKKVAFKIIEAKSNDVLPVITGRREHYVVEVKLPARMFESLPLQIKEGQLLHVYPVLFNVGINEQQTLAERFGDVSLQESINQENFELLQEYYKIFMEKMPPDYISHFQEQNDLKALLENLLQNIQSKKRKNVEIMWLAATICRKLNGIRFTCCKSAKDRTSMSVTLEQCSILRDEHQLHKDFFIRALDCMRREGCRIENVLKNIKCRKYAFNMLQLMAFPKYYRPPEGTYGKADT

SEQ ID NO: 752872 - protein, 924 aa, Homo sapiens; identical to SEQ ID NO: 752871

SEQ ID NO: 752873 - protein, 877 aa, Homo sapiens
MEIKEEGASEEGQHFLPTAQANDPGDCQFTSIQKTPNEPQLEFILACKDLVAPVRDRKLNTLVQISVIHPVEQSLTRYSSTEIVEGTRDPLFLTGVTFPSEYPIYEETKIKLTVYDVKDKSHDTVRTSVLPEHKDPPPEVGRSFLGYASFKVGELLKSKEQLLVLSLRTSDGGKVVGTIEVSVVKMGEIEDGEADHITTDVQGQKCALVCECTAPESVSGKDNLPFLNSVLKNPVCKLYRFPTSDNKWMRIREQMSESILSFHIPKELISLHIKEDLCRNQEIKELGELSPHWDNLRKNVLTHCDQMVNMYQDILTELSKETGSSFKSSSSKGEKTLEFVPINLHLQRMQVHSPHLKDALYDVITVGAPAAHFQGFKNGGLRKLLHRFETERRNTGYQFIYYSPENTAKAKEVLSNINQLQPLIATHADLLLNSASQHSPDSLKNSLKMLSEKTELFVHAFKDQLVRSALLALYTARPGGILKKPPSPKSSTEESSPQDQPPVMRGQDSIPHHSDYDEEEWDRVWANVGKSLNCIIAMVDKLIERDGGSEGSGGNNDGEKEPSLTDAIPSHPREDWYEQLYPLILTLKDCMGEVVNRAKQSLTFVLLQELAYSLPQCLMLTLRRDIVFSQALAGLVCGFIIKLQTSLYDPGFLQQLHTVGLIVQYEGLLSTYSDEIGMLEDMAVGISDLKKVAFKIIEAKSNDVLPVITGRRFGDVSLQESINQENFELLQEYYKIFMEKMPPDYISHFQEQNDLKALLENLLQNIQSKKRKNVEIMWLAATICRKLNGIRFTCCKSAKDRTSMSVTLEQCSILRDEHQLHKDFFIRALDCMRREGCRIENVLKNIKCRKYAFNMLQLMAFPKYYRPPEGTYGKADT

SEQ ID NO: 752874 - protein, 821 aa, Homo sapiens
MSAGWLAKCKTSHELLDSCTMVRTSVLPEHKDPPPEVGRSFLGYASFKVGELLKSKEQLLVLSLRTSDGGKVVGTIEVSVVKMGEIEDGEADHITTDVQGQKCALVCECTAPESVSGKDNLPFLNSVLKNPVCKLYRFPTSDNKWMRIREQMSESILSFHIPKELISLHIKEDLCRNQEIKELGELSPHWDNLRKNVLTHCDQMVNMYQDILTELSKETGSSFKSSSSKGEKTLEFVPINLHLQRMQVHSPHLKDALYDVITVGAPAAHFQGFKNGGLRKLLHRFETERRNTGYQFIYYSPENTAKAKEVLSNINQLQPLIATHADLLLNSASQHSPDSLKNSLKMLSEKTELFVHAFKDQLVRSALLALYTARPGGILKKPPSPKSSTEESSPQDQPPVMRGQDSIPHHSDYDEEEWDRVWANVGKSLNCIIAMVDKLIERDGGSEGSGGNNDGEKEPSLTDAIPSHPREDWYEQLYPLILTLKDCMGEVVNRAKQSLTFVLLQELAYSLPQCLMLTLRRDIVFSQALAGLVCGFIIKLQTSLYDPGFLQQLHTVGLIVQYEGLLSTYSDEIGMLEDMAVGISDLKKVAFKIIEAKSNDVLPVITGRREHYVVEVKLPARMFESLPLQIKEGQLLHVYPVLFNVGINEQQTLAERFGDVSLQESINQENFELLQEYYKIFMEKMPPDYISHFQEQNDLKALLENLLQNIQSKKRKNVEIMWLAATICRKLNGIRFTCCKSAKDRTSMSVTLEQCSILRDEHQLHKDFFIRALDCMRREGCRIENVLKNIKCRKYAFNMLQLMAFPKYYRPPEGTYGKADT

SEQ ID NO: 752875 - protein, 476 aa, Homo sapiens
MLSEKTELFVHAFKDQLVRSALLALYTARPGGILKKPPSPKSSTEESSPQDQPPVMRGQDSIPHHSDYDEEEWDRVWANVGKSLNCIIAMVDKLIERDGGSEGSGGNNDGEKEPSLTDAIPSHPREDWYEQLYPLILTLKDCMGEVVNRAKQSLTFVLLQELAYSLPQCLMLTLRRDIVFSQALAGLVCGFIIKLQTSLYDPGFLQQLHTVGLIVQYEGLLSTYSDEIGMLEDMAVGISDLKKVAFKIIEAKSNDVLPVITGRREHYVVEVKLPARMFESLPLQIKEGQLLHVYPVLFNVGINEQQTLAERFGDVSLQESINQENFELLQEYYKIFMEKMPPDYISHFQEQNDLKALLENLLQNIQSKKRKNVEIMWLAATICRKLNGIRFTCCKSAKDRTSMSVTLEQCSILRDEHQLHKDFFIRALDCMRREGCRIENVLKNIKCRKYAFNMLQLMAFPKYYRPPEGTYGKADT

SEQ ID NO: 752876 - protein, 546 aa, Homo sapiens
MEIKEEGASEEGQHFLPTAQANDPGDCQFTSIQKTPNEPQLEFILACKDLVAPVRDRKLNTLVQISVIHPVEQSLTRYSSTEIVEGTRDPLFLTGVTFPSEYPIYEETKIKLTVYDVKDKSHDTVRTSVLPEHKDPPPEVGRSFLGYASFKVGELLKSKEQLLVLSLRTSDGGKVVGTIEVSVVKMGEIEDGEADHITTDVQGQKCALVCECTAPESVSGKDNLPFLNSVLKNPVCKLYRFPTSDNKWMRIREQMSESILSFHIPKELISLHIKEDLCRNQEIKELGELSPHWDNLRKNVLTHCDQMVNMYQDILTELSKETGSSFKSSSSKGEKTLEFVPINLHLQRMQVHSPHLKDALYDVITVGAPAAHFQGFKNGGLRKLLHRFETERRNTGYQFIYYSPENTAKAKEVLSNINQLQPLIATHADLLLNSASQHSPDSLKNSLKMLSEKTELFVHAFKDQLVRSALLALYTARPGGILKKPPSPKSSTEESSPQDQPPVMRGQDSIPHHSDYDEEEWDRVWANVGKSLNCIIAMVDKLIQKD

SEQ ID NO: 752877 - protein, 131 aa, Homo sapiens
MEIKEEGASEEGQHFLPTAQANDPGDCQFTSIQKTPNEPQLEFILACKDLVAPVRDRKLNTLVQISVIHPVEQSLTRYSSTEIVEGTRDPLFLTGVTFPSEYPIYEETKIKLTVYDVKDKSHDTIANSSRI

SEQ ID NO: 752878 - protein, 924 aa, Homo sapiens; identical to SEQ ID NO: 752871

SEQ ID NO: 752879 - protein, 938 aa, Homo sapiens
MEIKEEGASEEGQHFLPTAQANDPGDCQFTSIQKTPNEPQLEFILACKDLVAPVRDRKLNTLVQISVIHPVEQSLTRYSSTEIVEGTRDPLFLTGVTFPSEYPIYEETKIKLTVYDVKDKSHDTVRTSVLPEHKDPPPEVGRSFLGYASFKVGELLKSKEQLLVLSLRTSDGGKVVGTIEVSVVKMGEIEDGEADHITTDVQGQKCALVCECTAPESVSGKDNLPFLNSVLKNPVCKLYRFPTSDNKWMRIREQMSESILSFHIPKELISLHIKEDLCRNQEIKELGELSPHWDNLRKNVLTHCDQMVNMYQDILTELSKETGSSFKSSSSKGEKTLEFVPINLHLQRMQVHSPHLKDALYDVITVGAPAAHFQGFKNGGLRKLLHRFETERRNTGYQFIYYSPENTAKAKEVLSNINQLQPLIATHADLLLNSASQHSPDSLKNSLKMLSEKTELFVHAFKDQLVRSALLALYTARPGGILKKPPSPKSSTEESSPQDQPPVMRGQDSIPHHSDYDEEEWDRVWANVGKSLNCIIAMVDKLIERDGGSEGSGGNNDGEKEPSLTDAIPSHPREDWYEQLYPLILTLKDCMGEVVNRAKQSLTFVLLQELAYSLPQCLMLTLRRDIVFSQALAGLVCGFIIKLQTSLYDPGFLQQLHTVGLIVQYEGLLSTYSDEIGMLEDMAVGISDLKKVAFKIIEAKSNDVLPVITGRREHYVVEVKLPARMFESLPLQIKEGQLLHVYPVLFNVGINEQQTLAERFGDVSLQESINQENFELLQEYYKIFMEKMPPDYISHFQEQNDLKALLENLLQNIQSKKRKNVEIMWLAATICRKLNGIRFTCCKSAKDRTSMSVTLEQCSILRDEHQLHKDFFIRALDCMRSRQTQGALNESDDPETGCLTDNKPTSRHFYPVALLLVSSHLLVVWLILSLALLLAKYQ

SEQ ID NO: 752880 - protein, 911 aa, Homo sapiens
SAVAKFTFSPAQKFSLRYGVQFLFFLSPLPLPACKDLVAPVRDRKLNTLVQISVIHPVEQSLTRYSSTEIVEGTRDPLFLTGVTFPSEYPIYEETKIKLTVYDVKDKSHDTVRTSVLPEHKDPPPEVGRSFLGYASFKVGELLKSKEQLLVLSLRTSDGGKVVGTIEVSVVKMGEIEDGEADHITTDVQGQKCALVCECTAPESVSGKDNLPFLNSVLKNPVCKLYRFPTSDNKWMRIREQMSESILSFHIPKELISLHIKEDLCRNQEIKELGELSPHWDNLRKNVLTHCDQMVNMYQDILTELSKETGSSFKSSSSKGEKTLEFVPINLHLQRMQVHSPHLKDALYDVITVGAPAAHFQGFKNGGLRKLLHRFETERRNTGYQFIYYSPENTAKAKEVLSNINQLQPLIATHADLLLNSASQHSPDSLKNSLKMLSEKTELFVHAFKDQLVRSALLALYTARPGGILKKPPSPKSSTEESSPQDQPPVMRGQDSIPHHSDYDEEEWDRVWANVGKSLNCIIAMVDKLIERDGGSEGSGGNNDGEKEPSLTDAIPSHPREDWYEQLYPLILTLKDCMGEVVNRAKQSLTFVLLQELAYSLPQCLMLTLRRDIVFSQALAGLVCGFIIKLQTSLYDPGFLQQLHTVGLIVQYEGLLSTYSDEIGMLEDMAVGISDLKKVAFKIIEAKSNDVLPVITGRREHYVVEVKLPARMFESLPLQIKEGQLLHVYPVLFNVGINEQQTLAERFGDVSLQESINQENFELLQEYYKIFMEKMPPDYISHFQEQNDLKALLENLLQNIQSKKRKNVEIMWLAATICRKLNGIRFTCCKSAKDRTSMSVTLEQCSILRDEHQLHKDFFIRALDCMRREGCRIENVLKNIKCRKYAFNMLQLMAFPKYYRPPEGTYGKADT

SEQ ID NO: 752881 - protein, 820 aa, Homo sapiens
MEIKEEGASEEGQHFLPTAQANDPGDCQFTSIQKTPNEPQLEFILACKDLVAPVRDRKLNTLVQISVIHPVEQSLTRYSSTEIVEGTRDPLFLTGVTFPSEYPIYEETKIKLTVYDVKDKSHDTVRTSVLPEHKDPPPEVGRSFLGYASFKVGELLKSKEQLLVLSLRTSDGGKVVGTIEVSVVKMGEIEDGEADHITTDVQGQKCALVCECTAPESVSGKDNLPFLNSVLKNPVCKLYRFPTSDNKWMRIREQMSESILSFHIPKELISLHIKEDLCRNQEIKELGELSPHWDNLRKNVLTHCDQMVNMYQDILTELSKETGSSFKSSSSKGEKTLEFVPINLHLQRMQVHSPHLKDALYDVITVGAPAAHFQGFKNGGLRKLLHRFETERRNTGYQFIYYSPENTAKAKEVLSNINQLQPLIATHADLLLNSASQHSPDSLKNSLKMLSEKTELFVHAFKDQLVRSALLALYTARPGGILKKPPSPKSSTEESSPQDQPPVMRGQDSIPHHSDYDEEEWDRVWANVGKSLNCIIAMVDKLIERDGGSEGSGGNNDGEKEPSLTDAIPSHPREDWYEQLYPLILTLKDCMGEVVNRAKQSLTFVLLQELAYSLPQCLMLTLRRDIVFSQALAGLVCGFIIKLQTSLYDPGFLQQLHTVGLIVQYEGLLSTYSDEIGMLEDMAVGISDLKKVAFKIIEAKSNDVLPVITGRREHYVVEVKLPARMFESLPLQIKEGQLLHVYPVLFNVGINEQQTLAESGDVSFASKDYMRGHFEPPLDSTTYVIGKMPVEDICDDFQALTDLRILSQYIILRINPMPRG

SEQ ID NO: 752882 - protein, 123 aa, Homo sapiens
MGKDQILCPTQDRSSINVCPHLFLLTVPSATPKLISAPPVLGFPCLCSWPSPHLLVPSPFILQAQLKAFPSLGRLPRLPSWDDGSFLETLHQHCQPPSSSTYHTLYESIAYLFLCTSLICLIK

SEQ ID NO: 752883 - protein, 117 aa, Homo sapiens
QSCSRTPEDRKPLGPNLSGAPYTRVPAGLKLDLLNFFFFLRQSLSLLPTLECSGAISAHCNLRLPGSSNSPASASGVAEDHRWMVLPSPFSPKSIHPSSPAQSLPFSRKASQITQLG

SEQ ID NO: 752884 - protein, 127 aa, Homo sapiens
MWKSRSDPVLHIDLRRWADLLLVAPLDANTLGKVASGICDNLLTCVMRAWDRSKPLLFCPAMNTAMWEHPITAQQVDQLKAFGYVEIPCVAKKLVCGDEGLGAMAEVGTIVDKVKEVLFQHSGFQQS

SEQ ID NO: 752885 - protein, 252 aa, Homo sapiens
SQIPRESGRDTAIFGSGPETRLARILNPDSFIEPRPGRLPELEATRPHMEPKASCPAAAPLMERKFHVLVGVTGSVAALKLPLLVSKLLDIPGLEVAVVTTERAKHFYSPQDIPVTLYSDADEWEMWKSRSDPVLHIDLRRWADLLLVAPLDANTLGKVASGICDNLLTCVMRAWDRSKPLLFCPAMNTAMWEHPITAQQVDQLKAFGYVEIPCVAKKLVCGDEGLGAMAEVGTIVDKVKEVLFQHSGFQQS

SEQ ID NO: 752886 - protein, 177 aa, Homo sapiens
MRLAAKEGSPLSSQPVKTAPACPDPPVASRPVALPQDIPVTLYSDADEWEMWKSRSDPVLHIDLRRWADLLLVAPLDANTLGKVASGICDNLLTCVMRAWDRSKPLLFCPAMNTAMWEHPITAQQVDQLKAFGYVEIPCVAKKLVCGDEGLGAMAEVGTIVDKVKEVLFQHSGFQQS

SEQ ID NO: 752887 - protein, 252 aa, Homo sapiens; identical to SEQ ID NO: 752885

SEQ ID NO: 752888 - protein, 236 aa, Homo sapiens
SQIPRESGRDTAIFGSGPETRLARILNPDSFIEPRPGRLPELEATRPHMEPKASCPAAAPLMERKFHVLVGVTGSVAALKLPLLVSKLLDIPGLEVAVVTTERAKHFYSPQDIPVTLYSDADEWEMWKSRSDPVLHIDLRRWADLLLVAPLDANTLGKVASGICDNLLVSDVLVPSSVPGPHTQFAELQTSLYKETCCCGAPVCPGRSCSAIPHIAPSALTFSVAHGHSPGPDGSV

SEQ ID NO: 752889 - protein, 177 aa, Homo sapiens
SQIPRESGRDTAIFGSGPETRLARILNPDSFIEPRPGRLPELEATRPHMEPKASCPAAAPLMERKFHVLVGVTGSVAALKLPLLVSKLLDIPGTCVMRAWDRSKPLLFCPAMNTAMWEHPITAQQVDQLKAFGYVEIPCVAKKLVCGDEGLGAMAEVGTIVDKVKEVLFQHSGFQQS

SEQ ID NO: 752890 - protein, 247 aa, Homo sapiens
AALGSILRIQARAHGSWWSESRSRPRLRSHSRSSERSSHRRTRSRSRDRERRKGRDKEKREKEKDKGKDKELHNIKRGESGNIKAGLEHLPPAEQAKARLQLVLEAAAKADEALKAKERNEEEAKRRKEEDQATLVEQVKRVKEIEAIESDSFVQQTFRSSKEVKKSVEPSEVKQATSTSGPASAVADPPSTEKEIDPTSIPTAIKYQDDNSLAHPNLFIEKADAEEKWFKRLIALRQERLMGSPVA

SEQ ID NO: 752891 - protein, 80 aa, Homo sapiens
HQDLAEAGSNLETSKAGLEHLPPAEQAKARLQLVLEAAAKADEALKAKERNEEEAKRRKEEDQATLCRSRKQAGSGRSSE

SEQ ID NO: 752892 - protein, 127 aa, Homo sapiens
MKPEADKIVSLVHILMIEDAGIDQAVALLMAPEGNEVEVVQGVEGNPIEFRGLGQKAEQEGPGQDLVSVLIVVAVKGPVTEERVVGLGIENDVRAEIKRKEKRRRIKGRTRNYITSNVGNLETSKLD

SEQ ID NO: 752893 - protein, 344 aa, Homo sapiens
MGRRSSDTEEESRSKRKKKHRRRSSSSSSSDSRTYSRKKGGRKSRSKSRSWSRDLQPRSHSYDRRRRHRSSSSSSYGSRRKRSRSRSRGRGKSYRVQRSRSKSRTRRLRKLRLEKIRSRSRPRLRSHSRSSERSSHRRTRSRSRDRERRKGRDKEKREKEKDKGKDKELHNIKRGESGNIKAGLEHLPPAEQAKARLQLVLEAAAKADEALKAKERNEEEAKRRKEEDQATLVEQVKRVKEIEAIESDSFVQQTFRSSKEVKKSVEPSEVKQATSTSGPASAVADPPSTEKEIDPTSIPTAIKYQDDNSLAHPNLFIEKADAEEKWFKRLIALRQERLMGSPVA

SEQ ID NO: 752894 - protein, 360 aa, Homo sapiens
MGRRSSDTEEESRSKRKKKHRRRSSSSSSSDSRTYSRKKGGRKSRSKSRSWSRDLQPRSHSYDRRRRHRSSSSSSYGSRRKRSRSRSRGRGKSYRVQRSRSKSRTRRSRSRPRLRSHSRSSERSSHRRTRSRSRDRERRKGRDKEKREKEKDKGKDKELHNIKRGFHQKNCERKKKLTSNRKKKSFRKTKLESGNIKAGLEHLPPAEQAKARLQLVLEAAAKADEALKAKERNEEEAKRRKEEDQATLVEQVKRVKEIEAIESDSFVQQTFRSSKEVKKSVEPSEVKQATSTSGPASAVADPPSTEKEIDPTSIPTAIKYQDDNSLAHPNLFIEKADAEEKWFKRLIALRQERLMGSPVA

SEQ ID NO: 752895 - protein, 340 aa, Homo sapiens
MGRRSSDTEEESRSKRKKKHRRRSSSSSSSDSRTYSRKKGGRKSRSKSRSWSRDLQPRSHSYDRRRRHRSSSSSSYGSRRKRSRSRSRGRGKSYRVQRSRSKSRTRRSRSRPRLRSHSRSSERSSHRRTRSRSRDRERRKGRDKEKREKEKDKGKDKELHNIKRGESGNIKAGLEHLPPAEQAKARLQLVLEAAAKADEALKAKERNEEEAKRRKEEDQATLVEQVKRVKEIEAIESDSFVQQTFRSSKEVKKSVEPSEVKQATSTSGPASAVADPPSTEKEIDPTSIPTAIKYQDDNSLAHPNLFIEKADAEEKWFKRLIALRQERLMGLECRYRARFA

SEQ ID NO: 752896 - protein, 314 aa, Homo sapiens
MGRRSSDTEEESRSKRKKKHRRRSSSSSSSDSRTYSRKKGGRKSRSKSRSWSRDLQPRSHSYDRRRRHRSSSSSSYGSRRKRSRSRSRGRGKSYRVQRSRSKSRTRRSRSRPRLRSHSRSSERSSHRRTRSRSRDRERRKGRDKEKREKEKDKGKDKELHNIKRGESGNIKAGLEHLPPAEQAKARLQLVLEAAAKADEALKAKERNEEEAKRRKEEDQATLVEQVKRVKEIEAIESDSFVQQTFRSSKEVKKSGGRRKEIKILTLILISFLLSFGCMFYYLKNCSRRTVYGVSFFLLLLLSSSVSDDQRPMFF

SEQ ID NO: 752897 - protein, 334 aa, Homo sapiens
MGRRSSDTEEESRSKRKKKHRRRSSSSSSSDSRTYSRKKGGRKSRSKSRSWSRDLQPRSHSYDRRRRHRSSSSSSYGSRRKRSRSRSRGRGKSYRVQRSRSKSRTRRSRSRPRLRSHSRSSERSSHRRTRSRSRDRERRKGRDKEKREKEKDKGKDKELHNIKRGESGNIKAGLEHLPPAEQAKARLQLVLEAAAKADEALKAKERNEEEAKRRKEEDQATLVEQVKRVKEIEAIESDSFVQQTFRSSKEVKKSVEPSEVKQATSTSGPASAVADPPSTEKEIDPTSIPTAIKYQDDNSLAHPNLFIEKADAEEKWFKRLIALRQERLMGSPVA

SEQ ID NO: 752898 - protein, 276 aa, Homo sapiens
MGRRSSDTEEESRSKRKKKHRRRSSSSSSSDSRTYSRKKGGRKSRSKSRSWSRDLQPRSHSYDRRRRHRSSSSSSYGSRRKRSRSRSRGRGKSYRVQRSRSKSRTRRESGNIKAGLEHLPPAEQAKARLQLVLEAAAKADEALKAKERNEEEAKRRKEEDQATLVEQVKRVKEIEAIESDSFVQQTFRSSKEVKKSVEPSEVKQATSTSGPASAVADPPSTEKEIDPTSIPTAIKYQDDNSLAHPNLFIEKADAEEKWFKRLIALRQERLMGSPVA

SEQ ID NO: 752899 - protein, 334 aa, Homo sapiens; identical to SEQ ID NO: 752897

SEQ ID NO: 752900 - protein, 260 aa, Homo sapiens
DAWVDPRVGRSRSRGRGKSYRVQRSRSKSRTRRSRSRPRLRSHSRSSERSSHRRTRSRSRDRERRKGRDKEKREKEKDKGKDKELHNIKRGESGNIKAGLEHLPPAEQAKARLQLVLEAAAKADEALKAKERNEEEAKRRKEEDQATLVEQVKRVKEIEAIESDSFVQQTFRSSKEVKKSVEPSEVKQATSTSGPASAVADPPSTEKEIDPTSIPTAIKYQDDNSLAHPNLFIEKADAEEKWFKRLIALRQERLMGSPVA

SEQ ID NO: 752901 - protein, 248 aa, Homo sapiens
  misc_feature (8)..(8): Xaa can be any naturally occurring amino acid
  misc_feature (14)..(14): Xaa can be any naturally occurring amino acid
  misc_feature (18)..(18): Xaa can be any naturally occurring amino acid
AGGRKGEXLFLGKXLRGXSPLSRSRPRLRSHSRSSERSSHRRTRSRSRDRERRKGRDKEKREKEKDKGKDKELHNIKRGESGNIKAGLEHLPPAEQAKARLQLVLEAAAKADEALKAKERNEEEAKRRKEEDQATLVEQVKRVKEIEAIESDSFVQQTFRSSKEVKKSVEPSEVKQATSTSGPASAVADPPSTEKEIDPTSIPTAIKYQDDNSLAHPNLFIEKADAEEKWFKRLIALRQERLMGSPVA

SEQ ID NO: 752902 - protein, 164 aa, Homo sapiens
MFYEQIFPPAEQAKARLQLVLEAAAKADEALKAKERNEEEAKRRKEEDQATLVEQVKRVKEIEAIESDSFVQQTFRSSKEVKKSVEPSEVKQATSTSGPASAVADPPSTEKEIDPTSIPTAIKYQDDNSLAHPNLFIEKADAEEKWFKRLIALRQERLMGSPVA

SEQ ID NO: 752903 - protein, 213 aa, Homo sapiens
MGRRSSDTEEESRSKRKKKHRRRSSSSSSSDSRTYSRKKGGRKSRSKSRSWSRDLQPRSHSYDRRRRHRSSSSSSYGSRRKRSRSRSRGRGKSYRVQRSRSKSRTRRSRSRPRLRSHSRSSERSSHRRTRSRSRDRERRKGRDKEKREKEKDKGKDKELHNIKRGESGNIKAGLEHLMGVLLSLPGRRAVVQSWLTAASTSQVQVILLSQPPE

SEQ ID NO: 752904 - protein, 281 aa, Homo sapiens
RPPGGALYSWETGDDRFLFRNFHTGIWYSCEEELSGLGEKCRSFIDLAPASEKGVLWLSVVSEVLYILLLVVGFSLMCLELFHSSNVIDGLKLNAFAAVFTVLSGLLGMVAHMMYTQVFQVTVSLGPEDWRPHSWDYGWSFCLAWGSFTCCMAASVTTLNSYTKTVIEFRHKRKVFEQGYREEPTFIDPEAIKYFRERWQIEAQRGRATCAQLTQLDGEEGRERGGLHLRLQQERYPAETSHNMADSWPGGSDQEAPELTESAGSEGTGVTKPQAGREPQH

SEQ ID NO: 752905 - protein, 329 aa, Homo sapiens
RPPGGALYSWETGDDRFLFRNFHTGIWYSCEEELSGLGEKCRSFIDLAPASEKGVLWLSVVSEVLYILLLVVGFSLMCLELFHSSNVIDGLKLNAFAAVFTVLSVEDSTLVFPQPPGPLCLSFLCWSLLLCLISDVGFILGPFSLLFLQSPPGLLGMVAHMMYTQVFQVTVSLGPEDWRPHSWDYGWSFCLAWGSFTCCMAASVTTLNSYTKTVIEFRHKRKVFEQGYREEPTFIDPEAIKYFRERWQIEAQRGRATCAQLTQLDGEEGRERGGLHLRLQQERYPAETSHNMADSWPGGSDRKHQSVTESAGSEGTGVTKPQAGREPQH

SEQ ID NO: 752906 - protein, 226 aa, Homo sapiens
AAESVSSAMMRGSPCQHQQGLETQREEHQHLRGVLWLSVVSEVLYILLLVVGFSLMCLELFHSSNVIDGLKLNAFAAVFTVLSGLLGMVAHMMYTQVFQVTVSLGPEDWRPHSWDYGWSFCLAWGSFTCCMAASVTTLNSYTKTVIEFRHKRKVFEQGYREEPTFIDPEAIKYFRERMEKRDGSEEDFTLRLQQERYPAETSHNMADSWPGGSDQEAPELNDKCWV

SEQ ID NO: 752907 - protein, 130 aa, Homo sapiens
MRFSVSGMRTDYPRSVLAPAYVSVCLLLLCPREVIAPAGSEPWLCQPAPRCGDKIYNPLEQCCYNDAIVSLSETRQCGPPCTFWPCFELCCLDSFGLTNDFVVKLKVQGVNSQCHSSPISSKCESRRRFP

SEQ ID NO: 752908 - protein, 116 aa, Homo sapiens
RQSFTLVAQARVQWPFSAHRNLHLPGLSNSPASASLVAGIIGKRHHAWPKILFLAYSPEMFFYICIACAFSYWYSLRKIVPLLKEIKKSNHLLKSLFGERDKVLLCCPGWSAVALL

SEQ ID NO: 752909 - protein, 135 aa, Homo sapiens
MAEKFDHLEEHLEKFVENIRQLGIIVSDFQPSSQAGLNQKLNFIVTGLQDIDKCRQQLHDITVPLEVFEYIDQGRNPQLYTKECLERALAKNEQVKGKIDTMKKFKSLLIQELSKVFPEDMAKYRSIRGEDHPPS

SEQ ID NO: 752910 - protein, 135 aa, Homo sapiens; identical to SEQ ID NO: 752909

SEQ ID NO: 752911 - protein, 103 aa, Homo sapiens
MAEKFDHLEEHLEKFVENIRQLGIIVSDFQPSSQAGLNQKLNFIVTGLQDIDKCRQQLHDITVPLEVFEVSNILDISLGYKSCSVMVWYRDFFITGIRVPAVW

SEQ ID NO: 752912 - protein, 135 aa, Homo sapiens; identical to SEQ ID NO: 752909

SEQ ID NO: 752913 - protein, 135 aa, Homo sapiens; identical to SEQ ID NO: 752909

SEQ ID NO: 752914 - protein, 135 aa, Homo sapiens; identical to SEQ ID NO: 752909

SEQ ID NO: 752915 - protein, 71 aa, Homo sapiens
FPFSSEMAVLLSWMKASAAASLNAEHAGFAVPGRKPLKTLTPVSPAERLSLPAPFLTAHGAESVTKEKRAE

SEQ ID NO: 752916 - protein, 94 aa, Homo sapiens
MESSSNEIKRNHQMESNGIIIEWIRIESLNEIEWKQHEMESKGIIEWYRMESSWNGMEWNGMEWNQHRMESKAIIQWTLIESSNRLECNHHRME

SEQ ID NO: 752917 - protein, 176 aa, Homo sapiens
MTMCSGARLALLVYGIIMHSSVYSSPAAAGLRFPGIRPEEEAYGEDGNPLPDFGGSEPPGAGSPASAPRAAAAWYRPAGRRDVAHGILNEAYRKVLDQLSAGKHLQSLVARGVGGSLGGGAGDDAEPLSKRHSDGIFTDSYSRYRKQMAVKKYLAAVLGKRYKQRVKNKGRRIAYL

SEQ ID NO: 752918 - protein, 170 aa, Homo sapiens
THTPHLPLLEPGLAPDPSSCSRDHPGSYWRVLGLWRFPCQPPRPPRGRAPNKGVSSGHLGTETVTLGAHFASPSRDVAHGILNEAYRKVLDQLSAGKHLQSLVARGVGGSLGGGAGDDAEPLSKRHSDGIFTDSYSRYRKQMAVKKYLAAVLGKRYKQRVKNKGRRIAYL

SEQ ID NO: 752919 - protein, 170 aa, Homo sapiens; identical to SEQ ID NO: 752918

SEQ ID NO: 752920 - protein, 74 aa, Homo sapiens
VLAFSWELSCWRVVLFHGASPHGWCWLLTACWFQGHQKSYKVADFPQGTKADGAKPSKCVITDIPECHVHHIVS

SEQ ID NO: 752921 - protein, 119 aa, Homo sapiens
LLLNDPCHQSSPFRLHGSCRIVFLLVWDNNTQNQHIIPPWLCQVAGTFLVTGSLRDVLKCSVTPLRDKRDYSASVRPAEVAYWQMGLAAAAQPLNKDCRLNAYRGQAKAEEGSKVDMKQ

SEQ ID NO: 752922 - protein, 131 aa, Homo sapiens
  misc_feature (110)..(110): Xaa can be any naturally occurring amino acid
  misc_feature (119)..(119): Xaa can be any naturally occurring amino acid
  misc_feature (123)..(123): Xaa can be any naturally occurring amino acid
  misc_feature (130)..(130): Xaa can be any naturally occurring amino acid
VAGEVVVLVSLSHPVPSSSLQQTHALAAAMTEQMTLRGTLKGHNGWVTQIATTPQFPDMILSASRDKTIIMWKTGPGDEDQLWGISTGVALAGVHFPFCLGDVGLFSFRXGQFLPFSGXWGGXGTLAAFXG

SEQ ID NO: 752923 - protein, 111 aa, Homo sapiens
MKSLLFTLAVFMLLAQLVSGNWYVKKCLNDVGICKKKCKPEEMHVKNGWAMCGKQRDCCVPADRRANYPVFCVQTKTTRISTVTATTATTTLMMTTASMSSMAPTPVSPTG

SEQ ID NO: 752924 - protein, 631 aa, Homo sapiens
MIKEIITRRKIQTANYEKKHVCTTKQITKMKDVYNHRIGTNVPVILIKVNLSVDKRQKCQQTLISCYKIQKELSKSKPSKHKQENELYVCISGKVELREKEPEKKKTKKNHDIMLKGVTHEIMFLDICVPNNGKPFMYWKPEETQEETNTMLVGYFNSILSIHDRSSGEKTRTWDDLNKIQKIYLMHIRLYPKSGNYTSKYPGNISPFDCVLERTENISFRTEKRNNRWHLLMKNAINLEFEDRWSEKKINKLKPENTAHLQSKMFLSSSTILGLIRKCKVLKKHFISKIYTCSSEIQINSAQRKIHCPKIYVLKNKINVIITQNIEEKESFKGRLKESRKINEKNEETKLIFKICSKICNILANITREDKHKIRITKYGIGKSHKIFFAQLYANNLKTWIKWIIFQEGIVCQKMTSKEIKYNNCHRRNEVSISIQHDRLNTFKDPMKTKKCIWRINRNFLEHQFFILHFKAWNGIYCKDSVFYRIQAKAHQPEDKVRPAQENVSSGDLFPLVFHVSLTQSPLFTFSGALDPKPFLKKIILDLTENLQKIDFLCALLSASSNVNLHTNGTIIETRKLTLAQSYYYILYLNCSCFPSNVVFLVRYSIQDPYVLGSFWVFCSTGLLVHGTTLF

SEQ ID NO: 752925 - protein, 101 aa, Homo sapiens
YLLSLLVSVTISYCCLHLKHTHTHTHNHKKPVVSKNINFSCSCRVPLISARLPGVTWVSLILFLRAGPGMSANIPLVKTSHMLNPGYGKLCFALGGRTSQS

SEQ ID NO: 752926 - protein, 89 aa, Homo sapiens
QQRVASEGSHCHLRQPKQQDKPAPPDPPTFSFVGLSGKNKTKTKCRKSKSSFLSCQSPVSFCSVCALVKSRSSSVRCPHSAASAKSHKV

SEQ ID NO: 752927 - protein, 391 aa, Homo sapiens
RVGMVRDSMAAAFRPSNRVLLQALQILVYPGVGGSGSVSCRCPLGAKRYLLTDNVVKLKEFQQKKVAVACNLSGTKETYFRNLKKKLTQNKLILKGELITLLHLCESRDHVELAKNVIYRYHAENKNFTLGEYKFGPLFVRLCYELDLEESAVELMKDQHLRGFFSDSTSFNILMDMLFIKGKYKSALQVLIEMKNQDVKFTKDTYVLAFAICYKLNSPESFKICTTLREEALLKGEILSRRASCFAVALALNQNEMAKAVSIFSQIMNPESIACINLNIIIHIQSNMLENLIKTLKNAAEGNLSKFVKRHVFSEEVLAKVREKVKDVPALVAKFDEIYGTLHITGQVTTDSLDAVLCHTPRDRKSHTLLLNKRMVSRRTFQPLSQSLLAE

SEQ ID NO: 752928 - protein, 215 aa, Homo sapiens
MLFIKGKYKSALQVLIEMKNQDVKFTKDTYVLAFAICYKLNSPESFKICTTLREEALLKGEILSRRASCFAVALALNQNEMAKAVSIFSQIMNPESIACINLNIIIHIQSNMLENLIKTLKNAAEGNLSKFVKRHVFSEEVLAKVREKVKDVPALVAKFDEIYGTLHITGQVTTDSLDAVLCHTPRDRKSHTLLLNKRMVSRRTFQPLSQSLLAE

SEQ ID NO: 752929 - protein, 236 aa, Homo sapiens
MKDQHLRGFFSDSTSFNILMDMLFIKGKYKSALQVLIEMKNQDVKFTKDTYVLAFAICYKLNSPESFKICTTLREEALLKGEILSRRASCFAVALALNQNEMAKAVSIFSQIMNPESIACINLNIIIHIQSNMLENLIKTLKNAAEGNLSKFVKRHVFSEEVLAKVREKVKDVPALVAKFDEIYGTLHITGQVTTDSLDAVLCHTPRDRKSHTLLLNKRMVSRRTFQPLSQSLLAE

SEQ ID NO: 752930 - protein, 391 aa, Homo sapiens; identical to SEQ ID NO: 752927

SEQ ID NO: 752931 - protein, 391 aa, Homo sapiens; identical to SEQ ID NO: 752927

SEQ ID NO: 752932 - protein, 164 aa, Homo sapiens
RVGMVRDSMAAAFRPSNRVLLQALQILVYPGVGGSGSVSCRCPLGAKRYLLTDNVVKLKEFQQKKVAVACNLSGTKETYFRNLKKKLTQNKLILKGELITLLHLCESRDHVELAKNVIYRYHAENKNFTLGEYKFGPLFVRLCYELDLEESAVELMKDQVLCKY

SEQ ID NO: 752933 - protein, 236 aa, Homo sapiens; identical to SEQ ID NO: 752929

SEQ ID NO: 752934 - protein, 365 aa, Homo sapiens
SEYMGNGDFLPTRLQAQQDAVNTVCHSKTRSNPENNVGLITLDNDCEVLTTLTPDTGRILSKLHTVQPKGKITFCMGIHVAHLALKHRQGNNHKIRIIAFVGNPVEDNEKNLVKLAKCLKKEKVNVDIINFGEEEVNTEKLTAFVNTLNGKDGTGSHLVTVPPGPSLADALISFPILAGEGGAMMGLGASDFEFGVDPSADPELALVLRVFMEEQRQRQEEEARQAAAASAAEAGIATTGTEDSDDALLKMTISQQEFGHTGLPDLSSMTEEEKIVCAMQMSLQGAEFGLAESADIDASSAMDTSEPAKEEDDYDVMQDPEFLQSVLENLPGVDPNNEAIRNAVGSLASQATKDSKKDKKEEDKK

SEQ ID NO: 752935 - protein, 115 aa, Homo sapiens
IVPATWEAEVGESLEPRRRRLQRAEIAPLHSSLGNRARLHLKKKKWDTCLHEEVKGVGIKWKAEEPLLWWAGNSTPATPSLPHISSEPFVKDGRTMELGEGAITCLQCQQREANF

SEQ ID NO: 752936 - protein, 473 aa, Homo sapiens
MEEQQPEPKSQRDSALGAAAAATPGGLSLSLSPGASGSSGSGSDGDSVPVSPQPAPPSPPAAPCLPPLAHHPHLPPHPPPPPPQHLAAPAHQPQPAAQLHRTTNFFIDNILRPDFGCKKEQPPPQLLVAAAARGGAGGGGRVERDRGQTAAGRDPVHPLGTRAPGAASLLCAPDANCGPPDGSQPAAAGAGASKAGNPAAAAAAAAAAVAAAAAAAAAKPSDTGGGGSGGGAGSPGAQGTKYPEHGNPAILLMGSANGGPVVKTDSQQPLVWPAWVYCTRYSDRPSSGPRTRKLKKKKNEKEDKRPRTAFTAEQLQRLKAEFQANRYITEQRRQTLAQELSLNESQIKIWFQNKRAKIKKATGIKNGLALHLMAQGLYNHSTTTVQDKDESEYAATGRGRARAPSRHRRRRLPAPRWGRKHLLQGGRERREKSERDRKRASEWTMTLKRSIFEKGERLGQVLSKNKIHSLFPV

SEQ ID NO: 752937 - protein, 142 aa, Homo sapiens
MGSANGGPVVKTDSQQPLVWPAWVYCTRYSDRPSSGPRTRKLKKKKNEKEDKRPRTAFTAEQLQRLKAEFQANRYITEQRRQTLAQELSLNESQIKIWFQNKRAKIKKATASAPRREGAQGKERERQKESLRMDNDVETQHF

SEQ ID NO: 752938 - protein, 105 aa, Homo sapiens
MEENRRLEHQKKQEKANRIVAEAIARARARGEQNIPRVLNEDELPSVRPEEEGEKKRRKKSAGERLKEEKPKKSKTSGASKTKGKSKLNVSTPCYCDGTCKSKLK

SEQ ID NO: 752939 - protein, 46 aa, Homo sapiens
  misc_feature (45)..(45): Xaa can be any naturally occurring amino acid
TCAHLQGFQLIGVEVHVRVKDGPVLSVPHQGRQSPSLLRAPQRDXW

SEQ ID NO: 752940 - protein, 134 aa, Homo sapiens
TGQPGRVSLKEGDTWLVARSLYYQRLLSNPSIEPWGKLRLGGEAGVHPRPQRSEAGPASHLQSWTPRSHTGDCRKRGGRAGAQPQLHRKSARLHPGASRQGKLPSPQPAGQAPETAPLGFCHNLSRKTGKLSWA

SEQ ID NO: 752941 - protein, 612 aa, Homo sapiens
MSDKSELKAELERKKQRLAQIREEKKRKEEERKKKETDQKKEAVAPVQEESDLEKKRREAEALLQSMGLTPESPIVPPPMSPSSKSVSTPSEAGSQDSGDGAVGSRRGPIKLGMAKITQVDFPPREIVTYTKETQTPVMAQPKEDEEEDDDVVAPKPPIEPEEEKTLKKDEENDSKAPPHELTEEEKQQILHSEEFLSFFDHSTRIVERALSEQINIFFDYSGRDLEDKEGEIQAGAKLSLNRQFFDERWSKHRVVSCLDWSSQYPELLVASYNNNEDAPHEPDGVALVWNMKYKKTTPEYVFHCQSAVMSATFAKFHPNLVVGGTYSGQIVLWDNRSNKRTPVQRTPLSAAAHTHPVYCVNVVGTQNAHNLISISTDGKICSWSLDMLSHPQDSMELVHKQSKAVAVTSMSFPVGDVNNFVVGSEEGSVYTACRHGSKAGISEMFEGHQGPITGIHCHAAVGAVDFSHLFVTSSFDWTVKLWTTKNNKPLYSFEDNADYVYDVMWSPTHPALFACVDGMGRLDLWNLNNDTEVPTASISVEGNPALNRVRWTHSGREIAVGDSEGQIVIYDVGEQIAVPRNDEWARFGRTLAEINANRADAEEEAATRIPA

SEQ ID NO: 752942 - protein, 612 aa, Homo sapiens; identical to SEQ ID NO: 752941

SEQ ID NO: 752943 - protein, 612 aa, Homo sapiens; identical to SEQ ID NO: 752941

SEQ ID NO: 752944 - protein, 640 aa, Homo sapiens
RRAAWQFLLTSPPGPALGRKGGETWVTNMSDKSELKAELERKKQRLAQIREEKKRKEEERKKKETDQKKEAVAPVQEESDLEKKRREAEALLQSMGLTPESPIVPPPMSPSSKSVSTPSEAGSQDSGDGAVGSRRGPIKLGMAKITQVDFPPREIVTYTKETQTPVMAQPKEDEEEDDDVVAPKPPIEPEEEKTLKKDEENDSKAPPHELTEEEKQQILHSEEFLSFFDHSTRIVERALSEQINIFFDYSGRDLEDKEGEIQAGAKLSLNRQFFDERWSKHRVVSCLDWSSQYPELLVASYNNNEDAPHEPDGVALVWNMKYKKTTPEYVFHCQSAVMSATFAKFHPNLVVGGTYSGQIVLWDNRSNKRTPVQRTPLSAAAHTHPVYCVNVVGTQNAHNLISISTDGKICSWSLDMLSHPQDSMELVHKQSKAVAVTSMSFPVGDVNNFVVGSEEGSVYTACRHGSKAGISEMFEGHQGPITGIHCHAAVGAVDFSHLFVTSSFDWTVKLWTTKNNKPLYSFEDNADYVYDVMWSPTHPALFACVDGMGRLDLWNLNNDTEVPTASISVEGNPALNRVRWTHSGREIAVGDSEGQIVIYDVGEQIAVPRNDEWARFGRTLAEINANRADAEEEAATRIPA

SEQ ID NO: 752945 - protein, 632 aa, Homo sapiens
MSDKSELKAELERKKQRLAQIREEKKRKEEERKKKETDQKKEAVAPVQEESDLEKKRREAEALLQSMGLTPESPIVPPPMSPSSKSVSTPSEAGSQDSGDGAVGSRTLHWDTDPSVLQLHSDSDLGRGPIKLGMAKITQVDFPPREIVTYTKETQTPVMAQPKEDEEEDDDVVAPKPPIEPEEEKTLKKDEENDSKAPPHELTEEEKQQILHSEEFLSFFDHSTRIVERALSEQINIFFDYSGRDLEDKEGEIQAGAKLSLNRQFFDERWSKHRVVSCLDWSSQYPELLVASYNNNEDAPHEPDGVALVWNMKYKKTTPEYVFHCQSAVMSATFAKFHPNLVVGGTYSGQIVLWDNRSNKRTPVQRTPLSAAAHTHPVYCVNVVGTQNAHNLISISTDGKICSWSLDMLSHPQDSMELVHKQSKAVAVTSMSFPVGDVNNFVVGSEEGSVYTACRHGSKAGISEMFEGHQGPITGIHCHAAVGAVDFSHLFVTSSFDWTVKLWTTKNNKPLYSFEDNADYVYDVMWSPTHPALFACVDGMGRLDLWNLNNDTEVPTASISVEGNPALNRVRWTHSGREIAVGDSEGQIVIYDVGEQIAVPRNDEWARFGRTLAEINANRADAEEEAATRIPA

SEQ ID NO: 752946 - protein, 553 aa, Homo sapiens
RRYRNQYIHHCEEQQSVPPPMSPSSKSVSTPSEAGSQDSGDGAVGSRRGPIKLGMAKITQVDFPPREIVTYTKETQTPVMAQPKEDEEEDDDVVAPKPPIEPEEEKTLKKDEENDSKAPPHELTEEEKQQILHSEEFLSFFDHSTRIVERALSEQINIFFDYSGRDLEDKEGEIQAGAKLSLNRQFFDERWSKHRVVSCLDWSSQYPELLVASYNNNEDAPHEPDGVALVWNMKYKKTTPEYVFHCQSAVMSATFAKFHPNLVVGGTYSGQIVLWDNRSNKRTPVQRTPLSAAAHTHPVYCVNVVGTQNAHNLISISTDGKICSWSLDMLSHPQDSMELVHKQSKAVAVTSMSFPVGDVNNFVVGSEEGSVYTACRHGSKAGISEMFEGHQGPITGIHCHAAVGAVDFSHLFVTSSFDWTVKLWTTKNNKPLYSFEDNADYVYDVMWSPTHPALFACVDGMGRLDLWNLNNDTEVPTASISVEGNPALNRVRWTHSGREIAVGDSEGQIVIYDVGEQIAVPRNDEWARFGRTLAEINANRADAEEEAATRIPA

SEQ ID NO: 752947 - protein, 499 aa, Homo sapiens
MAKITQVDFPPREIVTYTKETQTPVMAQPKEDEEEDDDVVAPKPPIEPEEEKTLKKDEENDSKAPPHELTEEEKQQILHSEEFLSFFDHSTRIVERALSEQINIFFDYSGRDLEDKEGEIQAGAKLSLNRQFFDERWSKHRVVSCLDWSSQYPELLVASYNNNEDAPHEPDGVALVWNMKYKKTTPEYVFHCQSAVMSATFAKFHPNLVVGGTYSGQIVLWDNRSNKRTPVQRTPLSAAAHTHPVYCVNVVGTQNAHNLISISTDGKICSWSLDMLSHPQDSMELVHKQSKAVAVTSMSFPVGDVNNFVVGSEEGSVYTACRHGSKAGISEMFEGHQGPITGIHCHAAVGAVDFSHLFVTSSFDWTVKLWTTKNNKPLYSFEDNADYVYDVMWSPTHPALFACVDGMGRLDLWNLNNDTEVPTASISVEGNPALNRVRWTHSGREIAVGDSEGQIVIYDVGEQIAVPRNDEWARFGRTLAEINANRADAEEEAATRIPA

SEQ ID NO: 752948 - protein, 453 aa, Homo sapiens
GTRWHEALKKDEENDSKAPPHELTEEEKQQILHSEEFLSFFDHSTRIVERALSEQINIFFDYSGRDLEDKEGEIQAGAKLSLNRQFFDERWSKHRVVSCLDWSSQYPELLVASYNNNEDAPHEPDGVALVWNMKYKKTTPEYVFHCQSAVMSATFAKFHPNLVVGGTYSGQIVLWDNRSNKRTPVQRTPLSAAAHTHPVYCVNVVGTQNAHNLISISTDGKICSWSLDMLSHPQDSMELVHKQSKAVAVTSMSFPVGDVNNFVVGSEEGSVYTACRHGSKAGISEMFEGHQGPITGIHCHAAVGAVDFSHLFVTSSFDWTVKLWTTKNNKPLYSFEDNADYVYDVMWSPTHPALFACVDGMGRLDLWNLNNDTEVPTASISVEGNPALNRVRWTHSGREIAVGDSEGQIVIYDVGEQIAVPRNDEWARFGRTLAEINANRADAEEEAATRIPA

SEQ ID NO: 752949 - protein, 199 aa, Homo sapiens
MSPSSKSVSTPSEAGSQDSGDGAVGSRTLHWDTDPSVLQLHSDSDLGRGPIKLGMAKITQVDFPPREIVTYTKETQTPVMAQPKEDEEEDDDVVAPKPPIEPEEEKTLKKDEENDSKAPPHELTEEEKQQILHSEEFLSFFDHSTRIVERALSEQINIFFDYSGRDLEDKEGIRSYSWLPITTMKMPLMSLMVWPLYGI

SEQ ID NO: 752950 - protein, 400 aa, Homo sapiens
DKSSTCMYLSFSVLPISPTIVKEDIYPVRESSSNNSRRMVKARVVSCLDWSSYPELLVASYNNNEDAPHEPDGVALVWNMKYKKTTPEYVFHCQSAVMSATFAKFHPNLVVGGTYSGQIVLWDNRSNKRTPVQRTPLSAAAHTHPVYCVNVVGTQNAHNLISISTDGKICSWSLDMLSHPQDSMELVHKQSKAVAVTSMSFPVGDVNNFVVGSEEGSVYTACRHGSKAGISEMFEGHQGPITGIHCHAAVGAVDFSHLFVTSSFDWTVKLWTTKNNKPLYSFEDNADYVYDVMWSPTHPALFACVDGMGRLDLWNLNNDTEVPTASISVEGNPALNRVRWTHSGREIAVGDSEGQIVIYDVGEQIAVPRNDEWARFGRTLAEINANRADAEEEAATRIPA

SEQ ID NO: 752951 - protein, 612 aa, Homo sapiens; identical to SEQ ID NO: 752941

SEQ ID NO: 752952 - protein, 612 aa, Homo sapiens; identical to SEQ ID NO: 752941

SEQ ID NO: 752953 - protein, 266 aa, Homo sapiens
  misc_feature (1)..(1): Xaa can be any naturally occurring amino acid
XCSNNIYTIHPVYCVNVVGTQNAHNLISISTDGKICSWSLDMLSHPQDSMELVHKQSKAVAVTSMSFPVGDVNNFVVGSEEGSVYTACRHGSKAGISEMFEGHQGPITGIHCHAAVGAVDFSHLFVTSSFDWTVKLWTTKNNKPLYSFEDNADYVYDVMWSPTHPALFACVDGMGRLDLWNLNNDTEVPTASISVEGNPALNRVRWTHSGREIAVGDSEGQIVIYDVGEQIAVPRNDEWARFGRTLAEINANRADAEEEAATRIPA

SEQ ID NO: 752954 - protein, 504 aa, Homo sapiens
MSDKSELKAELERKKQRLAQIREEKKRKEEERKKKETDQKKEAVAPVQEESDLEKKRREAEALLQSMGLTPESPIVPPPMSPSSKSVSTPSEAGSQDSGDGAVGSRRGPIKLGMAKITQVDFPPREIVTYTKETQTPVMAQPKEDEEEDDDVVAPKPPIEPEEEKTLKKDEENDSKAPPHELTEEEKQQILHSEEFLSFFDHSTRIVERALSEQINIFFDYSGRDLEDKEGEIQAGAKLSLNRQFFDERWSKHRVVSCLDWSSQYPELLVASYNNNEDAPHEPDGVALVWNMKYKKTTPEYVFHCQSAVMSATFAKFHPNLVVGGTYSGQIVLWDNRSNKRTPVQRTPLSAAAHTHPVYCVNVVGTQNAHNLISISTDGKICSWSLDMLSHPQDSMELVHKQSKANNKPLYSFEDNADYVYDVMWSPTHPALFACVDGMGRLDLWNLNNDTEVPTASISVEGNPALNRVRWTHSGREIAVGDSEGQIVIYDVGEHIAFPPNDDW

SEQ ID NO: 752955 - protein, 244 aa, Homo sapiens
MSDKSELKAELERKKQRLAQIREEKKRKEEERKKKETDQKKEAVAPVQEESDLEKKRREAEALLQSMGLTPESPIAEQPLRVVTADTVYFTIEFPPPMSPSSKSVSTPSEAGSQDSGDGAVGSRTLHWDTDPSVLQLHSDSDLGRGPIKLGMAKITQVDFPPREIVTYTKETQTPVMAQPKEDEEEDDDVVAPKPPIEPEEEKTLKKDEENDSKVSPLLACWGKKIPNFFTFGEILKIFFPNLQ

SEQ ID NO: 752956 - protein, 612 aa, Homo sapiens; identical to SEQ ID NO: 752941

SEQ ID NO: 752957 - protein, 612 aa, Homo sapiens; identical to SEQ ID NO: 752941

SEQ ID NO: 752958 - protein, 553 aa, Homo sapiens
MSPSSKSVSTPSEAGSQDSGDGAVGSRTLHWDTDPSVLQLHSDSDLGRGPIKLGMAKITQVDFPPREIVTYTKETQTPVMAQPKEDEEEDDDVVAPKPPIEPEEEKTLKKDEENDSKAPPHELTEEEKQQILHSEEFLSFFDHSTRIVERALSEQINIFFDYSGRDLEDKEGEIQAGAKLSLNRQFFDERWSKHRVVSCLDWSSQYPELLVASYNNNEDAPHEPDGVALVWNMKYKKTTPEYVFHCQSAVMSATFAKFHPNLVVGGTYSGQIVLWDNRSNKRTPVQRTPLSAAAHTHPVYCVNVVGTQNAHNLISISTDGKICSWSLDMLSHPQDSMELVHKQSKAVAVTSMSFPVGDVNNFVVGSEEGSVYTACRHGSKAGISEMFEGHQGPITGIHCHAAVGAVDFSHLFVTSSFDWTVKLWTTKNNKPLYSFEDNADYVYDVMWSPTHPALFACVDGMGRLDLWNLNNDTEVPTASISVEGNPALNRVRWTHSGREIAVGDSEGQIVIYDVGEQIAVPRNDEWARFGRTLAEINANRADAEEEAATRIPA

SEQ ID NO: 752959 - protein, 630 aa, Homo sapiens
MSDKSELKAELERKKQRLAQIREEKKRKEEERKKKETDQKKEAVAPVQEESDLEKKRREAEALLQSMGLTPESPIAEQPLRVVTADTVYFTIWFPPPMSPSSKSVSTPSEAGSQDSGDGAVGSRRGPIKLGMAKITQVDFPPREIVTYTKETQTPVMAQPKEDEEEDDDVVAPKPPIEPEEEKTLKKDEENDSKAPPHELTEEEKQQILHSEEFLSFFDHSTRIVERALSEQINIFFDYSGRDLEDKEGEIQAGAKLSLNRQFFDERWSKHRVVSCLDWSSQYPELLVASYNNNEDAPHEPDGVALVWNMKYKKTTPEYVFHCQSAVMSATFAKFHPNLVVGGTYSGQIVLWDNRSNKRTPVQRTPLSAAAHTHPVYCVNVVGTQNAHNLISISTDGKICSWSLDMLSHPQDSMELVHKQSKAVAVTSMSFPVGDVNNFVVGSEEGSVYTACRHGSKAGISEMFEGHQGPITGIHCHAAVGAVDFSHLFVTSSFDWTVKLWTTKNNKPLYSFEDNADYVYDVMWSPTHPALFACVDGMGRLDLWNLNNDTEVPTASISVEGNPALNRVRWTHSGREIAVGDSEGQIVIYDVGEQIAVPRNDEWARFGRTLAEINANRADAEEEAATRIPA

SEQ ID NO: 752960 - protein, 431 aa, Homo sapiens
RARSLCLTHLHSEEFLSFFDHSTRIVERALSEQINIFFDYSGRDLEDKEGEIQAGAKLSLNRQFFDERWSKHRVVSCLDWSSQYPELLVASYNNNEDAPHEPDGVALVWNMKYKKTTPEYVFHCQSAVMSATFAKFHPNLVVGGTYSGQIVLWDNRSNKRTPVQRTPLSAAAHTHPVYCVNVVGTQNAHNLISISTDGKICSWSLDMLSHPQDSMELVHKQSKAVAVTSMSFPVGDVNNFVVGSEEGSVYTACRHGSKAGISEMFEGHQGPITGIHCHAAVGAVDFSHLFVTSSFDWTVKLWTTKNNKPLYSFEDNADYVYDVMWSPTHPALFACVDGMGRLDLWNLNNDTEVPTASISVEGNPALNRVRWTHSGREIAVGDSEGQIVIYDVGEQIAVPRNDEWARFGRTLAEINANRADAEEEAATRIPA

SEQ ID NO: 752961 - protein, 321 aa, Homo sapiens [sequence omitted]

SEQ ID NO: 752962 - protein, 480 aa, Homo sapiens
MSDKSELKAELERKKQRLAQIREEKKRKEEERKKKETDQKKEAVAPVQEESDLEKKRREAEALLQSMGLTPESPIVPPPMSPSSKSVSTPSEAGSQDSGDGAVGSRRGPIKLGMAKITQVDFPPREIVTYTKETQTPVMAQPKEDEEEDDDVVAPKPPIEPEEEKTLKKDEENDSKAPPHELTEEEKQQILHSEEFLSFFDHSTRIVERALSEQINIFFDYSGRDLEDKEGEIQAGAKLSLNRQFFDERWSKHRVVSCLDWSSQYPELLVASYNNNEDAPHEPDGVALVWNMKYKKTTPEYVFHCQSAVMSATFAKFHPNLVVGGTYSGQIVLWDNRSNKRTPVQRTPLSAAAHTHPVYCVNVVGTQNAHNLISISTDGKICSWSLDMLSHPQDSMELVHKQSKAVAVTSMSFPVGDVNNFVVGSEEGSVYTACRHGSKAGISEMFEGHQGPITGIHCHAAVGAVDFSHLFVTSSFGLGP

SEQ ID NO: 752963 - protein, 377 aa, Homo sapiens
MSDKSELKAELERKKQRLAQIREEKKRKEEERKKKETDQKKEAVAPVQEESDLEKKRREAEALLQSMGLTPESPIVPPPMSPSSKSVSTPSEAGSQDSGDGAVGSRRGPIKLGMAKITQVDFPPREIVTYTKETQTPVMAQPKEDEEEDDDVVAPKPPIEPEEEKTLKKDEENDSKAPPHELTEEEKQQILHSEEFLSFFDHSTRIVERALSEQINIFFDYSGRDLEDKEGEIQAGAKLSLNRQFFDERWSKHRVVSCLDWSSQYPELLVASYNNNEDAPHEPDGVALVWNMKYKKTTPEYVFHCQSAVMSATFAKFHPNLVVGGTYSGQIVLWDNRSNKRTPVQRTPLSAAAHTHPVYCVNVVGTQNAHISTGREL

SEQ ID NO: 752964 - protein, 224 aa, Homo sapiens
MSDKSELKAELERKKQRLAQIREEKKRKEEERKKKETDQKKEAVAPVQEESDLEKKRREAEALLQSMGLTPESPIVPPPMSPSSKSVSTPSEAGSQDSGDGAVGSRRGPIKLGMAKITQVDFPPREIVTYTKETQTPVMAQPKEDEEEDDDVVAPKPPIEPEEEKTLKKDEENDSKAPPHELTEEEKQQILHSEEFLSFFDHSTRIVERALSEQINIFCHSSFD

SEQ ID NO: 752965 - protein, 70 aa, Homo sapiens
PVASSGNQNRSGSLLFATKCFAQRKTRFHLALGSKLGLEGGGVKPGQAKGDLKPEQVGASPRKPCIILSW

SEQ ID NO: 752966 - protein, 121 aa, Homo sapiens
MNTEAEQQLLHHARNGNAEEVRQLLETMARNEVIADINCKGRSKSNLGWTPLHLACYFGHRQVVQDLLKAGAEVNVLNDMGDTPLHRAAFTGRKMECRSVGQDGVQWHDLGSLQPPPPEFK

SEQ ID NO: 752967 - protein, 125 aa, Homo sapiens
EAESCWVAQAGVQWCNLGSLQPSPPKFKPFFSLSLQCSWDYRHPPPCPANFCLFSRDGVSSQGQAGLEFLTSSNPPRSASQSAGITGVSHCAWPESTFRKHYSFTFFKLEALRKSQPFAHLRQRH

SEQ ID NO: 752968 - protein, 101 aa, Homo sapiens
ISRSKTTLFSERPFPHLCPHRSPPSPLRPLPGLLSPLHLFQEASQSPRAVPSAPGVRLQMPRKAQRDCFLSPTGLCPKAGEFWSQAGVRKVPGLWPLIAPL

SEQ ID NO: 752969 - protein, 360 aa, Homo sapiens
MWSECEGPEMSLVCLTDFQAHAREQLSKSTRDFIEGGADDSITRDDNIAAFKRIRLRPRYLRDVSEVDTRTTIQGEEISAPICIAPTGFHCLVWPDGEMSTARAAQAAGICYITSTFASCSLEDIVIAAPEGLRWFQLYVHPDLQLNKQLIQRVESLGFKALVITLDTPVCGNRRHDIRNQLRRNLTLTDLQSPKKGNAIPYFQMTPISTSLCWNDLSWFQSITRLPIILKGILTKEDAELAVKHNVQGIIVSNHGGRQLDEVLASIDALTEVVAAVKGKIEVYLDGGVRTGNDVLKALALGAKCIFLGRPILWGLACKGEHGVKEVLNILTNEFHTSMALTGCRSVAEINRNLVQFSRL

SEQ ID NO: 752970 - protein, 144 aa, Homo sapiens
KSESQNRKPSSPCVSPFQIDALTEVVAAVKGKIEVYLDGGVRTGNDVLKALALGAKCIFLGRPILWGLACKVRVAKQTSKKIQSFSFISVLSCGSFSKLRHFQAHCKCSIAFIPYLCLCAFLYSQGNSHFTDNPHLSHYSSDYI

SEQ ID NO: 752971 - protein, 107 aa, Homo sapiens
MSSTLPWPLQAAGRSLRSIETWSSFPGCKKKGPITRLLRLPTGGSQTHSTVCDAVLPGPHSVRRLMAHISHISNTTTPVLQALQTPVFPKCSMPFFVSLTIICCSLA

SEQ ID NO: 752972 - protein, 351 aa, Homo sapiens
MSLVCLTDFQAHAREQLSKSTRDFIEGGADDSITRDDNIAAFKRIRLRPRYLRDVSEVDTRTTIQGEEISAPICIAPTGFHCLVWPDGEMSTARAAQAAGICYITSTFASCSLEDIVIAAPEGLRWFQLYVHPDLQLNKQLIQRVESLGFKALVITLDTPVCGNRRHDIRNQLRRNLTLTDLQSPKKGNAIPYFQMTPISTSLCWNDLSWFQSITRLPIILKGILTKEDAELAVKHNVQGIIVSNHGGRQLDEVLASIDALTEVVAAVKGKIEVYLDGGVRTGNDVLKALALGAKCIFLGRPILWGLACKGEHGVKEVLNILTNEFHTSMALTGCRSVAEINRNLVQFSRL

SEQ ID NO: 752973 - protein, 392 aa, Homo sapiens
MWSECEGPEMSLVCLTDFQAHAREQLSKSTRDFIEGGADDSITRDDNIAAFKRIRLRPRYLRDVSEVDTRTTIQGEEISAPICIAPTGFHCLVWPDGEMSTARAAQAAGICYITSTFASCSLEDIVIAAPEGLRWFQLYVHPDLQLNKQLIQRVESLGFKALVITLDTPVCGNRRHDIRNQLRRNLTLTDLQSPKKGNAIPYFQMTPISTSLCWNDLSWFQSITRLPIILKGILTKEDAELAVKHNVQGIIVSNHGGRQLDEVLASIDALTEVVAAVKGKIEVYLDGGVRTGNDVLKALALGAKCIFLGRPILWGLACKVRVAKQTSKKIQSFSFISVLSCGSFSKLRHFQAHCKCSIAFIPYLCLCAFLYSQGNSHFTDNPHLSHYSSDYI

SEQ ID NO: 752974 - protein, 579 aa, Homo sapiens
MNKSQEQVSFKDVCVDFTQEEWYLLDPAQKILYRDVILENYSNLVSVGYCITKPEVIFKIEQGEEPWILEKGFPSQCHPERKWKVDDVLESSQENEDDHFWELLFHNNKTVSVENGDRGSKTFNLGTDPVSLRNYPYKICDSCEMNLKNISGLIISKKNCSRKKPDEFNVCEKLLLDIRHEKIPIGEKSYKYDQKRNAINYHQDLSQPSFGQSFEYSKNGQGFHDEAAFFTNKRSQIGETVCKYNECGRTFIESLKLNISQRPHLEMEPYGCSICGKSFCMNLRFGHQRALTKDNPYEYNEYGEIFCDNSAFIIHQGAYTRKILREYKVSDKTWEKSALLKHQIVHMGGKSYDYNENGSNFSQKSHLTQLRRAHTGEKTFECGECGKTFWEKSNLTQHQRTHTGEKPYECTECGKAFCQKPHLTNHQRTHTGEKPYECKQCGKTFCVKSNLTEHQRTHTGEKPYECNACGKSFCHRSALTVHQRTHTGEKPFICNECGKSFCVKSNLIVHQRTHTGEKPYKCNECGKTFCEKSALTKHQRTHTGEKPYECNACGKTFSQRSVLTKHQRIHTRVKALSTS

SEQ ID NO: 752975 - protein, 579 aa, Homo sapiens; identical to SEQ ID NO: 752974

SEQ ID NO: 752976 - protein, 119 aa, Homo sapiens
MNKSQEQVSFKDVCVDFTQEEWYLLDPAQKILYRDVILENYSNLVSVGYCITKPEVIFKIEQGEEPWILEKGFPSQCHPERKWKVDDVLESSQENEDDHFWELLFHNNKTWNLKLIKVE

SEQ ID NO: 752977 - protein, 579 aa, Homo sapiens; identical to SEQ ID NO: 752974

SEQ ID NO: 752978 - protein, 579 aa, Homo sapiens; identical to SEQ ID NO: 752974

SEQ ID NO: 752979 - protein, 579 aa, Homo sapiens; identical to SEQ ID NO: 752974

SEQ ID NO: 752980 - protein, 148 aa, Homo sapiens
MNKSQEQVSFKDVCVDFTQEEWYLLDPAQKILYRDVILENYSNLVSVGYCITKPEVIFKIEQGEEPWILEKGFPSQCHPGSGTGNTAAQNAVEEAFEFLFRLVHIVTLCAIFHTTESRSIAQTGVQWRDLGSLQPVAPTFKQFSASAS

SEQ ID NO: 752981 - protein, 68 aa, Homo sapiens
GLPGPDLGSEGRSSRQDPLTERCLPHLGTSRRTSRVQALPLWLSLCSVGPGDSGNPPGLQRLRCRMGK

SEQ ID NO: 752982 - protein, 71 aa, Homo sapiens
LPGSSNSHASASQVAGTTGAHHCARLTFCVLVEMGFHHVAQGGLERLSSGNPPTSASQSAGITGKNHRVRP

SEQ ID NO: 752983 - protein, 75 aa, Homo sapiens
  misc_feature (6)..(6): Xaa can be any naturally occurring amino acid
LVNFPXPKKEGSLMIGYPNSTHHLPLNSMPDRSRFLGLLTRDEHQDFMDEQKRLKKLRGKEKPKKGEGKRAAKRK

SEQ ID NO: 752984 - protein, 75 aa, Homo sapiens; identical to SEQ ID NO: 752983
  misc_feature (6)..(6): Xaa can be any naturally occurring amino acid

SEQ ID NO: 752985 - protein, 87 aa, Homo sapiens
ELVLGKSLPKCFKVECVKVLFPRVGLGQGRILAAQEEEKPLSPLPGLDKLETLYSCWVTSGGCLKHKQCTSRPATERNGAFEAQKKK

SEQ ID NO: 752986 - protein, 124 aa, Homo sapiens
HFLVRFLGGLLGVHPAAYWLKMYSPFMWSLWGRLGEREINSATVLILNIDKCLFEIKNQSLQKKKKGSAARDLKLVGRVGRPTRPKRIGSWGILIPMVSGCSELAPTMSLDLFWCYLINSQQAY

SEQ ID NO: 752987 - protein, 148 aa, Homo sapiens
LCYGPPIENGFYYDMFIEDRAVSSTELSALENICKAIIKEKQPFERLEVSKEILLEMFKYNKFKCRILNEKVNTATTTVYRCGPLIDLCKGPHVRHTGKIKTIKIFKNSSTYWEGNPEMETLQRIYGISFPDNKMMRDWDKNFSFSTI

SEQ ID NO: 752988 - protein, 551 aa, Homo sapiens
LCYGPPIENGFYYDMFIEDRAVSSTELSALENICKAIIKEKQPFERLEVSKEILLEMFKYNKFKCRILNEKVNTATTTVYRCGPLIDLCKGPHVRHTGKIKTIKIFKNSSTYWEGNPEMETLQRIYGISFPDNKMMRDWEKFQEEAKNRDHRKIGKEQELFFFHDLSPGSCFFLPRGAFIYNTLTDFIREEYHKRDFTEVLSPNMYNSKLWEASGHWQHYSENMFTFEIEKDTFALKPMNCPGHCLMFAHRPRSWREMPIRFADFGVLHRNELSGTLSGLTRVRRFQQDDAHIFCTVEQIEEEIKGCLQFLQSVYSTFGFSFQLNLSTRPENFLGEIEMWNEAEKQLQNSLMDFGEPWKMNPGDGAFYGPKIDIKIKDAIGRYHQCATIQLDFQLPIRFNLTYVSKDGDDKKRPVIIHRAILGSVERMIAILSENYGGKWPFWLSPRQVMVIPVGPTCEKYALQVSSEFFEEGFMADVDLDHSCTLNKKIRNAQLAQYNFILVVGEKEKIDNAVNVRTRDNKIHGEILVTSAIDKLKNLRKTRTLNAEEAF

SEQ ID NO: 752989 - protein, 165 aa, Homo sapiens
LCYGPPIENGFYYDMFIEDRAVSSTELSALENICKAIIKEKQPFERLEVSKEILLEMFKYNKFKCRILNEKVNTATTTVYRCGPLIDLCKGPHVRHTGKIKTIKIFKNSSTYWEGNPEMETLQRIYGISFPDNKMMRDWEKFQEEAKNRDHRKIGKDKNFSFSTI

SEQ ID NO: 752990 - protein, 551 aa, Homo sapiens; identical to SEQ ID NO: 752988

SEQ ID NO: 752991 - protein, 109 aa, Homo sapiens
TTNIDDLTVPTSQGLGAAQLVDSGAERLLGLQSGCRPGLRSSGLAHSWWMQLLITWVLACLNVLTAWWLVSPRASDLREMGAAAFYKLVSETMRRHFRTSLWSRRPALV

SEQ ID NO: 752992 - protein, 240 aa, Homo sapiens
VTDANMAAPSGVHLLVRRGSHRIFSSPLNHIYLHKQSSSQQRRNFFFRRQRDISHSIVLPAAVSSAHPVPKHIKKPDYVTTGIVPDWGDSIEVKNEDQIQGLHQACQLARHVLLLAGKSLKVDMTTEEIDALVHREIISHNAYPSPLGYGGFPKSVCTSVNNVLCHGIPDSRPLQDGDIINIDVTVYYNGYHGDTSETFLVGNVDECGKKLVEVARRCRDEAIAACRAGAPFSVIGNTIR

SEQ ID NO: 752993 - protein, 132 aa, Homo sapiens
VTDANMAAPSGVHLLVRRGSHRIFSSPLNHIYLHKQSSSQQRRNFFFRRQRDISHSIVLPAAVSSAHPVPKHIKKPDYVTTGIVPDWGDSIEVKNEDQIQGLHQACQLARHVLLLAGKSLKVASHQASERLT

SEQ ID NO: 752994 - protein, 132 aa, Homo sapiens; identical to SEQ ID NO: 752993

SEQ ID NO: 752995 - protein, 738 aa, Homo sapiens
MEPKPATKKATRTKAISEDLSQEAILEKLTENGLWDSRMEGLWKWNDRILRLQNNQENHLSQRIIPLKKTPTSQRGFRFESILIPEPGIATEELHSRCQTQEENFTENLNLITDTHLGKIICKEMKGSKAIRQTSELTLGKKSNNKEKPYKCSTCEKAFHYRSLLIQHQRTHTKEKPYECNECGKTFSQPSYLSQHKKIHTGEKPYKCNECGKAFIASSSLMVHQRIHTKEKPYQCNVCGKSFSQCARLNQHRIQTGEKPYKCSECGKAFSDKSKLARHQETHNGEKPYKCDDCGKAFRNKSYLSVHQKTHTEEKPYQCNECGKSFKNTTIFNVHQRIHTGEKPFRCNECGKAYRSNSSLIVHIRTHTGEKPYECNECGKAFNRIANFTEHQRIHTGEKPYKCNECGKAFINYSCLTVHHRMHTGEKPYKCTECGKAFMRSSSLIIHQRIHTEEKPYLCNECGESFRIKSHLTVHQRIHTGEKPYKCTDCERAFTKMVNLKEHQKIHTGVKPYKCYDCGKSFRTKSYLIVHQRTHTGEKPYKCNECEKAFTNTSQLTVHQRRHTGEKPYKCNECGKVFTSNSGFNTHQRTHTGEKPFKCNDCGKAFSQMVHVTEHQKIHSGEKPYKCDVCGKAFRRGSYLTVHWRTHTGEKPYTCKECGKGCITLSQLTLHQRIHTGERPYKCEECGKAFRTNSDFTVHLRMHTGEKPYKCNECGKAFRSSSSLTVHQRIHQRETQLI

SEQ ID NO: 752996 - protein, 232 aa, Homo sapiens
MAGDVGGRSCTDSELLLHPELLSQEFLLLTLEQKNIAVETDVRVNKDSLTDLYVQHAIPLPQRDLPKNRWGKMMEKKREQHEIKNETKRSSTVDGLRKRPLIVFDGSSTSTSIKVKKTENGDNDRLKPPPQASFTSNAFRKLSNSSSSVSPLILSSNLPVNNKTEHNNNDAKQNHDLTHRKSPSGPVKSPPLSPVGTTPVKLKRAAPKEEAEAMNNLKPPQAKRKIQHVTWP

SEQ ID NO: 752997 - protein, 232 aa, Homo sapiens; identical to SEQ ID NO: 752996

SEQ ID NO: 752998 - protein, 190 aa, Homo sapiens
MAGDVGGRSCTDSELLLHPELLSQEFLLLTLEQKNIAVETDVRVNKDSLTDLYVQHAIPLPQRDLPKNRWGKMMEKKREQHEIKNETKRSSTVDGLRKRPLIVFDGSSTSTSIKVKKTENGDNDRLKPPPQNHDLTHRKSPSGPVKSPPLSPVGTTPVKLKRAAPKEEAEAMNNLKPPQAKRKIQHVTWP

SEQ ID NO: 752999 - protein, 232 aa, Homo sapiens; identical to SEQ ID NO: 752996

SEQ ID NO: 753000 - protein, 68 aa, Homo sapiens
CSYFHCGPRGLFQGSVLAQGKVDHETSQPERSSSQLSFRMDLKSSQQRRYQFENQDVFDLLWPSRDTS

SEQ ID NO: 753001 - protein, 91 aa, Homo sapiens
GRTPATHGGFLAPELRTGSTRAEPTVLGLGALGVTKTSTWPADLRPSLAPPCWAQLRCQETHGHWPLNGWHPQASQVPRGAEPFGGQRVAS

SEQ ID NO: 753002 - protein, 370 aa, Homo sapiens
MANYSHAADNILQNLSPLTAFLKLTSLGFIIGVSVVGNLLISILLVKDKTLHRAPYYFLLDLCCSDILRSAICFPFVFNSVKNGSTWTYGTLTCKVIAFLGVLSCFHTAFMLFCISVTRYLAIAHHRFYTKRLTFWTCLAVICMVWTLSVAMAFPPVLDVGTYSFIREEDQCTFQHRSFRANDSLGFMLLLALILLATQLVYLKLIFFVHDRRKMKPVQFVAAVSQNWTFHGPGASGQAAANWLAGFGRGPTPPTLLGIRQNANTTGRRRLLVLDEFKMEKRISRMFYIMTFLFLTLWGPYLVACYWRVFARGPVVPGGFLTAAVWMSFAQAGINPFVCIFSNRELRRCFSTTLLYCRKSRLPREPYCVI

SEQ ID NO: 753003 - protein, 370 aa, Homo sapiens; identical to SEQ ID NO: 753002

SEQ ID NO: 753004 - protein, 370 aa, Homo sapiens; identical to SEQ ID NO: 753002

SEQ ID NO: 753005 - protein, 413 aa, Homo sapiens
MYTSHEDIGYDFEDGPKDKKTLKPHPNIDGGWAWMMVLSSFFVHILIMGSQMALGVLNVEWLEEFHQSRGLTAWVSSLSMGITLIVGPFIGLFINTCGCRQTAIIGGLVNSLGWVLSAYAANVHYLFITFGVAAGLGSGMAYLPAVVMVGRYFQKRRALAQGLSTTGTGFGTFLMTVLLKYLCAEYGWRNAMLIQGAVSLNLCVCGALMRPLSPGKNPNDPGEKDVRGLPAHSTESVKSTGQQGRTEEKDGGLGNEETLCDLQAQECPDQAGHRKNMCALRILKTVSWLTMRVRKGFEDWYSGYFGTASLFTNRMFVAFIFWALFAYSSFVIPFIHLPEIVNLYNLSEQNDVFPLTSIIAIVHIFGKVILGVIADLPCISVWNVFLLANFTLVLSIFILPLMHTYAGWRSSVR

SEQ ID NO: 753006 - protein, 151 aa, Homo sapiens
SRFVGRDEEKPNVKTPGVSRAQLWLLPGSPKPWRVLAANRSLVRRQASPTKSGEFQDCGVGLNAAQFKQLLISAVKDLFGEVDAALPLDILTYEEKTLSAILRICSSGLVKLWSSLTLLGSYKGKKCAFRVIQVSPFLLALSGNSRELVLD

SEQ ID NO: 753007 - protein, 124 aa, Homo sapiens
MPAPAATYERVVYKNPSEYHYMKVCLEFQDCGVGLNAAQFKQLLISAVKDLFGEVDAALPLDILTYEEKTLSAILRICSSGLVKLWSSLTLLGSYKGKKCAFRVIQVSPFLLALSGNSRELVLD

SEQ ID NO: 753008 - protein, 124 aa, Homo sapiens; identical to SEQ ID NO: 753007

SEQ ID NO: 753009 - protein, 168 aa, Homo sapiens [sequence omitted]

SEQ ID NO: 753010 - protein, 77 aa, Homo sapiens
ESKQCTESKQCSESKQCPESKQCPESKQCLKLWFQKLPNPEIDVLKMQPQTPMLLLKSLWGIAALYQRMVDRPRSPS

SEQ ID NO: 753011 - protein, 124 aa, Homo sapiens; identical to SEQ ID NO: 753007

SEQ ID NO: 753012 - protein, 124 aa, Homo sapiens; identical to SEQ ID NO: 753007

SEQ ID NO: 753013 - protein, 124 aa, Homo sapiens; identical to SEQ ID NO: 753007

SEQ ID NO: 753014 - protein, 151 aa, Homo sapiens; identical to SEQ ID NO: 753006

SEQ ID NO: 753015 - protein, 124 aa, Homo sapiens; identical to SEQ ID NO: 753007

SEQ ID NO: 753016 - protein, 168 aa, Homo sapiens [sequence omitted]

SEQ ID NO: 753017 - protein, 124 aa, Homo sapiens; identical to SEQ ID NO: 753007

SEQ ID NO: 753018 - protein, 124 aa, Homo sapiens; identical to SEQ ID NO: 753007

SEQ ID NO: 753019 - protein, 76 aa, Homo sapiens
SSKGLHTAPALCRAERADSFPGALKSPGPPQWLCEPHCVASEIVLPKKRVCLQVKSQGREWLRFPGGPSVGRLLGP

SEQ ID NO: 753020 - protein, 90 aa, Homo sapiens
AELEAESLWPRGPGRNRGSFALFFLEWGSRIANENRETRLSADSSSRPYIWSKRKGPPLLHKRLENGRLFINLWIRLLSAAAPRPPRRLG

SEQ ID NO: 753021 - protein, 268 aa, Homo sapiens
APSAAAAAGPGARGLGGGGWGRTPSAEAGARAEGAAGLRARWGAWRGAEGEMSLVGGFPHHPVVHHEGYPFAAAAAAAAAAAASRCSHEENPYFHGWLIGHPEMSPPDYSMALSYSPEYASGAAGLDHSHYGGVPPGAGPPGLGGPRPVKRRGTANRKERRRTQSINSAFAELRECIPNVPADTKLSKIKTLRLATSYIAYLMDLLAKDDQNGEAEAFKAEIKKTDVKEEKRKKELNEILKSTVSSNDKKTKGRTGWPQHVWALELKQ

SEQ ID NO: 753022 - protein, 90 aa, Homo sapiens; identical to SEQ ID NO: 753020

SEQ ID NO: 753023 - protein, 90 aa, Homo sapiens; identical to SEQ ID NO: 753020

SEQ ID NO: 753024 - protein, 268 aa, Homo sapiens; identical to SEQ ID NO: 753021

SEQ ID NO: 753025 - protein, 141 aa, Homo sapiens
MARARRLELAEALALGPGQRHACYALLHAPDPGILSGRLPLRYAILMQMRFDGRLGFPGGFVDSQDSSLEDGLNRGLLELLGEAAAAFRVERPDYRSSHAGSRPRVVAHFYAKSLTLEQLLAVEASATGAKDHGLEVLGLV

SEQ ID NO: 753026 - protein, 188 aa, Homo sapiens
VGLRNSGRAVSGHGQGPQAGAGRGPGAGARLEACLLCAPARAGPWNSLWPPPSALRHTGEEGARPATLRSGLAPSLRRYSRVSLPIPASSSLQMQMRFDGRLGFPGGFVDSQDSSLEDGLNRGLLELLGEAAAAFRVERPDYRSSHAGSRPRVVAHFYAKSLTLEQLLAVEASATGAKDHGLEVLGLV

SEQ ID NO: 753027 - protein, 188 aa, Homo sapiens; identical to SEQ ID NO: 753026

SEQ ID NO: 753028 - protein, 188 aa, Homo sapiens; identical to SEQ ID NO: 753026

SEQ ID NO: 753029 - protein, 99 aa, Homo sapiens
ARIQLRGTFTRTMPSPDHLPRTCSRLLMAERQKTMTMYARTKSTNRVLDHHCNNSKRRPKAVGKSREEVTSILKNTACNSRTAHVDEVVAVENVETKFV

SEQ ID NO: 753030 - protein, 140 aa, Homo sapiens
MRFDGRLGFPGGFVDSQDSSLEDGLNRGLLELLGEAAAAFRVERPDYRSSHAGSRPRVVAHFYAKSLTLEQLLAVEASATGAKDHGLEVGPVWDPAPYLIPFPSMSSFASATLFGLRSPSVRTCPLPHFLGGVGILVFSY

SEQ ID NO: 753031 - protein, 114 aa, Homo sapiens
RRRAELSQHGPLADWPPRGFGQWAPVGRLSSCGGAGSSKALAASPAIRRLRRRRGQPDLSLRSGSLPPAPAELPAGTGCGPTAQGRLQGWGRALFFAGSSSEPALARRPSNLRR

SEQ ID NO: 753032 - protein, 197 aa, Homo sapiens
MAAGCCGVKKQKLSSSPPSGSGGGGGASSSSHCSGESQCRAGELGLGGAGTRLNGLGGLTGGGSGSGCTLSPPQGCGGGGGGIALSPPPSCGVGTLLSTPAAATSSSPSSSSAASSSSPGSRKMVVSAEMCCFCFDVLYCHLYGYQQPRTPRFTNEPYPLFVTWKIGRDKRLRGCIGTFSAMNLHSGLREYTLTSLE

SEQ ID NO: 753033 - protein, 333 aa, Homo sapiens
MAAGCCGVKKQKLSSSPPSGSGGGGGASSSSHCSGESQCRAGELGLGGAGTRLNGLGGLTGGGSGSGCTLSPPQGCGGGGGGIALSPPPSCGVGTLLSTPAAATSSSPSSSSAASSSSPGSRKMVVSAEMCCFCFDVLYCHLYGYQQPRTPRFTNEPYPLFVTWKIGRDKRLRGCIGTFSAMNLHSGLREYTLTSALKDSRFPPMTRDELPRLFCSVSLLTNFEDVCDYLDWEVGVHGIRIEFINEKGSKRTATYLPEVAKEQGWDHIQTIDSLLRKGGYKAPITNEFRKTIKLTRYRSEKMTLSYAEYLAHRQHHHFQNGIGHPLPPYNHYS

SEQ ID NO: 753034 - protein, 333 aa, Homo sapiens; identical to SEQ ID NO: 753033

SEQ ID NO: 753035 - protein, 333 aa, Homo sapiens; identical to SEQ ID NO: 753033

SEQ ID NO: 753036 - protein, 333 aa, Homo sapiens; identical to SEQ ID NO: 753033

SEQ ID NO: 753037 - protein, 333 aa, Homo sapiens; identical to SEQ ID NO: 753033

SEQ ID NO: 753038 - protein, 252 aa, Homo sapiens
MCSTSGCDLEEIPLDDDDLNTIEFKILAYYTRHHVFKSTPALFSPKLLRTRSLSQRGLGNCSANESWTEVSWPCRNSQSSEKAINLGKKKSSWKAFFGVVEKEDSQSTPAKVSAQGQRTLEYQDSHSQQWSRCLSNVEQCLEHEAVDPKVISIANRVAEIVYSWPPPQATQAGGFKSKEIFVTEGLSFQLQGHVPVASSSKKDEEEQILAKIVELLKYSGDQLERKDTAFIPIPLVDTSIQGFPQDGLMACI

SEQ ID NO: 753039 - protein, 327 aa, Homo sapiens
MCSTSGCDLEEIPLDDDDLNTIEFKILAYYTRHHVFKSTPALFSPKLLRTRSLSQRGLGNCSANESWTEVSWPCRNSQSSEKAINLGKKKSSWKAFFGVVEKEDSQSTPAKVSAQGQRTLEYQDSHSQQWSRCLSNVEQCLEHEAVDPKVISIANRVAEIVYSWPPPQATQAGGFKSKEIFVTEGLSFQLQGHVPVASSSKKDEEEQILAKIVELLKYSGDQLERKLKKDKALMGHFQDGLSYSVFKTITDQVLMGVDPRGESEVKAQGFKAALVIDVTAKLTAIDNHPMNRVLGFGTKYLKENFSPWIQQHGGWEKILGISHEEVD

SEQ ID NO: 753040 - protein, 339 aa, Homo sapiens
MCSTSGCDLEEIPLDDDDLNTIEFKILAYYTRHHVFKSTPALFSPKLLRTRSLSQRGLGNCSANESWTEVSWPCRNSQSSEKAINLGKKKSSWKAFFGVVEKEDSQSTPAKVSAQGQRTLEYQDSHSQQWSRCLSNVEQCLEHEAVDPKVISIANRVAEIVYSWPPPQATQAGGFKSKEIFVTEGLSFQLQGHVPVASSSKKDEEEQILAKIVELLKYSGDQLERKLKKDKALMGHFQDGLSYSVFKTITDQVLMGVDPRGESEVKAQGFKAALVIDVTAKLTAIDNHPMNRVLGFGTKYLKENFSPWIQQHGGWVSVSYLKTNFLRTQKRWDGFFFFF

SEQ ID NO: 753041 - protein, 276 aa, Homo sapiens
MCSTSGCDLEEIPLDDDDLNTIEFKILAYYTRHHVFKSTPALFSPKLLRTRSLSQRGLGNCSANESWTEVSWPCRNSQSSEKAINLGKKKSSWKAFFGVVEKEDSQSTPAKVSAQGQRTLEYQDSHSQQWSRCLSNVEQCLEHEAVDPKVISIANRVAEIVYSWPPPQATQAGGFKSKEIFVTEGLSFQLQGHVPVASSSKKDEEEQILAKIVELLKYSGDQLERKEKEWEESAKTKIKMALLWRSSGGGPRVLSIPEAFMKNSFTLTPPGFSEHN

SEQ ID NO: 753042 - protein, 339 aa, Homo sapiens; identical to SEQ ID NO: 753040

SEQ ID NO: 753043 - protein, 339 aa, Homo sapiens; identical to SEQ ID NO: 753040

SEQ ID NO: 753044 - protein, 527 aa, Homo sapiens
DILEGEVDHSFFDSDFEEGKKCETNSVFDKQNDDPKERIDKDTKNVNSNTGMQTTENYLTEKGNERNVKFPPEHPVENDVTQTVSSFSLPASSRSKKLCDVTTGLKIHVSIPNRIPKIVKEGEDDYYTDGEESSDDGKKYHVKSKSAKPSTNVKKSIRKKYCKVSSSSSSSLSSSSSGSGTDCLDAGSDSHLSDSSPSSKSSKKHVSGITLLSPKHKYKSGIKSTETQPSSTTPKCGHYPEESEDTVTDVSPLSTPDISPLQSFELGIANDQKVKIKKQENVSQEIYEDVEDLKNNSKYLKAAKKGKEKHEPDVSSKSSSVLDSSLDHRHKQKVLHDTMDLNHLLKAFLQLDKKGPQKHHFDQPSVAPGKNYSFTREEVRQIDRENQRLLKELSRQAEKPGSKSTIPRSADHPPKLYHSALNRQKEQQRIERENLALLKRLEAVKPTVGMKRSEQLMDYHRNMGYLNSSPLSRRARSTLGQYSPLRASRTSSATSGLSCRSERSAVDPSSGHPRRRPKPPNVRTAWL

SEQ ID NO: 753045 - protein, 106 aa, Homo sapiens
MISPSLELLHSGLCKFPEVEGKMTTFKEAVTFKDVAVVFTEEELGLLDPAQRKLYRDVMLENFRNLLSVGNQPFHQDTFHFLGKEKFWKMKTTSQREGNSGRKFPS

SEQ ID NO: 753046 - protein, 617 aa, Homo sapiens
MISPSLELLHSGLCKFPEVEGKMTTFKEAVTFKDVAVVFTEEELGLLDPAQRKLYRDVMLENFRNLLSVGNQPFHQDTFHFLGKEKFWKMKTTSQREGNSGGKIQIEMETVPEAGPHEEWSCQQIWEQIASDLTRSQNSIRNSSQFFKEGDVPCQIEARLSISHVQQKPYRCNECKQSISDVSVFDLHQQSHSGEKSHTCGECGKSFCYSPALHIHQRVHMGEKCYKCDVCGKEFNQSSHLQTHQRVHTGEKPFKRGQCGKGFHSRSALNVHCKLHTGEKPYNCEECGKAFIHDSQLQEHQRIHTGEKPFKCDICGKSFRVRSRLNRHSMVHTGEKPFRCDTCGKNFRQRSALNSHSMVHIEEKPYKCEQCGKGFICRRDFCKHQMVHTGEKPYNCKECGKTFRWSSCLLNHQQVHSGQKSFKCEECGKGFYTNSRRSSHQRSHNGEKPYNCEECGKDYKRRLDLEFHQRVHTGERPYNCKECGKSFGWASCLLKHQRLHSGEKPFKCEECGKRFTQSTQLHSHQTCHTGEKLYKCEQCEKGYNSKFNLDMHQRVHRGERPYNCKECGKSFGWASCLLKHQRLHSGEKPLKSGVWEEIYSEFTASFTSVSLCGRKAI

SEQ ID NO: 753047 - protein, 107 aa, Homo sapiens
LNFFRLKALHNWKVAHTTHYGLRAPLVWSLTPGQPSSPTHHSAFSPFATATWAFLVLSRCPHLVLLQDFALDGKPGLVLSFKTFVSFHSNAKFSEGLPCHTPSQKSS

SEQ ID NO: 753048 - protein, 373 aa, Homo sapiens
HKSEKDQAGLEPLALRLSRELQEKEKVIEVLQAKLDARSLTPSSSRALSDSHRSPSSTSFLSDELEACSDMDIVSEYTHYEEKKASPSHSDSIHHSSHSAVLSSKPSSTSASQGAKAESNSNPISLPTPQNTPKEANQAHSGTSTVPPASTATLLSNDLEADSSYYLNSAQPHSPPRGTIELGRILEPGYLGSSGKWDVMRPQKGSVSGDLSSGSSVYQLNSKPTGADLLEEHLGEIRNLRQRLEESICINDCLREQLEHRLTSTARGRGSTSNFYSQGLESIPQLCNENRVLREENRRLQAQLSHVSREHSQETESLREALLSSRSHLQELEKELEHQKVERQQLLEDLREKQQEVLHFREERLSLQENDSR

SEQ ID NO: 753049 - protein, 328 aa, Homo sapiens
HKSEKDQAGLEPLALRLSRELQEKEKVIEVLQAKLDARSLTPSSSRALSDSHRSPSSTSFLSDELEACSDMDIVSEYTHYEEKKASPSHSDSIHHSSHSAVLSSKPSSTSASQGAKAESNSNPISLPTPQNTPKEANQAHSGTSTVPPASTATLLSNDLEADSSYYLNSAQPHSPPRGTIELGRILEPGYLGSSGKWDVMRPQKGSVSGDLSSGSSVYQLNSKPTGADLLEEHLGEIRNLRQRLEESICINDCLREQLEHRLTSTARGRGSTSNFYSQGLESIPQLCNENRVLREENRRLQAQLSHVSRARRFERKGHCWGTITKVNR

SEQ ID NO: 753050 - protein, 554 aa, Homo sapiens
HKSEKDQAGLEPLALRLSRELQEKEKVIEVLQAKLDARSLTPSSSRALSDSHRSPSSTSFLSDELEACSDMDIVSEYTHYEEKKASPSHSDSIHHSSHSAVLSSKPSSTSASQGAKAESNSNPISLPTPQNTPKEANQAHSGTSTVPPASTATLLSNDLEADSSYYLNSAQPHSPPRGTIELGRILEPGYLGSSGKWDVMRPQKGSVSGDLSSGSSVYQLNSKPTGADLLEEHLGEIRNLRQRLEESICINDCLREQLEHRLTSTARGRGSTSNFYSQGLESIPQLCNENRVLREENRRLQAQLSHVSREHSQETESLREALLSSRSHLQELEKELEHQKVERQQLLEDLREKQQEVLHFREERLSLQENDSRLQHKLVLLQQQCEEKQQLFESLQSELQIYEALYGNSKKGLKDSAVSPPVRDVGMNSPALVFPSSASSTPGSETPIINRANGWVGYSPSNEDPPKPEGEATKVLTIAWLPCPPLSTHGLKQMRGKRAKDGPGTRSDAWASKAPRLHDAGDAKRTTGEGNHGDRTEEHNHRTPRPKPADATRP

SEQ ID NO: 753051 - protein, 1503 aa, Homo sapiens
SEGAGAAAGGGEGLRSSAAAGPAGAGGSDEYSEGEGKGGGRALAAAPCSPSRMTRGGGSGSSRGSRDRVAARWGWAPLAPPREAPARSGTRPPRGSRARLRRVAAAAAAAAMSPGKPGAGGAGTRRTGWRRRRRRRRQEAATTVPGLGRTAGPDSRVRGTFQGARGMKPAAREARLPPRSPGLRWALPLLLLLLRLGQILCAGGTPSPIPDPSVATVATGENGITQISSTAESFHKQNGTGTPQVETNTSEDGESSGANDSLRTPEQGSNGTDGASQKTPSSTGPSPVFDIKAVSISPTNVILTWKSNDTAASEYKYVVKHKMENEKTITVVHQPWCNITGLRPATSYVFSITPGIGNETWGDPRVIKVITEPIPVSDLRVALTGVRKAALSWSNGNGTASCRVLLESIGSHEELTQDSRLQVNISGLKPGVQYNINPYLLQSNKTKGDPLGTEGGLDASNTERSRAGSPTAPVHDESLVGPVDPSSGQQSRDTEVLLVGLEPGTRYNATVYSQAANGTEGQPQAIEFRTNAIQVFDVTAVNISATSLTLIWKVSDNESSSNYTYKIHVAGETDSSNLNVSEPRAVIPGLRSSTFYNITVCPVLGDIEGTPGFLQVHTPPVPVSDFRVTVVSTTEIGLAWSSHDAESFQMHITQEGAGNSRVEITTNQSIIIGGLFPGTKYCFEIVPKGPNGTEGASRTVCNRTVPSAVFDIHVVYVTTTEMWLDWKSPDGASEYVYHLVIESKHGSNHTSTYDKAITLQGLIPGTLYNITISPEVDHVWGDPNSTAQYTRPSNVSNIDVSTNTTAATLSWQNFDDASPTYSYCLLIEKAGNSSNATQVVTDIGITDATVTELIPGSSYTVEIFAQVGDGIKSLEPGRKSFCTDPASMASFDCEVVPKEPALVLKWTCPPGANAGFELEVSSGAWNNATHLESCSSENGTEYRTEVTYLNFSTSYNISITTVSCGKMAAPTRNTCTTGITDPPPPDGSPNITSVSHNSVKVKFSGFEASHGPIKAYAVILTTGEAGHPSADVLKYTYDDFKKGASDTYVTYLIRTEEKGRSQSLSEVLKYEIDVGNESTTLGYYNGKLEPLGSYRACVAGFTNITFHPQNKGLIDGAESYVSFSRYSDAVSLPQDPGVICGAVFGCIFGALVIVTVGGFIFWRKKRKDAKNNEVSFSQIKPKKSKLIRVENFEAYFKKQQADSNCGFAEEYEDLKLVGISQPKYAAELAENRGKNRYNNVLPYDISRVKLSVQTHSTDDYINANYMPGYHSKKDFIATQGPLPNTLKDFWRMVWEKNVYAIIMLTKCVEQGRTKCEEYWPSKQAQDYGDITVAMTSEIVLPEWTIRDFTVKNIQTSESHPLRQFHFTSWPDHGVPDTTDLLINFRYLVRDYMKQSPPESPILVHCSAGVGRTGTFIAIDRLIYQIENENTVDVYGIVYDLRMHRPLMVQTEDQYVFLNQCVLDIVRSQKDSKVDLIYQNTTAMTIYENLAPVTTFGKTNGYIA

SEQ ID NO: 753052 - protein, 730 aa, Homo sapiens
SEGAGAAAGGGEGLRSSAAAGPAGAGGSDEYSEGEGKGGGRALAAAPCSPSRMTRGGGSGSSRGSRDRVAARWGWAPLAPPREAPARSGTRPPRGSRARLRRVAAAAAAAAMSPGKPGAGGAGTRRTGWRRRRRRRRQEAATTVPGLGRTAGPDSRVRGTFQGARGMKPAAREARLPPRSPGLRWALPLLLLLLRLGQILCAGGTPSPIPDPSVATVATGENGITQISSTAESFHKQNGTGTPQVETNTSEDGESSGANDSLRTPEQGSNGTDGASQKTPSSTGPSPVFDIKAVSISPTNVILTWKSNDTAASEYKYVVKHKMENEKTITVVHQPWCNITGLRPATSYVFSITPGIGNETWGDPRVIKVITEPIPVSDLRVALTGVRKAALSWSNGNGTASCRVLLESIGSHEELTQDSRLQVNISGLKPGVQYNINPYLLQSNKTKGDPLGTEGGLDASNTERSRAGSPTAPVHDESLVGPVDPSSGQQSRDTEVLLVGLEPGTRYNATVYSQAANGTEGQPQAIEFRTNAIQVFDVTAVNISATSLTLIWKVSDNESSSNYTYKIHVAGETDSSNLNVSEPRAVIPGLRSSTFYNITVCPVLGDIEGTPGFLQVHTPPVPVSDFRVTVVSTTEIGLAWSSHDAESFQMHITQEGAGNSRVEITTNQSIIIGGLFPGTKYCFEIVPKGPNGTEGASRTVCNRTGKQIGFSVKPSCFLKEISIINKHNVS

SEQ ID NO: 753053 - protein, 108 aa, Homo sapiens
PSPIPDPSVATVATGENGITQISSTAESFHKQNGTGTPQVETNTSEDGESSGANDSLRTPEQGSNGTDGASQKTPSSTGKHRLFCQSCFLKEIGRIYKCHVFQILFFF

SEQ ID NO: 753054 - protein, 705 aa, Homo sapiens
SEGAGAAAGGGEGLRSSAAAGPAGAGGSDEYSEGEGKGGGRALAAAPCSPSRMTRGGGSGSSRGSRDRVAARWGWAPLAPPREAPARSGTRPPRGSRARLRRVAAAAAAAAMSPGKPGAGGAGTRRTGWRRRRRRRRQEAATTVPGLGRTAGPDSRVRGTFQGARGMKPAAREARLPPRSPGLRWALPLLLLLLRLGQILCAGGTPSPIPDPSVATVATGENGITQISSTAESFHKQNGTGTPQVETNTSEDGESSGANDSLRTPEQGSNGTDGASQKTPSSTGPSPVFDIKAVSISPTNVILTWKSNDTAASEYKYVVKHKMENEKTITVVHQPWCNITGLRPATSYVFSITPGIGNETWGDPRVIKVITEPIPVSDLRVALTGVRKAALSWSNGNGTASCRVLLESIGSHEELTQDSRLQVNISGLKPGVQYNINPYLLQSNKTKGDPLGTEGGLDASNTERSRAGSPTAPVHDESLVGPVDPSSGQQSRDTEVLLVGLEPGTRYNATVYSQAANGTEGQPQAIEFRTNAIQVFDVTAVNISATSLTLIWKVSDNESSSNYTYKIHVAGETDSSNLNVSEPRAVIPGLRSSTFYNITVCPVLGDIEGTPGFLQVHTPPVPVSDFRVTVVSTTEIGLAWSSHDAESFQMHITQEGAGNSRVEITTNQSIIIGGLFPGTKYCFEIVPKGPNGTEGASRTVCNRTG

SEQ ID NO: 753055 - protein, 383 aa, Homo sapiens
MENEKTITVVHQPWCNITGLRPATSYVFSITPGIGNETWGDPRVIKVITEPIPVSDLRVALTGVRKAALSWSNGNGTASCRVLLESIGSHEELTQDSRLQVNISGLKPGVQYNINPYLLQSNKTKGDPLGTEGGLDASNTERSRAGSPTAPVHDESLVGPVDPSSGQQSRDTEVLLVGLEPGTRYNATVYSQAANGTEGQPQAIEFRTNAIQVFDVTAVNISATSLTLIWKVSDNESSSNYTYKIHVAGETDSSNLNVSEPRAVIPGLRSSTFYNITVCPVLGDIEGTPGFLQVHTPPVPVSDFRVTVVSTTEIGLAWSSHDAESFQMHITQEGAGNSRVEITTNQSIIIGGLFPGTKYCFEIVPKGPNGTEGASRTVCNRTG

SEQ ID NO: 753056 - protein, 159 aa, Homo sapiens
LMLCCTCFADPASMASFDCEVVPKEPALVLKWTCPPGANAGFELEVSSGAWNNATHLESCSSENGTEYRTEVTYLNFSTSYNISITTVSCGKMAAPTRNTCTTGITGGLQGRGWSVGTVITPGAADPQWVCTCGLEICFCFFISPKIFAFTDIDWFLIL

SEQ ID NO: 753057 - protein, 248 aa, Homo sapiens
LTRGRSVEQSPPRERPRAAGRRGRMAEASGRRGSPRARKASRSQSETSLLGRASAVPSGPPKYPTAEREEPRPPRPRRGPAPTLAAQAAGSCRRWRSTAEIDAADGRRVRPRAPAARVPGPGPSPSAPQRRLLYGCAGSDSECSAGRLGPLGRRGPAGGVGGGYGESESSASEGESPAFSSASSDSDGSGGLVWPQQLVAATAASGGGAGAGAPAGPAKVFVKIKASHALKKKILRFRSGSLKVMTTV

SEQ ID NO: 753058 - protein, 248 aa, Homo sapiens; identical to SEQ ID NO: 753057

SEQ ID NO: 753059 - protein, 248 aa, Homo sapiens; identical to SEQ ID NO: 753057

SEQ ID NO: 753060 - protein, 248 aa, Homo sapiens; identical to SEQ ID NO: 753057

SEQ ID NO: 753061 - protein, 99 aa, Homo sapiens
  misc_feature (7)..(7): Xaa can be any naturally occurring amino acid
MVYAPEXWISSTRPSRTRGQLYLLGIFINLGRQECLDAITLTQLHMLSDLSIYHNKSAHIIEAYHPQKPFCKQDWTQLEKDERTCLGRLLCRTDRGAAQ

SEQ ID NO: 753062 - protein, 160 aa, Homo sapiens
GRPGPGPRRAPGSVREPGDLRPSCPPSREERGAAAAAAAEMMEELHSLDPRRQELLEARFTGVGVSKGPLNSESSNQSLCSVGSLSDKEVETPEKKQNDQRNRKRKAEPYETSQGKGTPRGHKISDYFERRVEQPLYGLDGSAAKEGNGGAVCSGQPSCQ

SEQ ID NO: 753063 - protein, 104 aa, Homo sapiens
VISHIAAGAERSLCCDVLHLSSCAPKAPPLLTLLYCSTRSKTHESCCLPIAPFHNTVTCAELELIIQTKKDKKHKATGLLPDSTMTFLKPKSNILSSALSESEF

SEQ ID NO: 753064 - protein, 69 aa, Homo sapiens
ILKASVEGKGWEVGAVPSPLPTASGRCATSGGFLTVGVGGTPFSQSAKWGHTMAAPGVARWGPDVGGVQ

SEQ ID NO: 753065 - protein, 259 aa, Homo sapiens
LLETAREFEIDFAGTDSGCYSAFVVWARSAMGMFVDAFSKQVFDSKESLSTAAECVKVAKEHCQQLGDIGLDLTFIIHALLVKDIQGALHSYKEIIIEATKHRNSEEMWRRMNLMTPEALGKLKEEMKSCGVSNFEQYTGDDCWVNLSYTVVAFTKQTMGFLEEALKLYFPELHMVLLESLVEIILVAVQHVDYSLRCEQDPEKKAFIRQNASFLYETVLPVVEKRFEEGVGKPAKQLQDLRNASRLIRVNPESTTSVV

SEQ ID NO: 753066 - protein, 259 aa, Homo sapiens; identical to SEQ ID NO: 753065

SEQ ID NO: 753067 - protein, 71 aa, Homo sapiens
LPSALSTFQAGLAIGQEQALQQCHGDPRGRVGAWTGLPLLRLRQAGLDAGGGASISPARLPFGQGGYLWNG

SEQ ID NO: 753068 - protein, 71 aa, Homo sapiens; identical to SEQ ID NO: 753067

SEQ ID NO: 753069 - protein, 175 aa, Homo sapiens [sequence omitted]

SEQ ID NO: 753070 - protein, 641 aa, Homo sapiens
MSQSTQTNEFLSPEVFQHIWDFLEQPICSVQPIDLNFVDEPSEDGATNKIEISMDCIRMQDSDLSDPMWPQYTNLGLLNSMDQQIQNGSSSTSPYNTDHAQNSVTAPSPYAQPSSTFDALSPSPAIPSNTDYPGPHSFDVSFQQSSTAKSATWTYSTELKKLYCQIAKTCPIQIKVMTPPPQGAVIRAMPVYKKAEHVTEVVKRCPNHELSREFNEGQIAPPSHLIRVEGNSHAQYVEDPITGRQSVLVPYEPPQVGTEFTTVLYNFMCNSSCVGGMNRRPILIIVTLETRDGQVLGRRCFEARICACPGRDRKADEDSIRKQQVSDSTKNGDGTKRPFRQNTHGIQMTSIKKRRSPDDELLYLPVRGRETYEMLLKIKESLELMQYLPQHTIETYRQQQQQQHQHLLQKQTSIQSPSSYGNSSPPLNKMNSMNKLPSVSQLINPQQRNALTPTTIPDGMGANIPMMGTHMPMAGDMNGLSPTQALPPPLSMPSTSHCTPPPPYPTDCSIVSFLARLGCSSCLDYFTTQGLTTIYQIEHYSMDDLASLKIPEQFRHAIWKGILDHRQLHEFSSPSHLLRTPSSASTVSVGSSETRGERVIDAVRFTLRQTISFPPRDEWNDFNFDMDARRNKQQRIKEEGE

SEQ ID NO: 753071 - protein, 448 aa, Homo sapiens
MSQSTQTNEFLSPEVFQHIWDFLEQPICSVQPIDLNFVDEPSEDGATNKIEISMDCIRMQDSDLSDPMWPQYTNLGLLNSMDQQIQNGSSSTSPYNTDHAQNSVTAPSPYAQPSSTFDALSPSPAIPSNTDYPGPHSFDVSFQQSSTAKSATWTYSTELKKLYCQIAKTCPIQIKVMTPPPQGAVIRAMPVYKKAEHVTEVVKRCPNHELSREFNEGQIAPPSHLIRVEGNSHAQYVEDPITGRQSVLVPYEPPQVGTEFTTVLYNFMCNSSCVGGMNRRPILIIVTLETRDGQVLGRRCFEARICACPGRDRKADEDSIRKQQVSDSTKNGDGTKRPFRQNTHGIQMTSIKKRRSPDDELLYLPVRGRETYEMLLKIKESLELMQYLPQHTIETYRQQQQQQHQHLLQKHLLSACFRNELVEPRRETPKQSDVFFRHSKPPNRSVYP

SEQ ID NO: 753072 - protein, 139 aa, Homo sapiens
RSSSYPVQYTAVGKILEPEERTAALINLTANMLYLENNAQTQFSEPQYTNLGLLNSMDQQIQNGSSSTSPYNTDHAQNSVTAPSPYAQPSSTFDALSPSPAIPSNTDYPGPHSFDVSFQQSSTAKSATWTGKSSGHAHT

SEQ ID NO: 753073 - protein, 617 aa, Homo sapiens
RSSSYPVQYTAVGKILEPEERTAALINLTANMLYLENNAQTQFSEPQYTNLGLLNSMDQQIQNGSSSTSPYNTDHAQNSVTAPSPYAQPSSTFDALSPSPAIPSNTDYPGPHSFDVSFQQSSTAKSATWTYSTELKKLYCQIAKTCPIQIKVMTPPPQGAVIRAMPVYKKAEHVTEVVKRCPNHELSREFNEGQIAPPSHLIRVEGNSHAQYVEDPITGRQSVLVPYEPPQVGTEFTTVLYNFMCNSSCVGGMNRRPILIIVTLETRDGQVLGRRCFEARICACPGRDRKADEDSIRKQQVSDSTKNGDGTKRPFRQNTHGIQMTSIKKRRSPDDELLYLPVRGRETYEMLLKIKESLELMQYLPQHTIETYRQQQQQQHQHLLQKQTSIQSPSSYGNSSPPLNKMNSMNKLPSVSQLINPQQRNALTPTTIPDGMGANIPMMGTHMPMAGDMNGLSPTQALPPPLSMPSTSHCTPPPPYPTDCSIVSFLARLGCSSCLDYFTTQGLTTIYQIEHYSMDDLASLKIPEQFRHAIWKGILDHRQLHEFSSPSHLLRTPSSASTVSVGSSETRGERVIDAVRFTLRQTISFPPRDEWNDFNFDMDARRNKQQRIKEEGE

SEQ ID NO: 753074 - protein, 471 aa, Homo sapiens
MSQSTQTNEFLSPEVFQHIWDFLEQPICSVQPIDLNFVDEPSEDGATNKIEISMDCIRMQDSDLSDPMWPQYTNLGLLNSMDQQIQNGSSSTSPYNTDHAQNSVTAPSPYAQPSSTFDALSPSPAIPSNTDYPGPHSFDVSFQQSSTAKSATWTYSTELKKLYCQIAKTCPIQIKVMTPPPQGAVIRAMPVYKKAEHVTEVVKRCPNHELSREFNEGQIAPPSHLIRVEGNSHAQYVEDPITGRQSVLVPYEPPQVGTEFTTVLYNFMCNSSCVGGMNRRPILIIVTLETRDGQVLGRRCFEARICACPGRDRKADEDSIRKQQVSDSTKNGDGTKRPFRQNTHGIQMTSIKKRRSPDDELLYLPVRGRETYEMLLKIKESLELMQYLPQHTIETYRQQQQQQHQHLLQKQTSIQSPSSYGNSSPPLNKMNSMNKLPSVSQLINPQQRNALTPTTIPDGMGANRSGKSENP

SEQ ID NO: 753075 - protein, 506 aa, Homo sapiens
RSSSYPVQYTAVGKILEPEERTAALINLTANMLYLENNAQTQFSEPQYTNLGLLNSMDQQIQNGSSSTSPYNTDHAQNSVTAPSPYAQPSSTFDALSPSPAIPSNTDYPGPHSFDVSFQQSSTAKSATWTYSTELKKLYCQIAKTCPIQIKVMTPPPQGAVIRAMPVYKKAEHVTEVVKRCPNHELSREFNEGQIAPPSHLIRVEGNSHAQYVEDPITGRQSVLVPYEPPQVGTEFTTVLYNFMCNSSCVGGMNRRPILIIVTLETRDGQVLGRRCFEARICACPGRDRKADEDSIRKQQVSDSTKNGDGTKRPFRQNTHGIQMTSIKKRRSPDDELLYLPVRGRETYEMLLKIKESLELMQYLPQHTIETYRQQQQQQHQHLLQKQTSIQSPSSYGNSSPPLNKMNSMNKLPSVSQLINPQQRNALTPTTIPDGMGANIPMMGTHMPMAGDMNGLSPTLHAIHLPLHTPTSVSHRLQHCQFLSEVGLFIMSGLFHDPGADHHLSD

SEQ ID NO: 753076 - protein, 586 aa, Homo sapiens
MLYLENNAQTQFSEPQYTNLGLLNSMDQQIQNGSSSTSPYNTDHAQNSVTAPSPYAQPSSTFDALSPSPAIPSNTDYPGPHSFDVSFQQSSTAKSATWTYSTELKKLYCQIAKTCPIQIKVMTPPPQGAVIRAMPVYKKAEHVTEVVKRCPNHELSREFNEGQIAPPSHLIRVEGNSHAQYVEDPITGRQSVLVPYEPPQVGTEFTTVLYNFMCNSSCVGGMNRRPILIIVTLETRDGQVLGRRCFEARICACPGRDRKADEDSIRKQQVSDSTKNGDGTKRPFRQNTHGIQMTSIKKRRSPDDELLYLPVRGRETYEMLLKIKESLELMQYLPQHTIETYRQQQQQQHQHLLQKQTSIQSPSSYGNSSPPLNKMNSMNKLPSVSQLINPQQRNALTPTTIPDGMGANIPMMGTHMPMAGDMNGLSPTQALPPPLSMPSTSHCTPPPPYPTDCSIVSFLARLGCSSCLDYFTTQGLTTIYQIEHYSMDDLASLKIPEQFRHAIWKGILDHRQLHEFSSPSHLLRTPSSASTVSVGSSETRGERVIDAVRFTLRQTISFPPRDEWNDFNFDMDARRNKQQRIKEEGE

SEQ ID NO: 753077 - protein, 356 aa, Homo sapiens
MLYLENNAQTQFSEPQYTNLGLLNSMDQQIQNGSSSTSPYNTDHAQNSVTAPSPYAQPSSTFDALSPSPAIPSNTDYPGPHSFDVSFQQSSTAKSATWTYSTELKKLYCQIAKTCPIQIKVMTPPPQGAVIRAMPVYKKAEHVTEVVKRCPNHELSREFNEGQIAPPSHLIRVEGNSHAQYVEDPITGRQSVLVPYEPPQVGTEFTTVLYNFMCNSSCVGGMNRRPILIIVTLETRDGQVLGRRCFEARICACPGRDRKADEDSIRKQQVSDSTKNGDGTKRPFRQNTHGIQMTSIKKRRSPDDELLYLPVRGRETYEMLLKIKESLELMQYLPQHTIETYRQQQQQQHQHLLQKQ

SEQ ID NO: 753078 - protein, 143 aa, Homo sapiens
RSSSYPVQYTAVGKILEPEERTAALINLTANMLYLENNAQTQFSEPQYTNLGLLNSMDQQIQNGSSSTSPYNTDHAQNSVTAPSPYAQPSSTFDALSPSPAIPSNTDYPGPHSFDVSFQQSSTAKSATWTTYSIEPDSFRDPV

SEQ ID NO: 753079 - protein, 501 aa, Homo sapiens
MLYLENNAQTQFSEYSTELKKLYCQIAKTCPIQIKVMTPPPQGAVIRAMPVYKKAEHVTEVVKRCPNHELSREFNEGQIAPPSHLIRVEGNSHAQYVEDPITGRQSVLVPYEPPQVGTEFTTVLYNFMCNSSCVGGMNRRPILIIVTLETRDGQVLGRRCFEARICACPGRDRKADEDSIRKQQVSDSTKNGDGTKRPFRQNTHGIQMTSIKKRRSPDDELLYLPVRGRETYEMLLKIKESLELMQYLPQHTIETYRQQQQQQHQHLLQKQTSIQSPSSYGNSSPPLNKMNSMNKLPSVSQLINPQQRNALTPTTIPDGMGANIPMMGTHMPMAGDMNGLSPTQALPPPLSMPSTSHCTPPPPYPTDCSIVSFLARLGCSSCLDYFTTQGLTTIYQIEHYSMDDLASLKIPEQFRHAIWKGILDHRQLHEFSSPSHLLRTPSSASTVSVGSSETRGERVIDAVRFTLRQTISFPPRDEWNDFNFDMDARRNKQQRIKEEGE

SEQ ID NO: 753080 - protein, 424 aa, Homo sapiens
RSSSYPVQYTAVGKILEPEERTAALINLTANMLYLENNAQTQFSEPQYTNLGLLNSMDQQIQNGSSSTSPYNTDHAQNSVTAPSPYAQPSSTFDALSPSPAIPSNTDYPGPHSFDVSFQQSSTAKSATWTYSTELKKLYCQIAKTCPIQIKVMTPPPQGAVIRAMPVYKKAEHVTEVVKRCPNHELSREFNEGQIAPPSHLIRVEGNSHAQYVEDPITGRQSVLVPYEPPQVGTEFTTVLYNFMCNSSCVGGMNRRPILIIVTLETRDGQVLGRRCFEARICACPGRDRKADEDSIRKQQVSDSTKNGDGTKRPFRQNTHGIQMTSIKKRRSPDDELLYLPVRGRETYEMLLKIKESLELMQYLPQHTIETYRQQQQQQHQHLLQKHLLSACFRNELVEPRRETPKQSDVFFRHSKPPNRSVYP

SEQ ID NO: 753081 - protein, 277 aa, Homo sapiens
GTGRQASYTPASGTMAFLWLLSCWALLGTTFGCGVPAIHPVLSGLSRIVNGEDAVPGSWPWQVSLQDKTGFHFCGGSLISEDWVVTAAHCGVRTSDVVVAGEFDQGSDEENIQVLKIAKVFKNPKFSILTVNNDITLLKLATPARFSQTVSAVCLPSADDDFPAGTLCATTGWGKTKYNANKTPDKLQQAALPLLSNAECKKSWGRRITDVMICAGASGVSSCMGDSGGPLVCQKDGAWTLVGIVSWGSDTCSTSSPGVYARVTKLIPWVQKILAAN

SEQ ID NO: 753082 - protein, 277 aa, Homo sapiens; identical to SEQ ID NO: 753081

SEQ ID NO: 753083 - protein, 277 aa, Homo sapiens; identical to SEQ ID NO: 753081

SEQ ID NO: 753084 - protein, 129 aa, Homo sapiens
  misc_feature (8)..(8): Xaa can be any naturally occurring amino acid
RLVRPGCXDRNWAPTGLDWAGLGMGGLWEDPSLVPSPTTQAPASQRVARNTRADEKGCRDRRGIWLVGTGWTLAPILSTCPQATGSCHPPLLSCSGPCRRAWAAWGLWGDELTLAPQTCGSKESSHGHS

SEQ ID NO: 753085 - protein, 114 aa, Homo sapiens
LGQRQQHSAVNSPSGTQVDEGPAISNAGSQNPLGIGLPLVEQEKEHAWEVFMGQAWKWCHYIPPTRTQSHGHTCVSARQAGKCHLSLCPEKKRAWIWQTESQNQSLPQEITYLH

SEQ ID NO: 753086 - protein, 121 aa, Homo sapiens
YLCKYLCLQMRFHPEQLGVRTSIYEFDREGRRREQNSTHSSNNLIASCEQAKRMFIVSLIGAIPYSYVTCALSYSLSVLNCKHSSTNKLRLITRDKKEMPCNLVSCECFKWIPEKLYLRMA

SEQ ID NO: 753087 - protein, 655 aa, Homo sapiens
MGRWAWVPSPWPPPGLGPFLLLLLLLLLLPRGFQPQPGGNRTESPEPNATATPAIPTILVTSVTSETPATSAPEAEGPQSGGLPPPPRAVPSSSSPQAQALTEDGRPCRFPFRYGGRMLHACTSEGSAHRKWCATTHNYDRDRAWGYCVEATPPPGGPAALDPCASGPCLNGGSCSNTQDPQSYHCSCPRAFTGKDCGTEKCFDETRYEYLEGGDRWARVRQGHVEQCECFGGRTWCEGTRHTACLSSPCLNGGTCHLIVATGTTVCACPPGFAGRLCNIEPDERCFLGNGTGYRGVASTSASGLSCLAWNSDLLYQELHVDSVGAAALLGLGPHAYCRNPDNDERPWCYVVKDSALSWEYCRLEACESLTRVQLSPDLLATLPEPASPGRQACGRRHKKRTFLRPRIIGGSSSLPGSHPWLAAIYIGDSFCAGSLVHTCWVVSAAHCFSHSPPRDSVSVVLGQHFFNRTTDVTQTFGIEKYIPYTLYSVFNPSDHDLVLIRLKKKGDRCATRSQFVQPICLPEPGSTFPAGHKCQIAGWGHLDENVSGYSSSLREALVPLVADHKCSSPEVYGADISPNMLCAGYFDCKSDACQGDSGGPLACEKNGVAYLYGIISWGDGCGRLHKPGVYTRVANYVDWINDRIRPPRRLVAPS

SEQ ID NO: 753088 - protein, 386 aa, Homo sapiens
LWKFETSKYYVTITDAPGHRDFIKNMITGTSQADCAVPIVAAGVGEFEAGISKNGQTREHALLAYTLGVKQLIVGVNKMDSTEPPYSQKRYEEIVKEVSTYIKKIGYNPDTVAFVPISGWNGNNMLEPSANMPWFKGWKVTRKDGNASGTTLLEALDCILPPTRPTDKPLRLPLQDVYKIGGIGTVPVGRVETGVLKPGMVVTFAPVNVTTEVKSVEMHHEALSEALPGDNVGFNVKNVSVKDVRRGNVAGDSKNDPPMEAAGFTAQVIILNHPGQISAGYAPVLDCHTAHIACKFAELKEKIDRRSGKKLEDGPKFLKSGDAAIVDMVPGKPMCVESFSDYPPLGRFAVRDMRQTVAVGVIKAVDKKAAGAGKVTKSAQKAQKAK

SEQ ID NO: 753089 - protein, 82 aa, Homo sapiens
FDKSILNVSPISTATSHSGEKPGNEPEEVKLQNASKQIVQNAILQAVQQVSQESQRREERISDNRDHIQLGVGELTKKHEKK

SEQ ID NO: 753090 - protein, 213 aa, Homo sapiens
LLAFALARGSVAKVMSSLCTITDHLDTQYDASSLILSMASVRQNLLLKYGKPLQLTLQACDVKGKEDKSGPENLLVEPWTRDGFLTETGKTRASTIFSTGTESAFQVTQIRIMVRRGGIGAQCGLVFAYNSSSDKFCAEEHFKRFEKYDKWKLQELRQFVKSRIGCSSDDLGEDDPIGWFELEEEWDEADVKLQQCRVAKVSISEFVCPLQPP

SEQ ID NO: 753091 - protein, 314 aa, Homo sapiens [sequence omitted]

SEQ ID NO: 753092 - protein, 212 aa, Homo sapiens
TPDPYLCCSCCKGKDQKKIHGGRVSAGHCYKSRIQVRLGEHNIEVLEGNEQFINAAKIIRHPKYNSRTLDNDILLIKLSSPAVINSRVSAISLPTAPPAAGTESLISGWGNTLSSGADYPDELQCLDAPVLSQAECEASYPGKITNNMFCVGFLEGGKDSCQGDSGGPVVSNGELQGIVSWGYGCAQKNRPGVYTKVYNYVDWIKDTIAANS

SEQ ID NO: 753093 - protein, 242 aa, Homo sapiens
FSLPISTPVAAPFDDDDKIVGGYICEENSVPYQVSLNSGYHFCGGSLISEQWVVSAGHCYKSRIQVRLGEHNIEVLEGNEQFINAAKIIRHPKYNSRTLDNDILLIKLSSPAVINSRVSAISLPTAPPAAGTESLISGWGNTLSSGADYPDELQCLDAPVLSQAECEASYPGKITNNMFCVGFLEGGKDSCQGDSGGPVVSNGELQGIVSWGYGCAQKNRPGVYTKVYNYVDWIKDTIAANS

SEQ ID NO: 753094 - protein, 220 aa, Homo sapiens
TPDALPLLQLLVSLNSGYHFCGGSLISEQWVVSAGHCYKSRIQVRLGEHNIEVLEGNEQFINAAKIIRHPKYNSRTLDNDILLIKLSSPAVINSRVSAISLPTAPPAAGTESLISGWGNTLSSGADYPDELQCLDAPVLSQAECEASYPGKITNNMFCVGFLEGGKDSCQGDSGGPVVSNGELQGIVSWGYGCAQKNRPGVYTKVYNYVDWIKDTIAANS

SEQ ID NO: 753095 - protein, 167 aa, Homo sapiens
LFIPLQDFDAAKIIRHPKYNSRTLDNDILLIKLSSPAVINSRVSAISLPTAPPAAGTESLISGWGNTLSSGADYPDELQCLDAPVLSQAECEASYPGKITNNMFCVGFLEGGKDSCQGDSGGPVVSNGELQGIVSWGYGCAQKNRPGVYTKVYNYVDWIKDTIAANS

SEQ ID NO: 753096 - protein, 126 aa, Homo sapiens
MELREEAWSPGPLDSEDQQMASHENPGEQPEAFPADPAASHLTLASFASGWEETPLPCFPLLGPWDHPTLASPPALGLALLAVEGGLVLWLQVSFLLDDLGDPWGPPSLPDFLCPCPSSLGSTPVC

SEQ ID NO: 753097 - protein, 382 aa, Homo sapiens
MELREEAWSPGPLDSEDQQMASHENPVDILIMDDDDVPSWPPTKLSPPQSAPPAGPPPRPRPPAPYICNECGKSFSHWSKLTRHQRTHTGERPNACADCGKTFSQSSHLVQHRRIHTGEKPYACLECGKRFSWSSNLMQHQRIHTGEKPYTCPDCGRSFTQSKSLAKHRRSHSGLKPFVCPRCGRGFSQPKSLARHLRLHPELSGPGVAAKVLAASVRRAKGPEEAVAADGEIAIPVGDGEGIIVVGAPGEGAAAAAAMAGAGAKAAGPRSRRAPAPKPYVCLECGKGFGHGAGLLAHQRAQHGDGLGAAGGEEPAHICVECGEGFVQGAALRRHKKIHAVGAPSVCSSCGQSYYRAGGEEEDDDDEAAGGRCPECRAGEGR

SEQ ID NO: 753098 - protein, 382 aa, Homo sapiens; identical to SEQ ID NO: 753097

SEQ ID NO: 753099 - protein, 124 aa, Homo sapiens [sequence omitted]

SEQ ID NO: 753100 - protein, 382 aa, Homo sapiens; identical to SEQ ID NO: 753097

SEQ ID NO: 753101 - protein, 382 aa, Homo sapiens; identical to SEQ ID NO: 753097

SEQ ID NO: 753102 - protein, 164 aa, Homo sapiens
NDLPAAAAATWCPQVPAGVLGPAGLDVRQHAGTVQVAALQRGLSVPERVRAGARARGSPAASECQVSRARGPTAAHRPAQIPAFFVQVMVWFPGGAFIVGAASSYEGSDLAAREKVVLVFLQHRLGIFGFLRWRGRYPLGPQLWPERRGLGGKGGAGPGAGMGG

SEQ ID NO: 753103 - protein, 290 aa, Homo sapiens
TISPRPPPLPGARRCLQESWGQLASMYVSTRERYKWLRFSEDCLYLNVYAPARAPGDPQLPVMVWFPGGAFIVGAASSYEGSDLAAREKVVLVFLQHRLGIFGFLSTDDSHARGNWGLLDQMAALRWVQENIAAFGGDPGNVTLFGQSAGAMSISGLMMSPLASGLFHRAISQSGTALFRLFITSNPLKVAKKVAHLAGCNHNSTQILVNCLRALSGTKVMRVSNKMRFLQLNFQRDPEEIIWSMSPVVDGVVIPDDPLVLLTQGKVSSVPYLLGVNNLEFNWLLPYVSE

SEQ ID NO: 753104 - protein, 233 aa, Homo sapiens
MLSFTRLAYILPAHESLGTLQISIGKMIEDMIRFNETFQFLFWTMFGMEEHSVVDVPQFLVPEFAGRALYGIFTIIMVIVLLNMLIAMITNSFQKIEDDADVEWTFARSKLYLFYFSEGLTLPVPFNILPSSKAVFYLLRRICQFICCCCSCCKTKKPDYPPIPTFANPRAGAVPGEGERGSYRLHVIKALVQRYTETARREFEETRRKDLGNRLTELTKTISRLQSEVAGVR

SEQ ID NO: 753105 - protein, 182 aa, Homo sapiens
SAPVGPVAGGIMGCIMVLVLAVYAYRHQIHRRSHQHMSPLAAQEMSVRMSNLENDRDERDDDSHEDRGIISNTRFIAAVIERHAHSPERRRRYWGRSGTESDHGYSTMSPQEDSENPPCNNDPLSAGVDVGNHDEDLDLDTPPQTAALLSHKFHHYRSHHPTLHHSHHLQAAVTVHTVDAEC

SEQ ID NO: 753106 - protein, 182 aa, Homo sapiens; identical to SEQ ID NO: 753105

SEQ ID NO: 753107 - protein, 182 aa, Homo sapiens; identical to SEQ ID NO: 753105

SEQ ID NO: 753108 - protein, 182 aa, Homo sapiens; identical to SEQ ID NO: 753105

SEQ ID NO: 753109 - protein, 182 aa, Homo sapiens; identical to SEQ ID NO: 753105

SEQ ID NO: 753110 - protein, 102 aa, Homo sapiens
KLSAYGADMAKSKNHTTHNQSRKWHRNGIKKPRSQRYESLKGVDPKFLRNMRFAKKHNKKGLKKMQANNAKAMSARAEAIKALVKPKEVKPKIPKGVSHKLD

SEQ ID NO: 753111 - protein, 1099 aa, Homo sapiens
MGKLIRMGPQERWLLRTKRLHWSRLLFLLGMLIIGSTYQHLRRPRGLSSLWAAVSSHQPIKLASRDLSSEEMMMMSSSPSKPSSEMGGKMLVPQASVGSDEATLSMTVENIPSMPKRTAKMIPTTTKNNYSPTAAGTERRKEDTPTSSRTLTYYTSTSSRQIVKKYTPTPRGEMKSYSPTQVREKVKYTPSPRGRRVGTYVPSTFMTMETSHAITPRTTVKDSDITATYKILETNSLKRIMEETTPTTLKGMFDSTPTFLTHEVEANVLTSPRSVMEKNNLFPPRRVESNSSAHPWGLVGKSNPKTPQGTVLLHTPATSEGQVTISTMTGSSPAETKAFTAAWSLRNPSPRTSVSAIKTAPAIVWRLAKKPSTAPSTSTTPTVRAKLTMQVHHCVVVKPTPAMLTTPSPSLTTALLPEELSPSPSVLPPSLPDLHPKGEYPPDLFSVEERRQGWVVLHVFGMMYVFVALAIVCDEYFVPALGVITDKLQISEDVAGATFMAAGGSAPELFTSLIGVFISHSNVGIGTIVGSAVFNILFVIGTCSLFSREILNLTWWPLFRDVSFYILDLIMLILFFLDSLIAWWESLLLLLAYAFYVFTMKWNKHIEVWVKEQLSRRPVAKVMALEDLSKPGDGAIAVDELQDNKKLKLPSLLTRGSSSTSLHNSTIRSTIYQLMLHSLDPLREVRLAKEKEEESLNQGARAQPQAKAESKPEEEEPAKLPAVTVTPAPVPDIKGDQKENPGGQEDVAEAESTGEMPGEEGETAGEGETEEKSGGETQPEGEGETETQGKGEECEDENEAEGKGDNEGEDEGEIHAEDGEMKGNEGETESQELSAENHGEAKNDEKGVEDGGGSDGGDSEEEEEEEEEQEEEEEEEEQEEEEEEEEEEEEKGNEEPLSLDWPETRQKQAIYLFLLPIVFPLWLTVPDVRRQESRKFFVFTFLGSIMWIAMFSYLMVWWAHQVGETIGISEEIMGLTILAAGTSIPDLITSVIVARKGLGDMAVSSSVGSNIFDITVGLPVPWLLFSLINGLQPVPVSSNGLFCAIVLLFLMLLFVISSIASCKWRMNKILGFTMFLLYFVFLIISVMLEDRIISCPVSV

SEQ ID NO: 753112 - protein, 1081 aa, Homo sapiens
MGKLIRMGPQERWLLRTKRLHWSRLLFLLGMLIIGSTYQHLRRPRGLSSLWAAVSSHQPIKLASRDLSSEEMMMMSSSPSKPSSEMGGKMLVPQASVGSDEATLSMTVENIPSMPKRTAKMIPTTTKNNYSPTAAGTERRKEDTPTSSRTLTYYTSTSSRQIVKKYTPTPRGEMKSYSPTQVREKVKYTPSPRGRRVGTYVPSTFMTMETSHAITPRTTVKDSDITATYKILETNSLKRIMEETTPTTLKGMFDSTPTFLTHEVEANVLTSPRSVMEKNNLFPPRRVESNSSAHPWGLVGKSNPKTPQGTVLLHTPATSEGQVTISTMTGSSPAETKAFTAAWSLRNPSPRTSVSAIKTAPAIVWRLAKKPSTAPSTSTTPTVRAKLTMQVHHCVVVKPTPAMLTTPSPSLTTALLPEELSPSPSVLPPSLPDLHPKGEYPPDLFSVEERRQGWVVLHVFGMMYVFVALAIVCDEYFVPALGVITDKLQISEDVAGATFMAAGGSAPELFTSLIGVFISHSNVGIGTIVGSAVFNILFVIGTCSLFSREILNLTWWPLFRDVSFYILDLIMLILFFLDSLIAWWESLLLLLAYAFYVFTMKWNKHIEVWVKEQLSRRPVAKVMALEDLSKLPSLLTRGSSSTSLHNSTIRSTIYQLMLHSLDPLREVRLAKEKEEESLNQGARAQPQAKAESKPEEEEPAKLPAVTVTPAPVPDIKGDQKENPGGQEDVAEAESTGEMPGEEGETAGEGETEEKSGGETQPEGEGETETQGKGEECEDENEAEGKGDNEGEDEGEIHAEDGEMKGNEGETESQELSAENHGEAKNDEKGVEDGGGSDGGDSEEEEEEEEEQEEEEEEEEQEEEEEEEEEEEEKGNEEPLSLDWPETRQKQAIYLFLLPIVFPLWLTVPDVRRQESRKFFVFTFLGSIMWIAMFSYLMVWWAHQVGETIGISEEIMGLTILAAGTSIPDLITSVIVARKGLGDMAVSSSVGSNIFDITVGLPVPWLLFSLINGLQPVPVSSNGLFCAIVLLFLMLLFVISSIASCKWRMNKILGFTMFLLYFVFLIISVMLEDRIISCPVSV

SEQ ID NO: 753113 - protein, 1081 aa, Homo sapiens; identical to SEQ ID NO: 753112

SEQ ID NO: 753114 - protein, 985 aa, Homo sapiens [sequence omitted]

SEQ ID NO: 753115 - protein, 1081 aa, Homo sapiens; identical to SEQ ID NO: 753112

SEQ ID NO: 753116 - protein, 985 aa, Homo sapiens [sequence omitted]

SEQ ID NO: 753117 - protein, 1056 aa, Homo sapiens
KKKKKKKRKKKKEEEEEEEEGAEKSSSPFAAAMGEDDAALRAGSRGLSDPWADSVGVRPRTTERHIAVHKRLVLAFAVSLVALLAVTMLAVLLSLRFDECGASATPGADGGPSGFPERGGNGSLPGSARRNHHAGGDSWQPEAGGVASPGTTSAQPPSEEEREPWEPWTQLRLSGHLKPLHYNLMLTAFMENFTFSGEVNVEIACRNATRYVVLHASRVAVEKVQLAEDRAFGAVPVAGFFLYPQTQVLVVVLNRTLDAQRNYNLKIIYNALIENELLGFFRSSYVLHGERRFLGVTQFSPTHARKAFPCFDEPIYKATFKISIKHQATYLSLSNMPVETSVFEEDGWVTDHFSQTPLMSTYYLAWAICNFTYRETTTKSGVVVRLYARPDAIRRGSGDYALHITKRLIEFYEDYFKVPYSLPKLDLLAVPKHPYAAMENWGLSIFVEQRILLDPSVSSISYLLDVTMVIVHEICHQWFGDLVTPVWWEDVWLKEGFAHYFEFVGTDYLYPGWNMEKQRFLTDVLHEVMLLDGLASSHPVSQEVLQATDIDRVFDWIAYKKGAALIRMLANFMGHSVFQRGLQDYLTIHKYGNAARNDLWNTLSEALKRNGKYVNIQEVMDQWTLQMGYPVITILGNTTAENRIIITQQHFIYDISAKTKALKLQNNSYLWQIPLTIVVGNRSHVSSEAIIWVSNKSEHHRITYLDKGSWLLGNINQTGYFRVNYDLRNWRLLIDQLIRNHEVLSVSNRAGLIDDAFSLARAGYLPQNIPLEIIRYLSEEKDFLPWHAASRALYPLDKLLDRMENYNIFNEYILKQVATTYIKLGWPKNNFNGSLVQASYQHEELRREVIMLACSFGNKHCHQQASTLISDWISSNRNRIPLNVRDIVYCTGVSLLDEDVWEFIWMKFHSTTAVSEKKILLEALTCSDDRNLLNRLLNLSLNSEVVLDQDAIDVIIHVARNPHGRDLAWKFFRDKWKILNTRYGEALFMNSKLISGVTEFLNTEGELKELKNFMKNYDGVAAASFSRAVETVEANVRWKMLYQDELFQWLGKALRH

SEQ ID NO: 753118 - protein, 1004 aa, Homo sapiens
  misc_feature (12)..(14): Xaa can be any naturally occurring amino acid
MGPRAPYQVPGXXXKPPKRLVLAFAVSLVALLAVTMLAVLLSLRFDECGASATPGADGGPSGFPERGGNGSLPGSARRNHHAGGDSWQPEAGGVASPGTTSAQPPSEEEREPWEPWTQLRLSGHLKPLHYNLMLTAFMENFTFSGEVNVEIACRNATRYVVLHASRVAVEKVQLAEDRAFGAVPVAGFFLYPQTQVLVVVLNRTLDAQRNYNLKIIYNALIENELLGFFRSSYVLHGERRFLGVTQFSPTHARKAFPCFDEPIYKATFKISIKHQATYLSLSNMPVETSVFEEDGWVTDHFSQTPLMSTYYLAWAICNFTYRETTTKSGVVVRLYARPDAIRRGSGDYALHITKRLIEFYEDYFKVPYSLPKLDLLAVPKHPYAAMENWGLSIFVEQRILLDPSVSSISYLLDVTMVIVHEICHQWFGDLVTPVWWEDVWLKEGFAHYFEFVGTDYLYPGWNMEKQRFLTDVLHEVMLLDGLASSHPVSQEVLQATDIDRVFDWIAYKKGAALIRMLANFMGHSVFQRGLQDYLTIHKYGNAARNDLWNTLSEALKRNGKYVNIQEVMDQWTLQMGYPVITILGNTTAENRIIITQQHFIYDISAKTKALKLQNNSYLWQIPLTIVVGNRSHVSSEAIIWVSNKSEHHRITYLDKGSWLLGNINQTGYFRVNYDLRNWRLLIDQLIRNHEVLSVSNRAGLIDDAFSLARAGYLPQNIPLEIIRYLSEEKDFLPWHAASRALYPLDKLLDRMENYNIFNEYILKQVATTYIKLGWPKNNFNGSLVQASYQHEELRREVIMLACSFGNKHCHQQASTLISDWISSNRNRIPLNVRDIVYCTGVSLLDEDVWEFIWMKFHSTTAVSEKKILLEALTCSDDRNLLNRLLNLSLNSEVVLDQDAIDVIIHVARNPHGRDLAWKFFRDKWKILNTRYGEALFMNSKLISGVTEFLNTEGELKELKNFMKNYDGVAAASFSRAVETVEANVRWKMLYQDELFQWLGKALRH

SEQ ID NO: 753119 - protein, 437 aa, Homo sapiens
MDQWTLQMGYPVITILGNTTAENRIIITQQHFIYDISAKTKALKLQNNSYLWQIPLTIVVGNRSHVSSEAIIWVSNKSEHHRITYLDKGSWLLGNINQTGYFRVNYDLRNWRLLIDQLIRNHEVLSVSNRAGLIDDAFSLARAGYLPQNIPLEIIRYLSEEKDFLPWHAASRALYPLDKLLDRMENYNIFNEYILKQVATTYIKLGWPKNNFNGSLVQASYQHEELRREVIMLACSFGNKHCHQQASTLISDWISSNRNRIPLNVRDIVYCTGVSLLDEDVWEFIWMKFHSTTAVSEKKILLEALTCSDDRNLLNRLLNLSLNSEVVLDQDAIDVIIHVARNPHGRDLAWKFFRDKWKILNTRYGEALFMNSKLISGVTEFLNTEGELKELKNFMKNYDGVAAASFSRAVETVEANVRWKMLYQDELFQWLGKALRH

SEQ ID NO: 753120 - protein, 764 aa, Homo sapiens
KKKKKKKRKKKKEEEEEEEEGAEKSSSPFAAAMGEDDAALRAGSRGLSDPWADSVGVRPRTTERHIAVHKRLVLAFAVSLVALLAVTMLAVLLSLRFDECGASATPGADGGPSGFPERGGNGSLPGSARRNHHAGGDSWQPEAGGVASPGTTSAQPPSEEEREPWEPWTQLRLSGHLKPLHYNLMLTAFMENFTFSGEVNVEIACRNATRYVVLHASRVAVEKVQLAEDRAFGAVPVAGFFLYPQTQVLVVVLNRTLDAQRNYNLKIIYNALIENELLGFFRSSYVLHGERRFLGVTQFSPTHARKAFPCFDEPIYKATFKISIKHQATYLSLSNMPVETSVFEEDGWVTDHFSQTPLMSTYYLAWAICNFTYRETTTKSGVVVRLYARPDAIRRGSGDYALHITKRLIEFYEDYFKVPYSLPKLDLLAVPKHPYAAMENWGLSIFVEQRILLDPSVSSISYLLDVTMVIVHEICHQWFGDLVTPVWWEDVWLKEGFAHYFEFVGTDYLYPGWNMEKQRFLTDVLHEVMLLDGLASSHPVSQEVLQATDIDRVFDWIAYKKGAALIRMLANFMGHSVFQRGLQDYLTIHKYGNAARNDLWNTLSEALKRNGKYVNIQEVMDQWTLQMGYPVITILGNTTAENRIIITQQHFIYDISAKTKALKLQNNSYLWQIPLTIVVGNRSHVSSEAIIWVSNKSEHHRITYLDKGSWLLGNINQTGYFRVNYDLRNWRLLIDQLIRNHEVLSVSNRAGLIDDAFSLASLYI

SEQ ID NO: 753121 - protein, 122 aa, Homo sapiens
RDTSRPGGVVGADRAPLPLQGPQPSLSLAEQHLESPVPSAPGALAGGPTQAAPGVRGEEEQWAREIGAQLRRMADDLNAQYERRRQEEQQRHRPSPWRVLYNLIMGLLPLPRGHRAPEMEPN

SEQ ID NO: 753122 - protein, 193 aa, Homo sapiens
MARARQEGSSPEPVEGLARDGPRPFPLGRLVPSAVSCGLCEPGLAAAPAAPTLLPAAYLCAPTAPPAVTAALGGSRWPGGPRSRPRGPRPDGPQPSLSLAEQHLESPVPSAPGALAGGPTQAAPGVRGEEEQWAREIGAQLRRMADDLNAQYERRRQEEQQRHRPSPWRVLYNLIMGLLPLPRGHRAPEMEPN

SEQ ID NO: 753123 - protein, 193 aa, Homo sapiens; identical to SEQ ID NO: 753122

SEQ ID NO: 753124 - protein, 101 aa, Homo sapiens
MKFGMGSAQACPCQVPRAASTTWVPCQICETRGAAAAPPLTLEGPVQSHHGTPALTQGPQSPRDGAQLGACTRPVDVRDSGGRPLPPPDTLASAGDFLCTM

SEQ ID NO: 753125 - protein, 190 aa, Homo sapiens
RREPHASGRLAAAAAAPAIPAAATTRTRLRPGEQQQPQPQQPPLQLERQQQRQPQQQPPRRAALGGRALLKEAARPPPPPPPACSCPRGPQPSLSLAEQHLESPVPSAPGALAGGPTQAAPGVRGEEEQWAREIGAQLRRMADDLNAQYERRRQEEQQRHRPSPWRVLYNLIMGLLPLPRGHRAPEMEPN

SEQ ID NO: 753126 - protein, 193 aa, Homo sapiens; identical to SEQ ID NO: 753122

SEQ ID NO: 753127 - protein, 131 aa, Homo sapiens
MKFGMGSAQACPCQVPRAASTTWVPCQICGPQPSLSLAEQHLESPVPSAPGALAGGPTQAAPGVRGEEEQWAREIGAQLRRMADDLNAQYERRRQEEQQRHRPSPWRVLYNLIMGLLPLPRGHRAPEMEPN

SEQ ID NO: 753128 - protein, 193 aa, Homo sapiens; identical to SEQ ID NO: 753122

SEQ ID NO: 753129 - protein, 96 aa, Homo sapiens
MGLPNSVSFAITATFLALSSFWIKRKAPEPSLTCRLPTQTEVSDEKSLGAVPLPWDPGAEHPDTKMPGECQEACTKGCSGHPSWPSARLQGLGPRT

SEQ ID NO: 753130 - protein, 1503 aa, Homo sapiens
MEPSALRKAGSEQEEGFEGLPRRVTDLGMVSNLRRSNSSLFKSWRLQCPFGNNDKQESLSSWIPENIKKKECVYFVESSKLSDAGKVVCQCGYTHEQHLEEATKPHTFQGTQWDPKKHVQEMPTDAFGDIVFTGLSQKVKKYVRVSQDTPSSVIYHLMTQHWGLDVPNLLISVTGGAKNFNMKPRLKSIFRRGLVKVAQTTGAWIITGGSHTGVMKQVGEAVRDFSLSSSYKEGELITIGVATWGTVHRREGLIHPTGSFPAEYILDEDGQGNLTCLDSNHSHFILVDDGTHGQYGVEIPLRTRLEKFISEQTKERGGVAIKIPIVCVVLEGGPGTLHTIDNATTNGTPCVVVEGSGRVADVIAQVANLPVSDITISLIQQKLSVFFQEMFETFTESRIVEWTKKIQDIVRRRQLLTVFREGKDGQQDVDVAILQALLKASRSQDHFGHENWDHQLKLAVAWNRVDIARSEIFMDEWQWKPSDLHPTMTAALISNKPEFVKLFLENGVQLKEFVTWDTLLYLYENLDPSCLFHSKLQKVLVEDPERPACAPAAPRLQMHHVAQVLRELLGDFTQPLYPRPRHNDRLRLLLPVPHVKLNVQGVSLRSLYKRSSGHVTFTMDPIRDLLIWAIVQNRRELAGIIWAQSQDCIAAALACSKILKELSKEEEDTDSSEEMLALAEEYEHRAIGVFTECYRKDEERAQKLLTRVSEAWGKTTCLQLALEAKDMKFVSHGGIQAFLTKVWWGQLSVDNGLWRVTLCMLAFPLLLTGLISFREKRLQDVGTPAARARAFFTAPVVVFHLNILSYFAFLCLFAYVLMVDFQPVPSWCECAIYLWLFSLVCEEMRQLFYDPDECGLMKKAALYFSDFWNKLDVGAILLFVAGLTCRLIPATLYPGRVILSLDFILFCLRLMHIFTISKTLGPKIIIVKRMMKDVFFFLFLLAVWVVSFGVAKQAILIHNERRVDWLFRGAVYHSYLTIFGQIPGYIDGVNFNPEHCSPNGTDPYKPKCPESDATQQRPAFPEWLTVLLLCLYLLFTNILLLNLLIAMFNYTFQQVQEHTDQIWKFQRHDLIEEYHGRPAAPPPFILLSHLQLFIKRVVLKTPAKRHKQLKNKLEKNEEAALLSWEIYLKENYLQNRQFQQKQRPEQKIEDISNKVDAMVDLLDLDPLKRSGSMEQRLASLEEQVAQTARALHWIVRTLRASGFSSEADVPTLASQKAAEEPDAEPGGRKKTEEPGDSYHVNARHLLYPNCPVTRFPVPNEKVPWETEFLIYDPPFYTAERKDAAAMDPMGDTLEPLSTIQYNVVDGLRDRRSFHGPYTVQAGLPLNPMGRTGLRGRGSLSCFGPNHTLYPMVTRWRRNEDGAICRKSIKKMLEVLVVKLPLSEHWALPGGSREPGEMLPRKLKRILRQEHWPSFENLLKCGMEVYKGYMDDPRNTDNAWIETVAVSVHFQDQNDVELNRLNSNLHACDSGASIRWQVVDRRIPLYANHKTLLQKAAAEFGAHY

SEQ ID NO: 753131 - protein, 1455 aa, Homo sapiens
MEPSALRKAGSEQEEGFEGLPRRVTDLGMVSNLRRSNSSLFKSWRLQCPFGNNDKQESLSSWIPENIKKKECVYFVESSKLSDAGKVVCQCGYTHEQHLEEATKPHTFQGTQWDPKKHVQEMPTDAFGDIVFTGLSQKVKKYVRVSQDTPSSVIYHLMTQHWGLDVPNLLISVTGGAKNFNMKPRLKSIFRRGLVKVAQTTGAWIITGGSHTGVMKQVGEAVRDFSLSSSYKEGELITIGVATWGTVHRREGLIHPTGSFPAEYILDEDGQGNLTCLDSNHSHFILVDDGTHGQYGVEIPLRTRLEKFISEQTKERGGVAIKIPIVCVVLEGGPGTLHTIDNATTNGTPCVVVEGSGRVADVIAQVANLPVSDITISLIQQKLSVFFQEMFETFTESRIVEWTKKIQDIVRRRQLLTVFREGKDGQQDVDVAILQALLKASRSQDHFGHENWDHQLKLAVAWNRVDIARSEIFMDEWQWKPSDLHPTMTAALISNKPEFVKLFLENGVQLKEFVTWDTLLYLYENLDPSCLFHSKLQKVLVEDPERPACAPAAPRLQMHHVAQVLRELLGDFTQPLYPRPRHNDRLRLLLPVPHVKLNVQGVSLRSLYKRSSGHVTFTMDPIRDLLIWAIVQNRRELAGIIWAQSQDCIAAALACSKILKELSKEEEDTDSSEEMLALAEEYEHRAIGVFTECYRKDEERAQKLLTRVSEAWGKTTCLQLALEAKDMKFVSHGGIQAFLTKVWWGQLSVDNGLWRVTLCMLAFPLLLTGLISFREKRLQDVGTPAARARAFFTAPVVVFHLNILSYFAFLCLFAYVLMVDFQPVPSWCECAIYLWLFSLVCEEMRQLFYDPDECGLMKKAALYFSDFWNKLDVGAILLFVAGLTCRLIPATLYPGRVILSLDFILFCLRLMHIFTIKKDVFFFLFLLAVWVVSFGVAKQAILIHNERRVDWLFRGAVYHSYLTIFGQIPGYIDGVNFNPEHCSPNGTDPYKPKCPESDATQQRPAFPEWLTVLLLCLYLLFTNILLLNLLIAMFNYTFQQVQEHTDQIWKFQRHDLIEEYHGRPAAPPPFILLSHLQLFIKRVVLKTPAKRHKQLKNKLEKNEEAALLSWEIYLKENYLQNRQFQQKQRPEQKIEDISNKVDAMVDLLDLDPLKRSGSMEQRLASLEEQVAQTARALHWIVRTLRASGFSSEADVPTLASQKAAEEPDAEPGGRKKTEEPGDSYHVNARHLLYPNCPVTRFPVPNEKVPWETEFLIYDPPFYTAERKDAAAMDPMGENPMGRTGLRGRGSLSCFGPNHTLYPMVTRWRRNEDGAICRKSIKKMLEVLVVKLPLSEHWALPGGSREPGEMLPRKLKRILRQEHWPSFENLLKCGMEVYKGYMDDPRNTDNAWIETVAVSVHFQDQNDVELNRLNSNLHACDSGASIRWQVVDRRIPLYANHKTLLQKAAAEFGAHY

SEQ ID NO: 753132 - protein, 1494 aa, Homo sapiens
MEPSALRKAGSEQEEGFEGLPRRVTDLGMVSNLRRSNSSLFKSWRLQCPFGNNDKQESLSSWIPENIKKKECVYFVESSKLSDAGKVVCQCGYTHEQHLEEATKPHTFQGTQWDPKKHVQEMPTDAFGDIVFTGLSQKVKKYVRVSQDTPSSVIYHLMTQHWGLDVPNLLISVTGGAKNFNMKPRLKSIFRRGLVKVAQTTGAWIITGGSHTGVMKQVGEAVRDFSLSSSYKEGELITIGVATWGTVHRREGLIHPTGSFPAEYILDEDGQGNLTCLDSNHSHFILVDDGTHGQYGVEIPLRTRLEKFISEQTKERGGVAIKIPIVCVVLEGGPGTLHTIDNATTNGTPCVVVEGSGRVADVIAQVANLPVSDITISLIQQKLSVFFQEMFETFTESRIVEWTKKIQDIVRRRQLLTVFREGKDGQQDVDVAILQALLKASRSQDHFGHENWDHQLKLAVAWNRVDIARSEIFMDEWQWKPSDLHPTMTAALISNKPEFVKLFLENGVQLKEFVTWDTLLYLYENLDPSCLFHSKLQKVLVEDPERPACAPAAPRLQMHHVAQVLRELLGDFTQPLYPRPRHNDRLRLLLPVPHVKLNVQGVSLRSLYKRSSGHVTFTMDPIRDLLIWAIVQNRRELAGIIWAQSQDCIAAALACSKILKELSKEEEDTDSSEEMLALAEEYEHRAIGVFTECYRKDEERAQKLLTRVSEAWGKTTCLQLALEAKDMKFVSHGGIQAFLTKVWWGQLSVDNGLWRVTLCMLAFPLLLTGLISFREKRLQDVGTPAARARAFFTAPVVVFHLNILSYFAFLCLFAYVLMVDFQPVPSWCECAIYLWLFSLVCEEMRQLFYDPDECGLMKKAALYFSDFWNKLDVGAILLFVAGLTCRLIPATLYPGRVILSLDFILFCLRLMHIFTISKTLGPKIIIVKRMMKDVFFFLFLLAVWVVSFGVAKQAILIHNERRVDWLFRGAVYHSYLTIFGQIPGYIDGVNFNPEHCSPNGTDPYKPKCPESDATQQRPAFPEWLTVLLLCLYLLFTNILLLNLLIAMFNYTFQQVQEHTDQIWKFQRHDLIEEYHGRPAAPPPFILLSHLQLFIKRVVLKTPAKRHKQLKNKLEKNEEAALLSWEIYLKENYLQNRQFQQKQRPEQKIEDISNKVDAMVDLLDLDPLKRSGSMEQRLASLEEQVAQTARALHWIVRTLRASGFSSEADVPTLASQKAAEEPDAEPGGRKKTEEPGDSYHVNARHLLYPNCPVTRFPVPNEKVPWETEFLIYDPPFYTAERKDAAAMDPMGDTLEPLSTIQYNVVDGLRDRRSFHGPYTVQAGLPLNPMGRTGLRGRGSLSCFGPNHTLYPMVTRWRRNEDGAICRKSIKKMLEVLVVKLPLSEHWALPGGSREPGEMLPRKLKRILRQEHWPSFENLLKCGMEVYKGYMDDPRNTDNAWIETVAVSVHFQDQNDVELNRLNSNLHACDSGASIRWQVVDRRIPLYANHKTLSSP

SEQ ID NO: 753133 - protein, 1469 aa, Homo sapiens
MEPSALRKAGSEQEEGFEGLPRRVTDLGMVSNLRRSNSSLFKSWRLQCPFGNNDKQESLSSWIPENIKKKECVYFVESSKLSDAGKVVCQCGYTHEQHLEEATKPHTFQGTQWDPKKHVQEMPTDAFGDIVFTGLSQKVKKYVRVSQDTPSSVIYHLMTQHWGLDVPNLLISVTGGAKNFNMKPRLKSIFRRGLVKVAQTTGAWIITGGSHTGVMKQVGEAVRDFSLSSSYKEGELITIGVATWGTVHRREGLIHPTGSFPAEYILDEDGQGNLTCLDSNHSHFILVDDGTHGQYGVEIPLRTRLEKFISEQTKERGGVAIKIPIVCVVLEGGPGTLHTIDNATTNGTPCVVVEGSGRVADVIAQVANLPVSDITISLIQQKLSVFFQEMFETFTESRIVEWTKKIQDIVRRRQLLTVFREGKDGQQDVDVAILQALLKASRSQDHFGHENWDHQLKLAVAWNRVDIARSEIFMDEWQWKPSDLHPTMTAALISNKPEFVKLFLENGVQLKEFVTWDTLLYLYENLDPSCLFHSKLQKVLVEDPERPACAPAAPRLQMHHVAQVLRELLGDFTQPLYPRPRHNDRLRLLLPVPHVKLNVQGVSLRSLYKRSSGHVTFTMDPIRDLLIWAIVQNRRELAGIIWAQSQDCIAAALACSKILKELSKEEEDTDSSEEMLALAEEYEHRAIGVFTECYRKDEERAQKLLTRVSEAWGKTTCLQLALEAKDMKFVSHGGIQAFLTKVWWGQLSVDNGLWRVTLCMLAFPLLLTGLISFREKRLQDVGTPAARARAFFTAPVVVFHLNILSYFAFLCLFAYVLMVDFQPVPSWCECAIYLWLFSLVCEEMRQLFYDPDECGLMKKAALYFSDFWNKLDVGAILLFVAGLTCRLIPATLYPGRVILSLDFILFCLRLMHIFTISKTLGPKIIIVKRMMKDVFFFLFLLAVWVVSFGVAKQAILIHNERRVDWLFRGAVYHSYLTIFGQIPGYIDGVNFNPEHCSPNGTDPYKPKCPESDATQQRPAFPEWLTVLLLCLYLLFTNILLLNLLIAMFNYTFQQVQEHTDQIWKFQRHDLIEEYHGRPAAPPPFILLSHLQLFIKRVVLKTPAKRHKQLKNKLEKNEEAALLSWEIYLKENYLQNRQFQQKQRPEQKIEDISNKVDAMVDLLDLDPLKRSGSMEQRLASLEEQVAQTARALHWIVRTLRASGFSSEADVPTLASQKAAEEPDAEPGGRKKTEEPGDSYHVNARHLLYPNCPVTRFPVPNEKVPWETEFLIYDPPFYTAERKDAAAMDPMGENPMGRTGLRGRGSLSCFGPNHTLYPMVTRWRRNEDGAICRKSIKKMLEVLVVKLPLSEHWALPGGSREPGEMLPRKLKRILRQEHWPSFENLLKCGMEVYKGYMDDPRNTDNAWIETVAVSVHFQDQNDVELNRLNSNLHACDSGASIRWQVVDRRIPLYANHKTLLQKAAAEFGAHY

SEQ ID NO: 753134 - protein, 331 aa, Homo sapiens
GPKVWCASSSAASSFRVDAMVDLLDLDPLKRSGSMEQRLASLEEQVAQTARALHWIVRTLRASGFSSEADVPTLASQKAAEEPDAEPGGRKKTEEPGDSYHVNARHLLYPNCPVTRFPVPNEKVPWETEFLIYDPPFYTAERKDAAAMDPMGENPMGRTGLRGRGSLSCFGPNHTLYPMVTRWRRNEDGAICRKSIKKMLEVLVVKLPLSEHWALPGGSREPGEMLPRKLKRILRQEHWPSFENLLKCGMEVYKGYMDDPRNTDNAWIETVAVSVHFQDQNDVELNRLNSNLHACDSGASIRWQVVDRRIPLYANHKTLLQKAAAEFGAHY

SEQ ID NO: 753135 - protein, 107 aa, Homo sapiens
ITGSTTIIKLTTGSTKAAPQDKAALLPGGDPDTPQTEPQVPEESAEAVSPSSPWYLEPSRVVRSSPISALRWMGWIPLTWLPSPPWPETFRRKQKDEMGLASRRGRE

SEQ ID NO: 753136 - protein, 927 aa, Homo sapiens
RVLSLESPLEKDPRVLGAQSVPRGRALKGLSPLGLDSAFRLFPDPRAGPWNTAVLSSGMEPETALWGPDLQGPEQSPNDAHRGAESENEEESPRQESSGEEIIMGDPAQSPESKDSTEMSLERSSQDPSVPQNPPTPLGHSNPLDHQIPLDPPAPEVVPTPSDWTKACEASWQWGALTTWNSPPVVPANEPSLRELVQGRPAGAEKPYICNECGKSFSQWSKLLRHQRIHTGERPNTCSECGKSFTQSSHLVQHQRTHTGEKPYKCPDCGKCFSWSSNLVQHQRTHTGEKPYKCTECEKAFTQSTNLIKHQRSHTGEKPYKCGECRRAFYRSSDLIQHQATHTGEKPYKCPECGKRFGQNHNLLKHQKIHAGEKPYRCTECGKSFIQSSELTQHQRTHTGEKPYECLECGKSFGHSSTLIKHQRTHLREDPFKCPVCGKTFTLSATLLRHQRTHTGERPYKCPECGKSFSVSSNLINHQRIHRGERPYICADCGKSFIMSSTLIRHQRIHTGEKPYKCSDCGKSFIRSSHLIQHRRTHTGEKPYKCPECGKSFSQSSNLITHVRTHMDENLFVCSDCGKAFLEAHELEQHRVIHERGKTPARRAQGDSLLGLGDPSLLTPPPGAKPHKCLVCGKGFNDEGIFMQHQRIHIGENPYKNADGLIAHAAPKPPQLRSPRLPFRGNSYPGAAEGRAEAPGQPLKPPEGQEGFSQRRGLLSSKTYICSHCGESFLDRSVLLQHQLTHGNEKPFLFPDYRIGLGEGAGPSPFLSGKPFKCPECKQSFGLSSELLLHQKVHAGGKSSQKSPELGKSSSVLLEHLRSPLGARPYRCSDCRASFLDRVALTRHQETHTQEKPPNPEDPPPEAVTLSTDQEGEGETPTPTESSSHGEGQNPKTLVEEKPYLCPECGAGFTEVAALLLHRSCHPGVSL

SEQ ID NO: 753137 - protein, 927 aa, Homo sapiens; identical to SEQ ID NO: 753136

SEQ ID NO: 753138 - protein, 176 aa, Homo sapiens
RGRSRAAAAAAAARGAAALVQTGKMAAGGGGGSSKASSSSASSAGALESSLDRKFQSVTNTMESIQGLSSWCIENKKHHSTIVYHWMKWLRRSAYPHRLNLFYLANDVIQNCKRKNAIIFRESFADVLPEAAALVKDPSVSKSVERIFKIWEDRNVYPEEMIVALREALSKCLFLS

SEQ ID NO: 753139 - protein, 430 aa, Homo sapiens
RGRSRAAAAAAAARGAAALVQTGKMAAGGGGGSSKASSSSASSAGALESSLDRKFQSVTNTMESIQGLSSWCIENKKHHSTIVYHWMKWLRRSAYPHRLNLFYLANDVIQNCKRKNAIIFRESFADVLPEAAALVKDPSVSKSVERIFKIWEDRNVYPEEMIVALREALSTTFKTQKQLKENLNKQPNKQWKKSQTSTNPKAALKSKIVAEFRSQALIEELLLYKRSEDQIELKEKQLSTMRVDVCSTETLKCLKDKTGGKKFSKEFEEASSKLEEFVNGLDKQVKNGPSLTEALENAGIFYEAQYKEVKVVANAYKTFANRVNNLKKKLDQLKSTLPDPEESPVPSPSMDAPSPTGSESPFQGMGGEESQSPTVESEKSATPEPVTDNRDVEDMELSDVEDDGSKIIVEDRKEKPAEKSAVSTSVPTKP

SEQ ID NO: 753140 - protein, 404 aa, Homo sapiens
RGRSRAAAAAAAARGAAALVQTGKMAAGGGGGSSKASSSSASSAGALESSLDRKFQSVTNTMESIQGLSSWCIENKKHHSTIVYHWMKWLRRSAYPHRLNLFYLANDVIQNCKRKNAIIFRESFADVLPEAAALVKDPSVSKSVERIFKIWEDRNVYPEEMIVALREALTSTNPKAALKSKIVAEFRSQALIEELLLYKRSEDQIELKEKQLSTMRVDVCSTETLKCLKDKTGGKKFSKEFEEASSKLEEFVNGLDKQVKNGPSLTEALENAGIFYEAQYKEVKVVANAYKTFANRVNNLKKKLDQLKSTLPDPEESPVPSPSMDAPSPTGSESPFQGMGGEESQSPTVESEKSATPEPVTDNRDVEDMELSDVEDDGSKIIVEDRKEKPAEKSAVSTSVPTKP

SEQ ID NO: 753141 - protein, 411 aa, Homo sapiens
  misc_feature (410)..(410): Xaa can be any naturally occurring amino acid
MTATPPLPKPVNTSLSPSPALALPNLANVDLAKISSILSSLTSVMKNTGVSPASRPSPGTPTSPSNLTSGLKTPAPATTTSHNPLANILSKVEITPESILSALSKTQTQSAPALQGLSSLLQSVTGNPVPASEAASQSTSASPANTTVSTIKGRNLPPVPSLLFPKASTYSPNSSNSEVSSTFSQQGPNWAKPRAPKHLLLNYLQLFGVSSYPDNKPAAPPTEVTICQSSEVSKPKLESESNSPSLEMKIHNFLQGNPGFSGLNLNIPILSSLGVQRPIKRAIPQYFQRGLLALNRNIDGTPVKDERMGNQPGGDDDRPISKWILSPGDQRPIDRVLKNQGTEEHPVEKKDTKAPTDQIEPGGRIQKAPGRDNYRKAQTHQSQERHKRSATEEKDQEATAGRDDDTHHKXQ

SEQ ID NO: 753142 - protein, 430 aa, Homo sapiens; identical to SEQ ID NO: 753139

SEQ ID NO: 753143 - protein, 202 aa, Homo sapiens
RGRSRAAAAAAAARGAAALVQTGKMAAGGGGGSSKASSSSASSAGALESSLDRKFQSVTNTMESIQGLSSWCIENKKHHSTIVYHWMKWLRRSAYPHRLNLFYLANDVIQNCKRKNAIIFRESFADVLPEAAALVKDPSVSKSVERIFKIWEDRNVYPEEMIVALREALSTTFKTQKQLKENLNKQPNKQWKKSQSKEQNLN

SEQ ID NO: 753144 - protein, 185 aa, Homo sapiens
ITGVSSTWCRFHTLWGRALSGKEETRKIPVPANRYTPLKENWMKIFTPIVEHLGLQIRFNLKSRNVEIRTCKETKDVSALTKAADFVKAFILGFQVEDALALIRLDDLFLESFEITDVKPLKGDHLSRAIGRIAGKGGKTKFTIENVTRTRIVLADVKVHILAPSKYQMLHSIATKWERDPLDRP

SEQ ID NO: 753145 - protein, 252 aa, Homo sapiens
MESEMETQSARAEEGFTQVTRKGGRRAKKRQAEQLSAAGEGGDAGRMDTEEARPAKRPVFPPLCGDGLLSGKEETRKIPVPANRYTPLKENWMKIFTPIVEHLGLQIRFNLKSRNVEIRTCKETKDVSALTKAADFVKAFILGFQVEDALALIRLDDLFLESFEITDVKPLKGDHLSRAIGRIAGKGGKTKFTIENVTRTRIVLADVKVHILGSFQNIKMARTAICNLILGNPPSKVYGNIRAVASRSADRF

SEQ ID NO: 753146 - protein, 252 aa, Homo sapiens; identical to SEQ ID NO: 753145

SEQ ID NO: 753147 - protein, 252 aa, Homo sapiens; identical to SEQ ID NO: 753145

SEQ ID NO: 753148 - protein, 252 aa, Homo sapiens; identical to SEQ ID NO: 753145

SEQ ID NO: 753149 - protein, 69 aa, Homo sapiens
METQSARAEEGFTQVTRKGGRRAKKRQAEQLSYFYFWIGDVYFFFYYYYTLNSRVHVHNVQVTYVYMCH

SEQ ID NO: 753150 - protein, 252 aa, Homo sapiens; identical to SEQ ID NO: 753145

SEQ ID NO: 753151 - protein, 202 aa, Homo sapiens
ITGVSSTWCRFHTLWGRALSGKEETRKIPVPANRYTPLKENWMKIFTPIVEHLGLQIRFNLKSRNVEIRTCKETKDVSALTKAADFVKAFILGFQVEDALALIRLDDLFLESFEITDVKPLKGDHLSRAIGRIAGKGGKTKFTIENVTRTRIVLADVKVHILGSFQNIKMARTAICNLILGNPPSKVYGNIRAVASRSADRF

SEQ ID NO: 753152 - protein, 285 aa, Homo sapiens
MIPWVLLACALPCAADPLLGAFARRDFRKGSPQLVCSLPGPQGPPGPPGAPGPSGMMGRMGFPGKDGQDGHDGDRGDSGEEGPPGRTGNRGKPGPKGKAGAIGRAGPRGPKGVNGTPGKHGTPGKKGPKGKKGEPGLPGPCSCGSGHTKSAFSVAVTKSYPRERLPIKFDKILMNEGGHYNASSGKFVCGVPGIYYFTYDITLANKHLAIGLVHNGQYRIRTFDANTGNHDVASGSTILALKQGDEVWLQIFYSEQNGLFYDPYWTDSLFTGFLIYADQDDPNEV

SEQ ID NO: 753153 - protein, 216 aa, Homo sapiens
MIPWVLLACALPCAADPLLGAFARRDFRKGSPQLVCSLPGPQGPPGPPGAPGPSGMMGRMGFPGKDGQDGHDGDRGDSGEEAFSVAVTKSYPRERLPIKFDKILMNEGGHYNASSGKFVCGVPGIYYFTYDITLANKHLAIGLVHNGQYRIRTFDANTGNHDVASGSTILALKQGDEVWLQIFYSEQNGLFYDPYWTDSLFTGFLIYADQDDPNEV

SEQ ID NO: 753154 - protein, 182 aa, Homo sapiens
MGFPGKDGQDGHDAGKHGTPGKKGPKGKKGEPGLPGPCSCGSGHTKSAFSVAVTKSYPRERLPIKFDKILMNEGGHYNASSGKFVCGVPGIYYFTYDITLANKHLAIGLVHNGQYRIRTFDANTGNHDVASGSTILALKQGDEVWLQIFYSEQNGLFYDPYWTDSLFTGFLIYADQDDPNEV

SEQ ID NO: 753155 - protein, 91 aa, Homo sapiens
EQITRVECHQLRQEPAIFTSFVVLQLPQAIWMYSCRPGLRGLTETCTQRRELTSAKAHTSLNKIPVPPCWPPPSGGFCSVSHWLCDIISFL

SEQ ID NO: 753156 - protein, 201 aa, Homo sapiens
  misc_feature (3)..(3): Xaa can be any naturally occurring amino acid
WEXLSWAWPVCVRLLDLGTASRLGTGLGGGADLGLGGPGSRRRPRPQDPAGRTPSPASAARCSSAGRGQVPPSRLSSLLFSSSSTSVPAETPAAPFRRGVVICGADSSPAATLPEVSGSGTSSGRRSPGGPTVGPEEPALLPHPNLEHLTFGCWRGQARGWLDSCGAARASCLETVGCTPGLLALPLGSRGVHIRRMLTET

SEQ ID NO: 753157 - protein, 666 aa, Homo sapiens
MDVCVRLALWLLWGLLLHQGQSLSHSHSEKATGTSSGANSEESTAAEFCRIDKPLCHSEDEKLSFEAVRNIHKLMDDDANGDVDVEESDEFLREDLNYHDPTVKHSTFHGEDKLISVEDLWKAWKSSEVYNWTVDEVVQWLITYVELPQYEETFRKLQLSGHAMPRLAVTNTTMTGTVLKMTDRSHRQKLQLKALDTVLFGPPLLTRHNHLKDFMLVVSIVIGVGGCWFAYIQNRYSKEHMKKMMKDLEGLHRAEQSLHDLQERLHKAQEEHRTVEVEKVHLEKKLRDENERSRQKYAEEELEQVREALRKAEKELESHSSWYAPEALQKWLQLTHEVEVQYYNIKKQNAEKQLLVAKEGAEKIKKKRNTLFGTFHVAHSSSLDDVDHKILTAKQALSEVTAALRERLHRWQQIEILCGFQIVNNPGIHSLVAALNIDPSWMGSTRPNPAHFIMTDDVDDMDEEIVSPLSMQSPSLQSSVRQRLTEPQHGLGSQRDLTHSDSESSLHMSDRQRVAPKPPQMSRAADEALNAMTSNGSHRLIEGVHPGSLVEKLPDSPALAKKALLALNHGLDKAHSLMELSPSAPPGGSPHLDSSRSHSPSSPDPDTPSPVGDSRALQASRNTRIPHLAGKKAVAEEDNGSIGEETDSSPGRKKFPLKIFKKPLKK

SEQ ID NO: 753158 - protein, 522 aa, Homo sapiens
GVEDRFNPNRPEAAAQWHAMPRLAVTNTTMTGTVLKMTDRSHRQKLQLKALDTVLFGPPLLTRHNHLKDFMLVVSIVIGVGGCWFAYIQNRYSKEHMKKMMKDLEGLHRAEQSLHDLQERLHKAQEEHRTVEVEKVHLEKKLRDENERSRQKYAEEELEQVREALRKAEKELESHSSWYAPEALQKWLQLTHEVEVQYYNIKKQNAEKQLLVAKEGAEKIKKKRNTLFGTFHVAHSSSLDDVDHKILTAKQALSEVTAALRERLHRWQQIEILCGFQIVNNPGIHSLVAALNIDPSWMGSTRPNPAHFIMTDDVDDMDEEIVSPLSMQSPSLQSSVRQRLTEPQHGLGSQRDLTHSDSESSLHMSDRQRVAPKPPQMSRAADEALNAMTSNGSHRLIEGVHPGSLVEKLPDSPALAKKALLALNHGLDKAHSLMELSPSAPPGGSPHLDSSRSHSPSSPDPDTPSPVGDSRALQASRNTRIPHLAGKKAVAEEDNGSIGEETDSSPGRKKFPLKIFKKPLKK

SEQ ID NO: 753159 - protein, 245 aa, Homo sapiens
PLLSYTYGCSTSVYSSFLSPSHLPVHPISLSCRSIPIFLPCPCLLVLSLSPLRLSPITSSNICPFLPLCPMSCRDLTHSDSESSLHMSDRQRVAPKPPQMSRAADEALNAMTSNGSHRLIEGVHPGSLVEKLPDSPALAKKALLALNHGLDKAHSLMELSPSAPPGGSPHLDSSRSHSPSSPDPDTPSPVGDSRALQASRNTRIPHLAGKKAVAEEDNGSIGEETDSSPGRKKFPLKIFKKPLKK

SEQ ID NO: 753160 - protein, 685 aa, Homo sapiens
MDVCVRLALWLLWGLLLHQGQSLSHSHSEKATGTSSGANSEESTAAEFCRIDKPLCHSEDEKLSFEAVRNIHKLMDDDANGDVDVEESDEFLREDLNYHDPTVKHSTFHGEDKLISVEDLWKAWKSSEVYNWTVDEVVQWLITYVELPQYEETFRKLQLSGHAMPRLAVTNTTMTGTVLKMTDRSHRQKLQLKALDTVLFGPPLLTRHNHLKDFMLVVSIVIGVGGCWFAYIQNRYSKEHMKKMMKDLEGLHRAEQSLHDLQERLHKAQEEHRTVEVEKVHLEKKLRDEINLAKQEAQRLKELREGTENERSRQKYAEEELEQVREALRKAEKELESHSSWYAPEALQKWLQLTHEVEVQYYNIKKQNAEKQLLVAKEGAEKIKKKRNTLFGTFHVAHSSSLDDVDHKILTAKQALSEVTAALRERLHRWQQIEILCGFQIVNNPGIHSLVAALNIDPSWMGSTRPNPAHFIMTDDVDDMDEEIVSPLSMQSPSLQSSVRQRLTEPQHGLGSQRDLTHSDSESSLHMSDRQRVAPKPPQMSRAADEALNAMTSNGSHRLIEGVHPGSLVEKLPDSPALAKKALLALNHGLDKAHSLMELSPSAPPGGSPHLDSSRSHSPSSPDPDTPSPVGDSRALQASRNTRIPHLAGKKAVAEEDNGSIGEETDSSPGRKKFPLKIFKKPLKK

SEQ ID NO: 753161 - protein, 493 aa, Homo sapiens [sequence omitted]

SEQ ID NO: 753162 - protein, 83 aa, Homo sapiens
CSGVCKAKCAVGTLTHHALPSLAVTRHNHLKDFMLVVSIVIGVGGCWFAYIQNRYSKEHMKKMMKDLEGLHRAEQSLHDLQER

SEQ ID NO: 753163 - protein, 685 aa, Homo sapiens; identical to SEQ ID NO: 753160

SEQ ID NO: 753164 - protein, 685 aa, Homo sapiens; identical to SEQ ID NO: 753160

SEQ ID NO: 753165 - protein, 685 aa, Homo sapiens; identical to SEQ ID NO: 753160

SEQ ID NO: 753166 - protein, 685 aa, Homo sapiens; identical to SEQ ID NO: 753160

SEQ ID NO: 753167 - protein, 685 aa, Homo sapiens; identical to SEQ ID NO: 753160

SEQ ID NO: 753168 - protein, 76 aa, Homo sapiens
ELPTHGYKLRHQTQGRPRPPRTTPPGPGRPSMPAPGTRQENGMATRLDEGLEDFFSRRVMEESSSYPRTLRTVRPG

SEQ ID NO: 753169 - protein, 68 aa, Homo sapiens
ELPTHGYKLRHQTQGRPRPPRTTPPGPGRPSMPAPGTRQENGMATRLDEGLEDFFSRRVMEESSRCDA

SEQ ID NO: 753170 - protein, 338 aa, Homo sapiens
AYSRCGLPRVTAGMKPILLQGHERSITQIKYNREGDLLFTVAKDPIVNVWYSVNGERLGTYMGHTGAVWCVDADWDTKHVLTGSADNSCRLWDCETGKQLALLKTNSAVRTCGFDFGGNIIMFSTDKQMGYQCFVSFFDLRDPSQIDNNEPYMKIPCNDSKITSAVWGPLGECIIAGHESGELNQYSAKSGEVLVNVKEHSRQINDIQLSRDMTMFVTASKDNTAKLFDSTTLEHQKTFRTERPVNSAALSPNYDHVVLGGGQEAMDVTTTSTRIGKFEARFFHLAFEEEFGRVKGHFGPINSVAFHPDGKSYSSGGEDGYVRIHYFDPQYFEFEFEA

SEQ ID NO: 753171 - protein, 83 aa, Homo sapiens
GQAFLADHLPLWLQPLWLLPPQLLLLLLLPCLRYSSLPDSSLPFPLLRSSPSLTGQLTFCLHHKALSLFKKHIQLTALSASRS

SEQ ID NO: 753172 - protein, 360 aa, Homo sapiens
MPKFKQRRRKLKAKAERLFKKKEASHFQSKLITPPPPPPSPERVGISSIDISQSRSWLTSSWNFNFPNIRDAIKLWTNRVWSIYSWCQNCITQSLEVLKDTIFPSRICHRELYSVKQQFCILESKLCKLQEALKTISESSSCPSCGQTCHMSGKLTNVPACVLITPGDSKAVLPPTLPQPASHFPPPPPPPPLPPPPPPLAPVLLRKPSLAKALQAGPLKKDGPMQITVKDLLTVKLKKTQSLDEKRKLIPSPKARNPLVTVSDLQHVTLKPNSKVLSTRVTNVLITPGKSQMDLRKLLRKVDVERSPGGTPLTNKENMETGTGLTPVMTQALRRKFQLAHPRSPTPTLPLSTSSFDEQN

SEQ ID NO: 753173 - protein, 360 aa, Homo sapiens; identical to SEQ ID NO: 753172

SEQ ID NO: 753174 - protein, 360 aa, Homo sapiens; identical to SEQ ID NO: 753172

SEQ ID NO: 753175 - protein, 360 aa, Homo sapiens; identical to SEQ ID NO: 753172

SEQ ID NO: 753176 - protein, 360 aa, Homo sapiens; identical to SEQ ID NO: 753172

SEQ ID NO: 753177 - protein, 360 aa, Homo sapiens; identical to SEQ ID NO: 753172

SEQ ID NO: 753178 - protein, 369 aa, Homo sapiens
MPKFKQRRRKLKAKAERLFKKKEASHFQSKLITPPPPPPSPERVGISSIDISQSRSWLTSSWNFNFPNIRDAIKLWTNRVWSIYSWCQNCITQSLEVLKDTIFPSRICHRELYSVKQQFCILESKLCKLQEALKTISESSSCPSCGQTCHMSGKLTNVPACVLITPGDSKAVLPPTLPQPASHFPPPPPPPPLPPPPPPLAPVLLRKPSLAKALQAGPLKKDGPMQITVKDLLTVKLKKTQSLDEKRKLIPSPKARNPLVTVSDLQHVTLKPNSKVLSTRVTNVLITPGKSQMDLRKLLRKVDVERSPGGTPLTNKENMETGTGLTPVMTQALRRKFQLAHPRSPTPTTATPAWVTEQETLSQKKKKKN

SEQ ID NO: 753179 - protein, 360 aa, Homo sapiens; identical to SEQ ID NO: 753172

SEQ ID NO: 753180 - protein, 312 aa, Homo sapiens
MPKFKQRRRKLKAKAERLFKKKEASHFQSKLITPPPPPPSPERVGISSIDISQSRSWLTSSWNFNFPNIRDAIKLWTNRVWSIYSWCQNCITQSLEVLKDTIFPSRICHRELYSVKQQFCILESKLCKLQEALKTISESSSCPSCGQTCHMSGKLTNVPACVLITPGDSKAVLPPTLPQPASHFPPPPPPPPLPPPPPPLAPVLLRKPSLAKALQAGPLKKDGPMQITVKDLLTVKLKKTQSLDEKRKLIPSPKARNPLVTVSDLQHVTLKPNSKVLSTRVTNVLITPGKSQMDLRGRELVEGRLVEGRLVE

SEQ ID NO: 753181 - protein, 360 aa, Homo sapiens; identical to SEQ ID NO: 753172

SEQ ID NO: 753182 - protein, 377 aa, Homo sapiens
RATARTPSTPPALETKIMPKFKQRRRKLKAKAERLFKKKEASHFQSKLITPPPPPPSPERVGISSIDISQSRSWLTSSWNFNFPNIRDAIKLWTNRVWSIYSWCQNCITQSLEVLKDTIFPSRICHRELYSVKQQFCILESKLCKLQEALKTISESSSCPSCGQTCHMSGKLTNVPACVLITPGDSKAVLPPTLPQPASHFPPPPPPPPLPPPPPPLAPVLLRKPSLAKALQAGPLKKDGPMQITVKDLLTVKLKKTQSLDEKRKLIPSPKARNPLVTVSDLQHVTLKPNSKVLSTRVTNVLITPGKSQMDLRKLLRKVDVERSPGGTPLTNKENMETGTGLTPVMTQALRRKFQLAHPRSPTPTLPLSTSSFDEQN

SEQ ID NO: 753183 - protein, 360 aa, Homo sapiens; identical to SEQ ID NO: 753172

SEQ ID NO: 753184 - protein, 360 aa, Homo sapiens; identical to SEQ ID NO: 753172

SEQ ID NO: 753185 - protein, 350 aa, Homo sapiens
MPKFKQRRRKLKAKAERLFKKKEASHFQSKLITPPPPPPSPERVGISSIDISQSRSWLTSSWNFNFPNIRDAIKLWTNRVWSIYSWCQNCITQSLEVLKDTIFPSRICHRELYSVKQQFCILESKLCKLQEALKTISESSSCPSCGQTCHMSGKLTNVPACVLITPGDSKAVLPPTLPQPASHFPPPPPPPPLPPPPPPLAPVLLRKPSLAKALQAGPLKKDGPMQITVKDLLTVKLKKTQSLDEKRKLIPSPKARNPLVTVSDLQHVTLKPNSKVLSTRVTNVLITPGKSQMDLRKLLRKVDVERSPGGTPLTNKENMETGTGLTPVMTQALRRKFQLPGSSNSPASAS

SEQ ID NO: 753186 - protein, 286 aa, Homo sapiens [sequence omitted]

SEQ ID NO: 753187 - protein, 141 aa, Homo sapiens
MHILLFGLDAAGKMTILYKLKLGEIVTTIPTTGFNVETVEYKNTCFTVRDVGGQDRIRPLWKHYFQNTQGLIFVVDSNDRGRIQEVADELQKMLLVDELRDAVLLLFANKQDLPNDMAVSEMTDAAENLETTFFDTRPDPA

SEQ ID NO: 753188 - protein, 117 aa, Homo sapiens
MPWLGARVIAGTSVSSVVIAVSALRVLGPVLVKTDLVGDADDGGGCEWWGWELQTLHCSFFFFETQFHFCCPGQSATVRSQLTANSTSQVQAILLPQPPEVLGLQAYATTPGSKRVL

SEQ ID NO: 753189 - protein, 70 aa, Homo sapiens
GNNALEPMPAALLQAAHTVPSLKELSHMGYRDEGLGGNKSRCALRPHAPAPKPRLALSFSLCCSAFVRLL

SEQ ID NO: 753190 - protein, 756 aa, Homo sapiens
MHLKIVLAFLALSLITIFALAYVLLTSPGGSSQPPHCPSVSHRAQPWPHPGQSQLFADLSREELTAVMRFLTQRLGPGLVDAAQAQPSDNCIFSVELQLPPKAAALAHLDRGSPPPAREALAIVLFGGQPQPNVSELVVGPLPHPSYMRDVTVERHGGPLPYHRRPVLRAEFTQMWRHLKDVELPKAPIFLSSTFNYNGSTLAAVHATPRGLRSRERTTWMALYHNISGVGLFLHPVGLELLLDHRALDPAHWTVQQVFYLGHYYADLGQLEREFKSGRLEVVRVPLPPPNGASSLRSRNSPGPLPPLQFSPQGSQYSVQGNLVVSSLWSFTFGHGVFSGLRIFDVRFQGERIAYEVSVQECVSIYGADSPKTMLTRYLDSSFGLGRNSRGLVRGVDCPYQATMVDIHILVGKGAVQLLPGAVCVFEEAQGLPLRRHHNYLQNHFYGGLASSALVVRSVSSVGNYDYIWDFVLYPNGALEGRVHATGYINTAFLKGGEEGLLFGNRVGERVLGTVHTHAFHFKLDLDVAGLKNWVVAEDVVFKPVAAPWNPEHWLQRPQLTRQVLGKEDLTAFSLGSPLPRYLYLASNQTNAWGHQRGYRIQIHSPLGIHIPLESDMERALSWGRYQLVVTQRKEEESQSSSIYHQNDIWTPTVTFADFINNETLLGEDLVAWVTASFLHIPHAEDIPNTVTLGNRVGFLLRPYNFFDEDPSIFSPGSVYFEKGQDAGLCSINPVACLPDLAACVPDLPPFSYHGF

SEQ ID NO: 753191 - protein, 43 aa, Homo sapiens
PRDLTWCGTHLLSLPLAGLKNWVVAEDVVFKPVAAPWNPEHWL

SEQ ID NO: 753192 - protein, 729 aa, Homo sapiens [sequence omitted]

SEQ ID NO: 753193 - protein, 726 aa, Homo sapiens
MEGERKNNNKRWYFTREQLENSPSRRFGVDPDKELSYRQQAANLLQDMGQRLNVSQLTINTAIVYMHRFYMIQSFTQFPGNSVAPAALFLAAKVEEQPKKLEHVIKVAHTCLHPQESLPDTRSEAYLQQVQDLVILESIILQTLGFELTIDHPHTHVVKCTQLVRASKDLAQTSYFMATNSLHLTTFSLQYTPPVVACVCIHLACKWSNWEIPVSTDGKHWWEYVDATVTLELLDELTHEFLQILEKTPNRLKRIWNWRACEAAKKTKADDRGTDEKTSEQTILNMISQSSSDTTIAGLMSMSTSTTSAVPSLPVSEESSSNLTSVEMLPGKRWLSSQPSFKLEPTQGHRTSENLALTGVDHSLPQDGSNAFISQKQNSKSVPSAKVSLKEYRAKHAEELAAQKRQLENMEANVKSQYAYAAQNLLSHHDSHSSVILKMPIEGSENPERPFLEKADKTALKMRIPVAGGDKAASSKPEEIKMRIKVHAAADKHNSVEDSVTKSREHKEKHKTHPSNHHHHHNHHSHKHSHSQLPVGTGNKRPGDPKHSSQTSNLAHKTYSLSSSFSSSSSTRKRGPSEETGGAVFDHPAKIAKSTKSSSLNFSFPSLPTMGQMPGHSSDTSGLSFSQPSCKTRVPHSKLDKGPTGANGHNTTQTIDYQDTVNMLHSLLSAQGVQPTQPTAFEFVRPYSDYLNPRSGGISSRSGNTDKPRPPPLPSEPPPPLPPLPK

SEQ ID NO: 753194 - protein, 127 aa, Homo sapiens
MEGERKNNNKRWYFTREQLENSPSRRFGVDPDKELSYRQQAANLLQDMGQRLNVSQLTINTAIVYMHRFYMIQSFTQFPGNSVAPAALFLAAKVEEQPKKLEHVIKVAHTCLHPQESLPDTRSEVGD

SEQ ID NO: 753195 - protein, 726 aa, Homo sapiens; identical to SEQ ID NO: 753193

SEQ ID NO: 753196 - protein, 153 aa, Homo sapiens
SVEMLPGKRWLSSQPSFKLEPTQGHRTSENLALTGVDHSLPQDGSNAFISQKQNSKSVPSAKVSLKEYRAKHAEELAAQKRQLENMEANVKSQYAYAAQNLLSHHDSHSSVILKMPIEGSENPERPFLEKADKTALKMRIPVAGGDKAASSKP

SEQ ID NO: 753197 - protein, 519 aa, Homo sapiens
KHSDKIGETAMKQAQHQKTFSVSLQKQNKMKFGKNMYINRDRIPEERNETVLKHSLEEEDENEEEILTVQDLVDFSPVYRCLHIYSVLGDEETFENYYRKQRKKQARLVLQPQSNMHETVDGYRRYFTQIVGFFVVEDHILHVTQGLVTRAYTDELWNMALSKIIAVLRAHSSYCTDPDLVLELKNLTVIFADTLQGYGFPVNRLFDLLFEIRDQYNETLLKKWAGVFRDIFEEDNYSPIPVVNEEEYKIVISKFPFQDPDLEKQSFPKKFPMSQSVPHIYIQVKEFIYASLKFSESLHRSSTEIDDMLRKSTNLLLTRTLSSCLLNLIRKPHIGLTELVQIIINTTHLEQACKYLEDFITNITNISQETVHTTRLYGLSTFKDARHAAEGEIYTKLNQKIDEFVQLADYDWTMSEPDGRASGYLMDLINFLRSIFQVFTHLPGKVAQTACMSACQHLSTSLMQMLLDSELKQISMGAVQQFNLDVIQCEYEVLLCCPDWSQTPGLKSSSCLGIPKCWN

SEQ ID NO: 753198 - protein, 519 aa, Homo sapiens; identical to SEQ ID NO: 753197

SEQ ID NO: 753199 - protein, 166 aa, Homo sapiens
QPSSLCLEWGKKKGKVAQTACMSACQHLSTSLMQMLLDSELKQISMGAVQQFNLDVIQCELFASSEPVPGFQGDTLQLAFIDLRQLLDLFMVWDWSTYLADYGQPASKYLRVNPNTALTLLEKMKDTSKKNNIFAQFRKNDRDKQKLIETVVKQLRSLVNGMSQHM

SEQ ID NO: 753200 - protein, 596 aa, Homo sapiens
KHSDKIGETAMKQAQHQKTFSVSLQKQNKMKFGKNMYINRDRIPEERNETVLKHSLEEEDENEEEILTVQDLVDFSPVYRCLHIYSVLGDEETFENYYRKQRKKQARLVLQPQSNMHETVDGYRRYFTQIVGFFVVEDHILHVTQGLVTRAYTDELWNMALSKIIAVLRAHSSYCTDPDLVLELKNLTVIFADTLQGYGFPVNRLFDLLFEIRDQYNETLLKKWAGVFRDIFEEDNYSPIPVVNEEEYKIVISKFPFQDPDLEKQSFPKKFPMSQSVPHIYIQVKEFIYASLKFSESLHRSSTEIDDMLRKSTNLLLTRTLSSCLLNLIRKPHIGLTELVQIIINTTHLEQACKYLEDFITNITNISQETVHTTRLYGLSTFKDARHAAEGEIYTKLNQKIDEFVQLADYDWTMSEPDGRASGYLMDLINFLRSIFQVFTHLPGKVAQTACMSACQHLSTSLMQMLLDSELKQISMGAVQQFNLDVIQCELFASSEPVPGFQGDTLQLAFIDLRQLLDLFMVWDWSTYLADYGQPASKYLRVNPNTALTLLEKMKDTSKKNNIFAQFRKNDRDKQKLIETVVKQLRSLVNGMSQHM

SEQ ID NO: 753201 - protein, 166 aa, Homo sapiens
  misc_feature (3)..(3): Xaa can be any naturally occurring amino acid
WSXPEVWDHAAMSGKVAQTACMSACQHLSTSLMQMLLDSELKQISMGAVQQFNLDVIQCELFASSEPVPGFQGDTLQLAFIDLRQLLDLFMVWDWSTYLADYGQPASKYLRVNPNTALTLLEKMKDTSKKNNIFAQFRKNDRDKQKLIETVVKQLRSLVNGMSQHM

SEQ ID NO: 753202 - protein, 209 aa, Homo sapiens
PEGQQALVGSGVSPTRVSFASLASDESSLETSPPDSSQRPSARPASPGSDAEKRKKRRVLFSKAQTLELERRFRQQRYLSAPEREQLASLLRLTPTQVKIWFQNHRYKLKRARAPGAAESPDLAASAELHAAPGLLRRVVVPVLVRDGQPCGGGGGGEVGTAAAQEKCGAPPAAACPLPGYPAFGPGSALGLFPAYQHLASPALVSWNW

SEQ ID NO: 753203 - protein, 305 aa, Homo sapiens
WRPGPRLSKRLGGKSCLYKQRFRCKCANIPAASAWRAPPTPIRRSGVPAAPPFPACPAPASFPSSAMATSGRLSFTVRSLLGLPEQDAQHLPRREPEPRAPQPDPCAAWLDSERGHYPSSDESSLETSPPDSSQRPSARPASPGSDAEKRKKRRVLFSKAQTLELERRFRQQRYLSAPEREQLASLLRLTPTQVKIWFQNHRYKLKRARAPGAAESPDLAASAELHAAPGLLRRVVVPVLVRDGQPCGGGGGGEVGTAAAQEKCGAPPAAACPLPGYPAFGPGSALGLFPAYQHLASPALVSWNW

SEQ ID NO: 753204 - protein, 101 aa, Homo sapiens
QTPLVLSELGRARGECQLLPCLRPTGPGVRHHPDEERLRDGGPGLRLEPPCLVSWPHQLICCGTVSRPLSRVRQVVEKLNGADNLENTRWIAETFFVPRPY

SEQ ID NO: 753205 - protein, 165 aa, Homo sapiens
YFWMYFSGWFIKSSNEATNITPKHNMKAFLDELKAENIKKFLYNFTQIPHLAGTEQNFQLAKQIQSQWKEFGLDSVELAHYDVLLSYPNKTHPNYISIINEDGNEVSTHHYLNHLLQDMKMFRILYHLSVLSLLKECQRAIYVYVNYARTEDFFKLERDMKINVD

SEQ ID NO: 753206 - protein, 176 aa, Homo sapiens
WRVASFSSASSSVKSQLQGLMTAGSSYPLFLAAYACTGCLAERLGWFIKSSNEATNITPKHNMKAFLDELKAENIKKFLYNFTQIPHLAGTEQNFQLAKQIQSQWKEFGLDSVELAHYDVLLSYPNKTHPNYISIINEDGNEVSTHHYLNHLLQDMKMFRILYHLSVLSLLKECQR

SEQ ID NO: 753207 - protein, 129 aa, Homo sapiens [sequence omitted]

SEQ ID NO: 753208 - protein, 111 aa, Homo sapiens
METAAAAAPGPGWAAEGERRRRRCSRRDRDREQRRRRGPGGDAPRALLAAPRGSSSSSSPPPPARPWSSASSGERPGGPRRRRPRPRPRPPRPRARKRPAGSGSRGEEEEE

SEQ ID NO: 753209 - protein, 562 aa, Homo sapiens
PPAAAPGTPHLLSKTPPLLQVPGHPGASAANALSEQDLIGQDLNSRYLNAQGGPEVVGAGGSARPLAFQFHQHNHQHQHTHQHTHQHFTPYPPGLLPPHGPHMFEKYPGKMEGLFRHNPYTAFPPAVPGLPPGLPPAVSFGSLQGAFQPKSTNPELPPRLGPVPSGLSQKGTQIPDHFRPPLRKPGKWCAMHVRVAYMILRHQEKMKGDSHKLDFRNDLLPCLPGPYGALPPGQELSHPASLFTATGAVHAAANPFTAAPGAHGPFLSPSTHIDPFGRPTSFASLAALSNGAFGGLGSPTFNSGAVFAQKESPGAPPAFASPPDPWGRLHRSPLTFPAWVRPPEAARTPGSDKERPVERREPSITKEEKDRDLPFSRPQLRVSPATPKARAGEEGPRPTKESVRVKEERKEEAAAAAAAAAAAAAAAAAAATGPQGLHLLFERPRPPPFLGPSPPDRCAGFLEPTWLAAPPRLARPPRFYEAGEELTGPGAVAAARLYGLEPAHPLLYSRLAPPPPPAAAPGTPHLLSKTPPGALLGAPPPLVPAPRPSSPPRGPGPARADR

SEQ ID NO: 753210 - protein, 134 aa, Homo sapiens
MEPGNRSLNPHKTKHHMECRVTGRAEVTASREGRGACAWECGSSRGPWGLLRYTFAPVRASRPWACLPKGSLSQRPKCPLPFTYHPSPHALRGLGEEGLKEGGFHVHIYHPFHIAPRPFVHFYRGAPPNSSLPG

SEQ ID NO: 753211 - protein, 589 aa, Homo sapiens
PPAAAPGTPHLLSKTPPLLQVPGHPGASAANALSEQDLIGQDLNSRYLNAQGGPEVVGAGGSARPLAFQFHQHNHQHQHTHQHTHQHFTPYPPGLLPPHGPHMFEKYPGKMEGLFRHNPYTAFPPAVPGLPPGLPPAVSFGSLQGAFQPKSTNPELPPRLGPVPSGLSQKGTQIPDHFRPPLRKPGKWCAMHVRVAYMILRHQEKMKGDSHKLDFRNDLLPCLPGPYGALPPGQELSHPASLFTATGAVHAAANPFTAAPGAHGPFLSPSTHIDPFGRPTSFASLAALSNGAFGGLGSPTFNSGAVFAQKESPGAPPAFASPPDPWGRLHRSPLTFPAWVRPPEAARTPGSDKERPVERREPSITKEEKDRDLPFSRPQLRVSPATPKARAGEEGPRPTKESVRVKEERKEEAAAAAAAAAAAAAAAAAAATGPQGLHLLFERPRPPPFLGPSPPDRCAGFLEPTWLAAPPRLARPPRFYEAGEELTGPGAVAAARLYGLEPAHPLLYSRLAPPPPPAAAPGTPHLLSKTFCTFLQGCPSQQFPSWLIKPSDWCCVPSLWPLCGERGLQGEEPGRDSQASPWEGGASRR

SEQ ID NO: 753212 - protein, 562 aa, Homo sapiens; identical to SEQ ID NO: 753209

SEQ ID NO: 753213 - protein, 562 aa, Homo sapiens; identical to SEQ ID NO: 753209

SEQ ID NO: 753214 - protein, 255 aa, Homo sapiens
PPAAAPGTPHLLSKTPPLLQVPGHPGASAANALSEQDLIGQDLNSRYLNAQGGPEVVGAGGSARPLAFQFHQHNHQHQHTHQHTHQHFTPYPPGLLPPHGPHMFEKYPGKMEGLFRHNPYTAFPPAVPGLPPGLPPAVSFGSLQGAFQPKSTNPELPPRLGPVPSGLSQKGTQIPDHFRPPLRKPGKWCAMHVRVAYMILRHQEKMKGDSHKLDFRNDLLPCLPGPYGALPPGQELSHPASLFTATGESGQPPRA

SEQ ID NO: 753215 - protein, 118 aa, Homo sapiens
TKVPAIELFSSDGGQERMFLAKILLSSVEGQCPELQSSPDSETHSPQPSGPSTFIFSQCLRHVGGEWMLWRCEAPGPGLGSESPPISPLPSPDPRPFPATFEGELCEDLRLHEAGGWC

SEQ ID NO: 753216 - protein, 481 aa, Homo sapiens
TKVPAIELFSSDGGQERMFLAKILLSSVEGQCPELSPPLTLRPTLPSPPAPVPSFSPSVSGMLGVSGCCGDARRLAQDSGLSRLPSLLCHPQIPDHFRPPLRKPGKWCAMHVRVAYMILRHQEKMKGDSHKLDFRNDLLPCLPGPYGALPPGQELSHPASLFTATGAVHAAANPFTAAPGAHGPFLSPSTHIDPFGRPTSFASLAALSNGAFGGLGSPTFNSGAVFAQKESPGAPPAFASPPDPWGRLHRSPLTFPAWVRPPEAARTPGSDKERPVERREPSITKEEKDRDLPFSRPQLRVSPATPKARAGEEGPRPTKESVRVKEERKEEAAAAAAAAAAAAAAAAAAATGPQGLHLLFERPRPPPFLGPSPPDRCAGFLEPTWLAAPPRLARPPRFYEAGEELTGPGAVAAARLYGLEPAHPLLYSRLAPPPPPAAAPGTPHLLSKTPPGALLGAPPPLVPAPRPSSPPRGPGPARADR

SEQ ID NO: 753217 - protein, 134 aa, Homo sapiens; identical to SEQ ID NO: 753210

SEQ ID NO: 753218 - protein, 531 aa, Homo sapiens
PPAAAPGTPHLLSKTPPLLQVPGHPGASAANALSEQDLIGQDLNSRYLNAQGGPEVVGAGGSARPLAFQFHQHNHQHQHTHQHTHQHFTPYPPGLLPPHGPHMFEKYPGKMEGLFRHNPYTAFPPAVPGLPPGLPPAVSFGSLQGAFQPKSTNPELPPRLGPVPSGLSQKGTQIPDHFRPPLRKPGKWCAMHVRVAYMILRHQEKMKGDSHKLDFRNDLLPCLPGPYGALPPGQELSHPASLFTATGAVHAAANPFTAAPGAHGPFLSPSTHIDPFGRPTSFASLAALSNGAFGGLGSPTFNSGAVFAQKESPGAPPAFASPPDPWGRLHRSPLTFPAWVRPPEAARTPGSDKERPVERREPSITKEEKDRDLPFSRPQLRVSPATPKARAGEEGPRPTKESVRVKEERKEEAAAAAAAAAAAAAAAAAAATGPQGLHLLFERPRPPPFLGPSPPDRCAGFLEPTWLAAPPRLARPPRFYEAGEELTGPGAVAAARLYGLEPAHPLLYSRLAPPPPPAAAPGTPHLLSCTQ

SEQ ID NO: 753219 - protein, 449 aa, Homo sapiens
PPAAAPGTPHLLSKTPPLLQVPGHPGASAANALSEQDLIGQDLNSRYLNAQGGPEVVGAGGSARPLAFQFHQHNHQHQHTHQHTHQHFTPYPPGLLPPHGPHMFEKYPGKMEGLFRHNPYTAFPPAVPGLPPGLPPAVSFGSLQGAFQPKSTNPELPPRLGPVPSGLSQKGTQIPDHFRPPLRKPGKWCAMHVRVAYMILRHQEKMKGDSHKLDFRNDLLPCLPGPYGALPPGQELSHPASLFTATGAVHAAANPFTAAPGAHGPFLSPSTHIDPFGRPTSFASLAALSNGAFGGLGSPTFNSGAVFAQKESPGAPPAFASPPDPWGRLHRSPLTFPAWVRPPEAARTPGSDKERPVERREPSITKEEKDRDLPFSRPQLRVSPATPKARAGEEGPRPTKESVRVKEERKEEAAAAAAAAAAAAAAAAAAATGPQGLHLLFERPRPPPT

SEQ ID NO: 753220 - protein, 68 aa, Homo sapiens
LSLKPRLVPVTRCVMVASSALSGVGVGWSGPGQPSHLCLHSCHHRASPVLLFHFLLSVCLRLLPEDIG

SEQ ID NO: 753221 - protein, 574 aa, Homo sapiens [sequence omitted]

SEQ ID NO: 753222 - protein, 103 aa, Homo sapiens
MRPLPLLSLFKGGKRAWKRTRPGKEPEGGWAEPEQPALLPRPGPAGRQDSREGCGLQLIPSQGNCLTLHDFSFIPLIEQSEMQVHQGGRHTSLFCRQEFQTLS

SEQ ID NO: 753223 - protein, 169 aa, Homo sapiens
SFHYNSAELTSPVNMSYNCCSGNFSSRSCGDYLRYPASSRGFSYPSNLVYSTDLCSPSTCQLGSSLYRGCQEICWEPTSCQTSYVESKPLPRPPATAPEPPCSAVLARRLTLGSLGFGSSSCRSLGYGSRKLLLSGLWVQWCQIPGLWKLWLPFPRLWIWILPPNLLGF

SEQ ID NO: 753224 - protein, 1272 aa, Homo sapiens
QTYFNKLKKITKTVQQRYWAMKERNIQFQRYNKLRHSVIYIQAIFRGKKARRHLKMMHIAATLIQRRFRTLMMRRRFLSLKKTAILIQRKYRAHLCTKHHLQFLQVQNAVIKIQSSYRRWMIRKRMREMHRAATFIQSTFRMHRLHMRYQALKQASVVIQQQYQANRAAKLQRQHYLRQRHSAVILQAAFRGMKTRRHLKSMHSSATLIQSRFRSLLVRRRFISLKKATIFVQRKYRATICAKHKLYQFLHLRKAAITIQSSYRRLMVKKKLQEMQRAAVLIQATFRMHRTYITFQTWKHASILIQQHYRTYRAAKLQRENYIRQWHSAVVIQAAYKGMKARQLLREKHKASIVIQSTYRMYRQYCFYQKLQWATKIIQEKYRANKKKQKVFQHNELKKETCVQAGFQDMNIKKQIQEQHQAAIIIQKHCKAFKIRKHYLHIRATVVSIQRRYRKLTAVRTQAVICIQSYYRGFKVRKDIQNMHRAATLIQSFYRMHRAKVDYETKKTAIVVIQNYYRLYVRVKTERKNFLAVQKSVRTIQAAFRGMKVRQKLKNVSEEKMAAIVNQSALCCYRSKTQYEAVQSEGVMIQEWYKASGLACSQEAEYHSQSRAAVTIQKAFCRMVTRKLETQKCAALRIQFFLQMAVYRRRFVQQKRAAITLQHYFRTWQTRKQFLLYRKAAVVLQNHYRAFLSAKHQRQVYLQIRSSVIIIQARSKGFIQKRKFQEIKNSTIKIQAMWRRYRAKKYLCKVKAACKIQAWYRCWRAHKEYLAILKAVKIIQGCFYTKLERTRFLNVRASAIIIQRKWRAILPAKIAHEHFLMIKRHRAACLIQAHYRGYKGRQVFLRQKSAALIIQKYIRAREAGKHERIKYIEFKKSTVILQALVRGWLVRKRFLEQRAKIRLLHFTAAAYYHLNAVRIQRAYKLYLAVKNANKQVNSVICIQRWFRARLQEKRFIQKYHSIKKIEHEGQECLSQRNRAASVIQKAVRHFLLRKKQEKFTSGIIKIQALWRGYSWRKKNDCTKIKAIRLSLQVVNREIREENKLYKRTALALHYLLTYKHLSAILEALKHLEVVTRLSPLCCENMAQSGAISKIFVLIRSCNRSIPCMEVIRYAVQVLLNVSKYEKTTSAVYDVENCIDILLELLQIYREKPGNKVADKGGSIFTKTCCLLAILLKTTNRASDVRSRSKVVDRIYSLYKLTAHKHKMNTERILYKQKKNSSISIPFIPETPVRTRIVSRLKPDWVLRRDNMEEITNPLQAIQMVMDTLGIPY

SEQ ID NO: 753225 - protein, 1272 aa, Homo sapiens; identical to SEQ ID NO: 753224

SEQ ID NO: 753226 - protein, 1151 aa, Homo sapiens
  misc_feature (8)..(8): Xaa can be any naturally occurring amino acid
  misc_feature (12)..(12): Xaa can be any naturally occurring amino acid
  misc_feature (17)..(17): Xaa can be any naturally occurring amino acid
  misc_feature (19)..(19): Xaa can be any naturally occurring amino acid
MIFVPTDXFGRXNTAYXFXRGLVLHMRYQALKQASVVIQQQYQANRAAKLQRQHYLRQRHSAVILQAAFRGMKTRRHLKSMHSSATLIQSRFRSLLVRRRFISLKKATIFVQRKYRATICAKHKLYQFLHLRKAAITIQSSYRRLMVKKKLQEMQRAAVLIQATFRMHRTYITFQTWKHASILIQQHYRTYRAAKLQRENYIRQWHSAVVIQAAYKGMKARQLLREKHKASIVIQSTYRMYRQYCFYQKLQWATKIIQEKYRANKKKQKVFQHNELKKETCVQAGFQDMNIKKQIQEQHQAAIIIQKHCKAFKIRKHYLHIRATVVSIQRRYRKLTAVRTQAVICIQSYYRGFKVRKDIQNMHRAATLIQSFYRMHRAKVDYETKKTAIVVIQNYYRLYVRVKTERKNFLAVQKSVRTIQAAFRGMKVRQKLKNVSEEKMAAIVNQSALCCYRSKTQYEAVQSEGVMIQEWYKASGLACSQEAEYHSQSRAAVTIQKAFCRMVTRKLETQKCAALRIQFFLQMAVYRRRFVQQKRAAITLQHYFRTWQTRKQFLLYRKAAVVLQNHYRAFLSAKHQRQVYLQIRSSVIIIQARSKGFIQKRKFQEIKNSTIKIQAMWRRYRAKKYLCKVKAACKIQAWYRCWRAHKEYLAILKAVKIIQGCFYTKLERTRFLNVRASAIIIQRKWRAILPAKIAHEHFLMIKRHRAACLIQAHYRGYKGRQVFLRQKSAALIIQKYIRAREAGKHERIKYIEFKKSTVILQALVRGWLVRKRFLEQRAKIRLLHFTAAAYYHLNAVRIQRAYKLYLAVKNANKQVNSVICIQRWFRARLQEKRFIQKYHSIKKIEHEGQECLSQRNRAASVIQKAVRHFLLRKKQEKFTSGIIKIQALWRGYSWRKKNDCTKIKAIRLSLQVVNREIREENKLYKRTALALHYLLTYKHLSAILEALKHLEVVTRLSPLCCENMAQSGAISKIFVLIRSCNRSIPCMEVIRYAVQVLLNVSKYEKTTSAVYDVENCIDILLELLQIYREKPGNKVADKGGSIFTKTCCLLAILLKTTNRASDVRSRSKVVDRIYSLYKLTAHKHKMNTERILYKQKKNSSISIPFIPETPVRTRIVSRLKPDWVLRRDNMEEITNPLQAIQMVMDTLGIPY

SEQ ID NO: 753227 - protein, 1222 aa, Homo sapiens
QTYFNKLKKITKTVQQRYWAMKERNIQFQRYNKLRHSVIYIQAIFRGKKARRHLKMMHIAATLIQRRFRTLMMRRRFLSLKKTAILIQRKYRAHLCTKHHLQFLQVQNAVIKIQSSYRRWMIRKRMREMHRAATFIQSTFRMHRLHMRYQALKQASVVIQQQYQANRAAKLQRQHYLRQRHSAVILQAAFRGMKTRRHLKSMHSSATLIQSRFRSLLVRRRFISLKKATIFVQRKYRATICAKHKLYQFLHLRKAAITIQSSYRRLMVKKKLQEMQRAAVLIQATFRMHRTYITFQTWKHASILIQQHYRTYRAAKLQRENYIRQWHSAVVIQAAYKGMKARQLLREKHKASIVIQSTYRMYRQYCFYQKLQWATKIIQEKYRANKKKQKVFQHNELKKETCVQAGFQDMNIKKQIQEQHQAAIIIQKHCKAFKIRKHYLHIRATVVSIQRRYRKLTAVRTQAVICIQSYYRGFKVRKDIQNMHRAATLIQSFYRMHRAKVDYETKKTAIVVIQNYYRLYVRVKTERKNFLAVQKSVRTIQAAFRGMKVRQKLKNVSEEKMAAIVNQSALCCYRSKTQYEAVQSEGVMIQEWYKASGLACSQEAEYHSQSRAAVTIQKAFCRMVTRKLETQKCAALRIQFFLQMAVYRRRFVQQKRAAITLQHYFRTWQTRKQFLLYRKAAVVLQNHYRAFLSAKHQRQVYLQIRSSVIIIQARSKGFIQKRKFQEIKNSTIKIQAMWRRYRAKKYLCKVKAACKIQAWYRCWRAHKEYLAILKAVKIIQGCFYTKLERTRFLNVRASAIIIQRKWRAILPAKIAHEHFLMIKRHRAACLIQAHYRGYKGRQVFLRQKSAALIIQKYIRAREAGKHERIKYIEFKKSTVILQALVRGWLVRKRRWFRARLQEKRFIQKYHSIKKIEHEGQECLSQRNRAASVIQKAVRHFLLRKKQEKFTSGIIKIQALWRGYSWRKKNDCTKIKAIRLSLQVVNREIREENKLYKRTALALHYLLTYKHLSAILEALKHLEVVTRLSPLCCENMAQSGAISKIFVLIRSCNRSIPCMEVIRYAVQVLLNVSKYEKTTSAVYDVENCIDILLELLQIYREKPGNKVADKGGSIFTKTCCLLAILLKTTNRASDVRSRSKVVDRIYSLYKLTAHKHKMNTERILYKQKKNSSISIPFIPETPVRTRIVSRLKPDWVLRRDNMEEITNPLQAIQMVMDTLGIPY

SEQ ID NO: 753228 - protein, 1272 aa, Homo sapiens; identical to SEQ ID NO: 753224

SEQ ID NO: 753229 - protein, 327 aa, Homo sapiens [sequence omitted]

SEQ ID NO: 753230 - protein, 67 aa, Homo sapiens
LLSGAQLLQGGAVAGESAVRSASSVSGAQLLPGGDGHGFHQQRLALRAGRVHGWPEPISASCLALAA

SEQ ID NO: 753231 - protein, 281 aa, Homo sapiens
MLGPQVWSSVRQGLSRSLSRNVGVWASGEGKKVDIAGIYPPVTTPFTATAEVDYGKLEENLHKLGTFPFRGFVVQGSNGEFPFLTSSERLEVVSRVRQAMPKNRLLLAGSGCESTQATVEMTVSMAQVGADAAMVVTPCYYRGRMSSAALIHHYTKVADLSPIPVVLYSVPANTGLDLPVDAVVTLSQHPNIVGMKDSGGDVTRIGLIVHKTRKQDFQVLAGSAGFLMASYALGAVGGVCALANVLGAQVCQLERLCCTGQWEDAQKLQHRLIEPNAAKIL

SEQ ID NO: 753232 - protein, 164 aa, Homo sapiens
MLGPQVWSSVRQGLSRSLSRNVGVWASGEGKKVDIAGIYPPVTTPFTATAEVDYGKLEENLHKLGTFPFRGAVGGVCALANVLGAQVCQLERLCCTGQWEDAQKLQHRLIEPNAAVTRRFGIPGLKKIMDWFGYYGGPCRAPLQELSPAEEEALRMDFTSNGWL

SEQ ID NO: 753233 - protein, 327 aa, Homo sapiens [sequence omitted]

SEQ ID NO: 753234 - protein, 92 aa, Homo sapiens
GGVCALANVLGAQVCQLERLCCTGQWEDAQKLQHRLIEPNAAVSQWQRGRGLAGGGQSVSSLEQDPGLAPGPTQSLPFRKSFERTSQCGNSL

SEQ ID NO: 753235 - protein, 178 aa, Homo sapiens
LTISSLFSRLFGKKQMRILMVGLDAAGKTTILYKLKLGEIVTTIPTIGFNVETVEYKNICFTVWDVGGQDRIRPLWKHYFQNTQGLIFVVDSNDRERIQEVADELQKMLLVDELRDAVLLLFANKQDLPNAMAISEMTDKLGLQSLRNRTWYVQATCATQGTGLYEGLDWLSNELSKR

SEQ ID NO: 753236 - protein, 142 aa, Homo sapiens
VSLKFVDKTRSEINKNIVGFSPRYWGMVWRWVQDRIRPLWKHYFQNTQGLIFVVDSNDRERIQEVADELQKMLLVDELRDAVLLLFANKQDLPNAMAISEMTDKLGLQSLRNRTWYVQATCATQGTGLYEGLDWLSNELSKR

SEQ ID NO: 753237 - protein, 655 aa, Homo sapiens
MVLYTTPFPNSCLSALHCVSWALIFPCYWLVDRLAASFIPTTYEKRQRADDPCCLQLLCTALFTPIYLALLVASLPFAFLGFLFWSPLQSARRPYIYSRLEDKGLAGGAALLSEWKGTGPGKSFCFATANVCLLPDSLARVNNLFNTQARAKEIGQRIRNGAARPQIKIYIDSPTNTSISAASFSSLVSPQGGDGVARAVPGSIKRTASVEYKGDGGRHPGDEAANGPASGDPVDSSSPEDACIVRIGGEEGGRPPEADDPVPGGQARNGAGGGPRGQTPNHNQQDGDSGSLGSPSASRESLVKGRAGPDTSASGEPGANSKLLYKASVVKKAAARRRRHPDEAFDHEVSAFFPANLDFLCLQEVFDKRAATKLKEQLHGYFEYILYDVGVYGCQGCCSFKCLNSGLLFASRYPIMDVAYHCYPNKCNDDALASKGALFLKVQVGSTPQDQRIVGYIACTHLHAPQEDSAIRCGQLDLLQDWLADFRKSTSSSSAANPEELVAFDVVCGDFNFDNCSSDDKLEQQHSLFTHYRDPCRLGPGEEKPWAIGTLLDTNGLYDEDVCTPDNLQKVLESEEGRREYLAFPTSKSSGQKGRKELLKGNGRRIDYMLHAEEGLCPDWKAEVEEFSFITQLSGLTDHLPVAMRLMVSSGEEEA

SEQ ID NO: 753238 - protein, 655 aa, Homo sapiens; identical to SEQ ID NO: 753237

SEQ ID NO: 753239 - protein, 655 aa, Homo sapiens; identical to SEQ ID NO: 753237

SEQ ID NO: 753240 - protein, 133 aa, Homo sapiens
MPREPPPLRPPPDLRPGARAVRSREERGALPGADRPPARRQRSAVTALLQREGQQGPSGPSSAPTSQAALGKSFSVITRSPLPSQVLASRVRMCGPQAPAHLPQHQDRDPPTHVSHCGCLWTPGPCVQARPFH

SEQ ID NO: 753241 - protein, 88 aa, Homo sapiens
FRVVCWPPRGCRPPRPVLGVPSLHPVCSPGSALLLSPWLRALVLTPRARVRLRVLYERASPPMGRPLLSPKPWVVRFSCRPPLGGGIL

SEQ ID NO: 753242 - protein, 655 aa, Homo sapiens; identical to SEQ ID NO: 753237

SEQ ID NO: 753243 - protein, 655 aa, Homo sapiens; identical to SEQ ID NO: 753237

SEQ ID NO: 753244 - protein, 686 aa, Homo sapiens
  misc_feature (655)..(655): Xaa can be any naturally occurring amino acid
  misc_feature (657)..(657): Xaa can be any naturally occurring amino acid
MVLYTTPFPNSCLSALHCVSWALIFPCYWLVDRLAASFIPTTYEKRQRADDPCCLQLLCTALFTPIYLALLVASLPFAFLGFLFWSPLQSARRPYIYSRLEDKGLAGGAALLSEWKGTGPGKSFCFATANVCLLPDSLARVNNLFNTQARAKEIGQRIRNGAARPQIKIYIDSPTNTSISAASFSSLVSPQGGDGVARAVPGSIKRTASVEYKGDGGRHPGDEAANGPASGDPVDSSSPEDACIVRIGGEEGGRPPEADDPVPGGQARNGAGGGPRGQTPNHNQQDGDSGSLGSPSASRESLVKGRAGPDTSASGEPGANSKLLYKASVVKKAAARRRRHPDEAFDHEVSAFFPANLDFLCLQEVFDKRAATKLKEQLHGYFEYILYDVGVYGCQGCCSFKCLNSGLLFASRYPIMDVAYHCYPNKCNDDALASKGALFLKVQVGSTPQDQRIVGYIACTHLHAPQEDSAIRCGQLDLLQDWLADFRKSTSSSSAANPEELVAFDVVCGDFNFDNCSSDDKLEQQHSLFTHYRDPCRLGPGEEKPWAIGTLLDTNGLYDEDVCTPDNLQKVLESEEGRREYLAFPTSKSSGQKGRKELLKGNGRRIDYMLHAEEGLCPDWKAEVEEFSFITQLSGLTDHLPVAMRLMVSSGEEEXYXERCIVVYDIILMFIIKILGFLYFIVCYVD

SEQ ID NO: 753245 - protein, 135 aa, Homo sapiens
LSMLASSKTVYTLFIIPQMLSSFVTQTQPISLAGCTTQTFFFVTLAINNCFLLTVMGYDHYMAICNPLRYRVITSKKVCVQLVCGAFSIGLAMAAVQVTSIFTLPFCHTVVGHFFCDILPVMKLSCINTTINEII

SEQ ID NO: 753246 - protein, 58 aa, Homo sapiens
MDCLLPGETPASSGSQILCRLRCWRQSRGKRGMRVFPKSPDTLPGPLSHPHTVPTIPT

SEQ ID NO: 753247 - protein, 660 aa, Homo sapiens
MGLQTTKWPSHGAFFLKSWLIISLGLYSQVSKLLACPSVCRCDRNFVYCNERSLTSVPLGIPEGVTVLYLHNNQINNAGFPAELHNVQSVHTVYLYGNQLDEFPMNLPKNVRVLHLQENNIQTISRAALAQLLKLEELHLDDNSISTVGVEDGAFREAISLKLLFLSKNHLSSVPVGLPVDLQELRVDENRIAVISDMAFQNLTSLERLIVDGNLLTNKGIAEGTFSHLTKLKEFSIVRNSLSHPPPDLPGTHLIRLYLQDNQINHIPLTAFSNLRKLERLDISNNQLRMLTQGVFDNLSNLKQLTARNNPWFCDCSIKWVTEWLKYIPSSLNVRGFMCQGPEQVRGMAVRELNMNLLSCPTTTPGLPLFTPAPSTASPTTQPPTLSIPNPSRSYTPPTPTTSKLPTIPDWDGRERVTPPISERIQLSIHFVNDTSIQVSWLSLFTVMAYKLTWVKMGHSLVGGIVQERIVSGEKQHLSLVNLEPRSTYRICLVPLDAFNYRAVEDTICSEATTHASYLNNGSNTASSHEQTTSHSMGSPFLLAGLIGGAVIFVLVVLLSVFCWHMHKKGRYTSQKWKYNRGRRKDDYCEAGTKKDNSILEMTETSFQIVSLNNDQLLKGDFRLQPIYTPNGGINYTDCHIPNNMRYCNSSVPDLEHCHT

SEQ ID NO: 753248 - protein, 642 aa, Homo sapiens
MGLQTTKWPSHGAFFLKSWLIISLGLYSQVSKLLACPSVCRCDRNFVYCNERSLTSVPLGIPEGVTVLYLHNNQINNAGFPAELHNVQSVHTVYLYGNQLDEFPMNLPKNVRVLHLQENNIQTISRAALAQLLKLEELHLDDNSISTVGVEDGAFREAISLKLLFLSKNHLSSVPVGLPVDLQELRVDENRIAVISDMAFQNLTSLERLIVDGNLLTNKGIAEGTFSHLTKLKEFSIVRNSLSHPPPDLPGTHLIRLYLQDNQINHIPLTAFSNLRKLERLDISNNQLRMLTQGVCDCSIKWVTEWLKYIPSSLNVRGFMCQGPEQVRGMAVRELNMNLLSCPTTTPGLPLFTPAPSTASPTTQPPTLSIPNPSRSYTPPTPTTSKLPTIPDWDGRERVTPPISERIQLSIHFVNDTSIQVSWLSLFTVMAYKLTWVKMGHSLVGGIVQERIVSGEKQHLSLVNLEPRSTYRICLVPLDAFNYRAVEDTICSEATTHASYLNNGSNTASSHEQTTSHSMGSPFLLAGLIGGAVIFVLVVLLSVFCWHMHKKGRYTSQKWKYNRGRRKDDYCEAGTKKDNSILEMTETSFQIVSLNNDQLLKGDFRLQPIYTPNGGINYTDCHIPNNMRYCNSSVPDLEHCHT

SEQ ID NO: 753249 - protein, 73 aa, Homo sapiens
NPDDKDETTFIFIQKDFFLLKFQYQINTFQTLISKSISPTVVNSGQRNTDLQKIQYLNLAEHLASLVLPERRT

SEQ ID NO: 753250 - protein, 128 aa, Homo sapiens
MEMKSYQKINHFPGMSEICRKDLLARNMSRMLKMFPKDFRFFPRTWCLPADWGDLQTYSRSRKNKTYICKPDSGCQGKGIFITRTVKEIKPGEDMICQLYISKPFIIDGFKFDLRIYVLVTSCDPLRI

SEQ ID NO: 753251 - protein, 133 aa, Homo sapiens
  misc_feature (1)..(1): Xaa can be any naturally occurring amino acid
XTQRSSRCCTMSVSVLSPSRLLGDVSGILQAASLLILLLLLIKAVQLYLHRQWLLKALQQFPCPPSHWLFGHIQELQQDQELQRIQKWVETFPSACPPLAYGEAKFVSSSMTLPACLPVSYPPVSLVGSTLEG

SEQ ID NO: 753252 - protein, 367 aa, Homo sapiens
MIRNWLTIFILFPLKLVEKCESSVSLTVPPVVKLENGSSTNVSLTLRPPLNATLVITFEITFRSKNITILELPDEVVVPPGVTNSSFQVTSQNVGQLTVYLHGNHSNQTGPRIRFLVIRSSAISIINQVIGWIYFVAWSISFYPQVIMNWRRKSVIGLSFDFVALNLTGFVAYSVFNIGLLWVPYIKEQFLLKYPNGVNPVNSNDVFFSLHAVVLTLIIIVQCCLYERGGQRVSWPAIGFLVLAWLFAFVTMIVAAVGVITWLQFLFCFSYIKLAVTLVKYFPQAYMNFYYKSTEGWSIGNVLLDFTGGSFSLLQMFLQSYNNDQWTLIFGDPTKFGLGVFSIVFDVVFFIQHFCLYRKRPGYDQLN

SEQ ID NO: 753253 - protein, 367 aa, Homo sapiens; identical to SEQ ID NO: 753252

SEQ ID NO: 753254 - protein, 367 aa, Homo sapiens; identical to SEQ ID NO: 753252

SEQ ID NO: 753255 - protein, 367 aa, Homo sapiens; identical to SEQ ID NO: 753252

SEQ ID NO: 753256 - protein, 367 aa, Homo sapiens; identical to SEQ ID NO: 753252

SEQ ID NO: 753257 - protein, 400 aa, Homo sapiens
MIRNWLTIFILFPLKLVEKCESSVSLTVPPVVKLENGSSTNVSLTLRPPLNATLVITFEITFRSKNITILELPDEVVVPPGVTNSSFQVTSQNVGQLTVYLHGNHSNQTGPRIRFLVIRSSAISIINQVIGWIYFVAWSISFYPQVIMNWRRKSVIGLSFDFVALNLTGFVAYSVFNIGLLWVPYIKEQFLLKYPNGVNPVNSNDVFFSLHAVVLTLIIIVQCCLYERGGQRVSWPAIGFLVLAWLFAFVTMIVAAVGVITWLQFLFCFSYIKLAVTLVKYFPQAYMNFYYKSTEGWSIGNVLLDFTGGSFSLLQMFLQSYNNDQWTLIFGDPTKFGLGVFSIVFDVVFFIQHFCLYRKRPGLQAARTGSGSRLRQDWAPSLQPKALPQTTSVSASSLKG

SEQ ID NO: 753258 - protein, 220 aa, Homo sapiens
MNWRRKSVIGLSFDFVALNLTGFVAYSVFNIGLLWVPYIKEQFLLKYPNGVNPVNSNDVFFSLHAVVLTLIIIVQCCLYERGGQRVSWPAIGFLVLAWLFAFVTMIVAAVGVITWLQFLFCFSYIKLAVTLVKYFPQAYMNFYYKSTEGWSIGNVLLDFTGGSFSLLQMFLQSYNNDQWTLIFGDPTKFGLGVFSIVFDVVFFIQHFCLYRKRPGYDQLN

SEQ ID NO: 753259 - protein, 116 aa, Homo sapiens [sequence omitted]

SEQ ID NO: 753260 - protein, 367 aa, Homo sapiens
MIRNWLTIFILFPLKLVEKCESSVSLTVPPVVKLENGSSTNVSLTLRPPLNATLVITFEITFRSKNITILELPDEVVVPPGVTNSSFQVTSQNVGQLTVYLHGNHSNQTGPRIRFLVIRSSAISIINQVIGWIYFVAWSISFYPQVIMNWRRKSVIGLSFDFVALNLTGFVAYSVFNIGLLWVPYIKEQFLLKYPNGVNPVNSNDVFFSLHAVVLTLIIIVQCCLYERGGQRVSWPAIGFLVLAWLFAFVTMIVAAVGVITWLQFLFCFSYIKLAVTLVKYFPQAYMNFYYKSTEGWSIGNVLLDFTGGSFSLLQMFLQSYNNDQWTLIFGDPTKFGLGVFSIVLSVHNSASVTAVTASPTQSISEP

SEQ ID NO: 753261 - protein, 112 aa, Homo sapiens
PHSRAQRKTDPRLSRSCTHRAQGLLAARTTALQRSPLQQEIWESTTALNLPSALAPQGLTAKDAHFLGDTDPIQEGARDHAAGGPFQDRQASVAAQTLSWERGQENTPLVEI

SEQ ID NO: 753262 - protein, 141 aa, Homo sapiens
MAEKPHQNSCNSVRQLFKTKQLVTHRDRGAQGLLAARTTALQRSPLQQEIWESTTALVFQAGNSLNAHSLRLSCMELNLPSALAPQGLTAKDAHFLGDTDPIQEGARDHAAGGPFQDRQASVAAQTLSWERGQENTPLVEI

SEQ ID NO: 753263 - protein, 104 aa, Homo sapiens
GSRISKYQLSQLSYSSTFDLPHSHLTLLYQISPQGLQEFSFISCCCSNQGKNLKPRMRFARGSKIWPRLSRHFLKSTTTPHTPGAINYEIQNQGKARPCISLLP

SEQ ID NO: 753264 - protein, 347 aa, Homo sapiens
MPRREVCWEAAHFRQEEQSLPRPRVRALVRLACRMAGQPGHMPHGGSSNNLCHTLGPVHPPDPQRHPNTLSFRCSLADFQIEKKIGRGQFSEVYKATCLLDRKTVALKKVQIFEMMDAKARQDCVKEIGLLKQLNHPNIIKYLDSFIEDNELNIVLELADAGDLSQMIKYFKKQKRLIPERTVWKYFVQLCSAVEHMHSRRVMHRDIKPANVFITATGVVKLGDLGLGRFFSSETTAAHSLVGTPYYMSPERIHENGYNFKSDIWSLGCLLYEMAALQSPFYGDKMNLFSLCQKIEQCDYPPLPGEHYSEKLRELVSMCICPDPHQRPDIGYVHQVAKQMHIWMSST

SEQ ID NO: 753265 - protein, 331 aa, Homo sapiens
MGRRRPAPFRALVRLACRMAGQPGHMPHGGSSNNLCHTLGPVHPPDPQRHPNTLSFRCSLADFQIEKKIGRGQFSEVYKATCLLDRKTVALKKVQIFEMMDAKARQDCVKEIGLLKQLNHPNIIKYLDSFIEDNELNIVLELADAGDLSQMIKYFKKQKRLIPERTVWKYFVQLCSAVEHMHSRRVMHRDIKPANVFITATGVVKLGDLGLGRFFSSETTAAHSLVGTPYYMSPERIHENGYNFKSDIWSLGCLLYEMAALQSPFYGDKMNLFSLCQKIEQCDYPPLPGEHYSEKLRELVSMCICPDPHQRPDIGYVHQVAKQMHIWMSST

SEQ ID NO: 753266 - protein, 375 aa, Homo sapiens
GRAGPRRRWRRRRNRADGRAAAAPQTRVGRTAPAARGPAHRSPSGSRARPRAVRALVRLACRMAGQPGHMPHGGSSNNLCHTLGPVHPPDPQRHPNTLSFRCSLADFQIEKKIGRGQFSEVYKATCLLDRKTVALKKVQIFEMMDAKARQDCVKEIGLLKQLNHPNIIKYLDSFIEDNELNIVLELADAGDLSQMIKYFKKQKRLIPERTVWKYFVQLCSAVEHMHSRRVMHRDIKPANVFITATGVVKLGDLGLGRFFSSETTAAHSLVGTPYYMSPERIHENGYNFKSDIWSLGCLLYEMAALQSPFYGDKMNLFSLCQKIEQCDYPPLPGEHYSEKLRELVSMCICPDPHQRPDIGYVHQVAKQMHIWMSST

SEQ ID NO: 753267 - protein, 375 aa, Homo sapiens; identical to SEQ ID NO: 753266

SEQ ID NO: 753268 - protein, 359 aa, Homo sapiens
QPREATQLPGGPGTSCLPSTQSGADLPWSFSGATSKVRALVRLACRMAGQPGHMPHGGSSNNLCHTLGPVHPPDPQRHPNTLSFRCSLADFQIEKKIGRGQFSEVYKATCLLDRKTVALKKVQIFEMMDAKARQDCVKEIGLLKQLNHPNIIKYLDSFIEDNELNIVLELADAGDLSQMIKYFKKQKRLIPERTVWKYFVQLCSAVEHMHSRRVMHRDIKPANVFITATGVVKLGDLGLGRFFSSETTAAHSLVGTPYYMSPERIHENGYNFKSDIWSLGCLLYEMAALQSPFYGDKMNLFSLCQKIEQCDYPPLPGEHYSEKLRELVSMCICPDPHQRPDIGYVHQVAKQMHIWMSST

SEQ ID NO: 753269 - protein, 313 aa, Homo sapiens
MAGQPGHMPHGGSSNNLCHTLGPVHPPDPQRHPNTLSFRCSLADFQIEKKIGRGQFSEVYKATCLLDRKTVALKKVQIFEMMDAKARQDCVKEIGLLKQLNHPNIIKYLDSFIEDNELNIVLELADAGDLSQMIKYFKKQKRLIPERTVWKYFVQLCSAVEHMHSRRVMHRDIKPANVFITATGVVKLGDLGLGRFFSSETTAAHSLVGTPYYMSPERIHENGYNFKSDIWSLGCLLYEMAALQSPFYGDKMNLFSLCQKIEQCDYPPLPGEHYSEKLRELVSMCICPDPHQRPDIGYVHQVAKQMHIWMSST

SEQ ID NO: 753270 - protein, 337 aa, Homo sapiens
GCACAPRSVWWRCWVRALVRLACRMAGQPGHMPHGGSSNNLCHTLGPVHPPDPQRHPNTLSFRCSLADFQIEKKIGRGQFSEVYKATCLLDRKTVALKKVQIFEMMDAKARQDCVKEIGLLKQLNHPNIIKYLDSFIEDNELNIVLELADAGDLSQMIKYFKKQKRLIPERTVWKYFVQLCSAVEHMHSRRVMHRDIKPANVFITATGVVKLGDLGLGRFFSSETTAAHSLVGTPYYMSPERIHENGYNFKSDIWSLGCLLYEMAALQSPFYGDKMNLFSLCQKIEQCDYPPLPGEHYSEKLRELVSMCICPDPHQRPDIGYVHQVAKQMHIWMSST

SEQ ID NO: 753271 - protein, 313 aa, Homo sapiens; identical to SEQ ID NO: 753269

SEQ ID NO: 753272 - protein, 375 aa, Homo sapiens; identical to SEQ ID NO: 753266

SEQ ID NO: 753273 - protein, 73 aa, Homo sapiens
GARARAGGGGGGGTELTGVRPLRRKLVWDAPLQPPAGQRTGPPAAAEPARAPVSRLGLGPGRWGPAARRRAGA

SEQ ID NO: 753274 - protein, 375 aa, Homo sapiens; identical to SEQ ID NO: 753266

SEQ ID NO: 753275 - protein, 375 aa, Homo sapiens; identical to SEQ ID NO: 753266

SEQ ID NO: 753276 - protein, 375 aa, Homo sapiens; identical to SEQ ID NO: 753266

SEQ ID NO: 753277 - protein, 331 aa, Homo sapiens; identical to SEQ ID NO: 753265

SEQ ID NO: 753278 - protein, 76 aa, Homo sapiens
  misc_feature (1)..(1): Xaa can be any naturally occurring amino acid
  misc_feature (21)..(21): Xaa can be any naturally occurring amino acid
  misc_feature (37)..(37): Xaa can be any naturally occurring amino acid
  misc_feature (41)..(42): Xaa can be any naturally occurring amino acid
  misc_feature (57)..(57): Xaa can be any naturally occurring amino acid
  misc_feature (67)..(68): Xaa can be any naturally occurring amino acid
  misc_feature (72)..(72): Xaa can be any naturally occurring amino acid
  misc_feature (76)..(76): Xaa can be any naturally occurring amino acid
XGVGASVLAVWSLYFLFWTWXFIEDLSFLPSCWRYIXIGKXXWQGSEDDIRLSSQNXDAIAPCIIRXXRDLXRREX

SEQ ID NO: 753279 - protein, 317 aa, Homo sapiens
MWLYLAAFVGLYYLLHWYRERQVVSHLQDKYVFITGCDSGFGNLLARQLDARGLRVLAACLTEKGAEQLRGQTSDRLETVTLDVTKMESIAAATQWVKEHVGDRGLWGLVNNAGILTPITLCEWLNTEDSMNMLKVNLIGVIQVTLSMLPLVRRARGRIVNVSSILGRVAFFVGGYCVSKYGVEAFSDILRREIQHFGVKISIVEPGYFRTGMTNMTQSLERMKQSWKEAPKHIKETYGQQYFDALYNIMKEGLLNCSTNLNLVTDCMEHALTSVHPRTRYSAGWDAKFFFIPLSYLPTSLADYILTRSWPKPAQAV

SEQ ID NO: 753280 - protein, 317 aa, Homo sapiens; identical to SEQ ID NO: 753279

SEQ ID NO: 753281 - protein, 288 aa, Homo sapiens
MWLYLAAFVGLYYLLHWYRERQVVSHLQDKYVFITGCDSGFGNLLARQLDARGLRVLAACLTEKGAEQLRGQTSDRLETVTLDVTKMESIAAATQWVKEHVGDRGLWGLVNNAGILTPITLCEWLNTEDSMNMLKVNLIGVIQVTLSMLPLVRRARGRIVNVSSILGRVAFFVGGYCVSKYGVEAFSDILRREIQHFGVKISIVEPGYFRTGMTNMTQSLERMKQSWKEAPKHIKETYGQQYFDALYNIMKEGLLNCSTNLNLVFKNTGKSRTIGEYRELDIPADGEW

SEQ ID NO: 753282 - protein, 108 aa, Homo sapiens
MWLYLAAFVGLYYLLHWYRERQVVSHLQDKYVFITGCDSGFGNLLARQLDARGLRVLAACLTEKGAEQLRGQTSDRLETVTLDVTKMESIAAATQWVKEHVGDRGHSP

SEQ ID NO: 753283 - protein, 145 aa, Homo sapiens
IGSSKLGKIKMNGMLVVISREIQHFGVKISIVEPGYFRTGMTNMTQSLERMKQSWKEAPKHIKETYGQQYFDALYNIMKEGLLNCSTNLNLVTDCMEHALTSVHPRTRYSAGWDAKFFFIPLSYLPTSLADYILTRSWPKPAQAV

SEQ ID NO: 753284 - protein, 105 aa, Homo sapiens
MTNMTQSLERMKQSWKEAPKHIKETYGQQYFDALYNIMKEGLLNCSTNLNLVTDCMEHALTSVHPRTRYSAGWDAKFFFIPLSYLPTSLADYILTRSWPKPAQAV

SEQ ID NO: 753285 - protein, 259 aa, Homo sapiens
MWLYLAAFVGLYYLLHWYRERQVVSHLQDKYVFITGCDSGFGNLLARQLDARGLRVLAACLTEKGAEQLRGQTSDRLETVTLDVTKMESIAAATQWVKEHVGDRGLWGLVNNAGILTPITLCEWLNTEDSMNMLKVNLIGVIQVTLSMLPLVRRARGRIVNVSSILGRVAFFVGGYCVSKYGVEAFSDILRREIQHFGVKISIVEPGYFRTGMTNMTQSLERMKQSWKEAPKHIKETYGQQYFDARDRSFVGVGFVNFL

SEQ ID NO: 753286 - protein, 217 aa, Homo sapiens
MWLYLAAFVGLYYLLHWYRERQVVSHLQDKYVFITGCDSGFGNLLARQLDARGLRVLAACLTEKGAEQLRGQTSDRLETVTLDVTKMESIAAATQWVKEHVGDRGLWGLVNNAGILTPITLCEWLNTEDSMNMLKVNLIGVIQVTLSMLPLVRRARGRIVNVSSILGRVAFFVGGYCVSKYGVEAFSDILRREIQHFGVDTVLRANEAKLERSPQAY

SEQ ID NO: 753287 - protein, 137 aa, Homo sapiens
RAEFGTRDILRREIQHFGVKISIVEPGYFRTGMTNMTQSLERMKQSWKEAPKHIKETYGQQYFDALYNIMKEGLLNCSTNLNLVTDCMEHALTSVHPRTRYSAGWDAKFFFIPLSYLPTSLADYILTRSWPKPAQAV

SEQ ID NO: 753288 - protein, 187 aa, Homo sapiens
NTVLSGVTTMYPGIPNRMQKEITALAPSTMKIKIIAPPERKYSVWIGGSILASLSTFQQMWISKQEYDESGPSIVHRKCFYTDSGGVHTTESYDYSYGNTLTCGSPEGVGGPPEEAWAQLGELLFSASATHFYDDSRGNMQNRLRLTTQGPGHNLNHTGRSTPCTCPGTCSSRPDLTLPSELPQQRD

SEQ ID NO: 753289 - protein, 80 aa, Homo sapiens
NTVLSGVTTMYPGIPNRMQKEITALAPSTMKIKIIAPPERKYSVWIGGSILASLSTFQQMWISKQEYDESGPSIVHRKCF

SEQ ID NO: 753290 - protein, 101 aa, Homo sapiens
LEELFAAVPKVAHLAHSPLRLWSPPGKALIPCRYFSGECGFHPGLGASLLTHSAPRILVPCPLAQLLPARKQVFGLPEKPCPSCCLLPVPPVPSGTERDFV

SEQ ID NO: 753291 - protein, 96 aa, Homo sapiens
PQPRVAAMNPEYDYLFKLLLIGDSGVGKSCLLLRFADDTYTESYISTIGVDFKIRTIELDGKTIKLQIWDTAGQERFRTITSSYYRGCVPWGGDPQ

SEQ ID NO: 753292 - protein, 250 aa, Homo sapiens
PGISAARPEKKTFAPARRGRGLWGGAATILEREAEQSRLGATERAAAAAMNPEYDYLFKLLLIGDSGVGKSCLLLRFADDTYTESYISTIGVDFKIRTIELDGKTIKLQIWDTAGQERFRTITSSYYRGAHGIIVVYDVTDQESYANVKQWLQEIDRYASENVNKLLVGNKSDLTTKKVVDNTTAKEFADSLGIPFLETSAKNATNVEQAFMTMAAEIKKRMGPGAASGGERPNLKIDSTPVKPAGGGCC

SEQ ID NO: 753293 - protein, 201 aa, Homo sapiens
MNPEYDYLFKLLLIGDSGVGKSCLLLRFADDTYTESYISTIGVDFKIRTIELDGKTIKLQIWDTAGQERFRTITSSYYRGAHGIIVVYDVTDQESYANVKQWLQEIDRYASENVNKLLVGNKSDLTTKKVVDNTTAKEFADSLGIPFLETSAKNATNVEQAFMTMAAEIKKRMGPGAASGGERPNLKIDSTPVKPAGGGCC

SEQ ID NO: 753294 - protein, 232 aa, Homo sapiens
SKRPNTSNKRRKKNAMIAGVLWDDERAARVRMNPEYDYLFKLLLIGDSGVGKSCLLLRFADDTYTESYISTIGVDFKIRTIELDGKTIKLQIWDTAGQERFRTITSSYYRGAHGIIVVYDVTDQESYANVKQWLQEIDRYASENVNKLLVGNKSDLTTKKVVDNTTAKEFADSLGIPFLETSAKNATNVEQAFMTMAAEIKKRMGPGAASGGERPNLKIDSTPVKPAGGGCC

SEQ ID NO: 753295 - protein, 201 aa, Homo sapiens; identical to SEQ ID NO: 753293

SEQ ID NO: 753296 - protein, 250 aa, Homo sapiens; identical to SEQ ID NO: 753292

SEQ ID NO: 753297 - protein, 250 aa, Homo sapiens; identical to SEQ ID NO: 753292

SEQ ID NO: 753298 - protein, 134 aa, Homo sapiens
SEVIYEDPELSLLGLMLIVVYDVTDQESYANVKQWLQEIDRYASENVNKLLVGNKSDLTTKKVVDNTTAKEFADSLGIPFLETSAKNATNVEQAFMTMAAEIKKRMGPGAASGGERPNLKIDSTPVKPAGGGCC

SEQ ID NO: 753299 - protein, 169 aa, Homo sapiens
MNPEYDYLFKLLLIGDSGVGKSCLLLRFADDTYTESYISTIGVDFKIRTIELDGKTIKLQIESYANVKQWLQEIDRYASENVNKLLVGNKSDLTTKKVVDNTTAKEFADSLGIPFLETSAKNATNVEQAFMTMAAEIKKRMGPGAASGGERPNLKIDSTPVKPAGGGCC

SEQ ID NO: 753300 - protein, 286 aa, Homo sapiens
PGISAARPEKKTFAPARRGRGLWGGAATILEREAEQSRLGATERAAAAAMNPEYDYLFKLLLIGDSGVGKSCLLLRFADDTYTESYISTIGVDFKIRTIELDGKTIKLQIWDTAGQERFRTITSSYYRGAHGIIVVYDVTDQESYANVKQWLQEIDRYASENVNKLLVGNKSDLTTKKVVDNTTAKVADGPVCPGSGRWGLLPLTCSPLLFSPLLFSPLPCQEFADSLGIPFLETSAKNATNVEQAFMTMAAEIKKRMGPGAASGGERPNLKIDSTPVKPAGGGCC

SEQ ID NO: 753301 - protein, 173 aa, Homo sapiens [sequence omitted]

SEQ ID NO: 753302 - protein, 173 aa, Homo sapiens [sequence omitted]

SEQ ID NO: 753303 - protein, 148 aa, Homo sapiens
PGISAARPEKKTFAPARRGRGLWGGAATILEREAEQSRLGATERAAAAAMNPEYDYLFKLLLIGDSGVGKSCLLLRFADDTYTESYISTIGVDFKIRTIELDGKTIKLQIWDTAGQERFRTITSSYYRGVALGCPGLPISFWPICLLP

SEQ ID NO: 753304 - protein, 138 aa, Homo sapiens
PGISAARPEKKTFAPARRGRGLWGGAATILEREAEQSRLGATERAAAAAMNPEYDYLFKLLLIGDSGVGKSCLLLRFADDTYTESYISTIGVDFKIRTIELDGKTIKLQIWDTAGQERFRTITSSYYRGPAAVGSEYI

SEQ ID NO: 753305 - protein, 250 aa, Homo sapiens; identical to SEQ ID NO: 753292

SEQ ID NO: 753306 - protein, 98 aa, Homo sapiens
GGADGPEALNGPEALNGPEALNGPEALMAPQGSTSGSLPTPSLEPTREGPHPLPLLLWGMWVPSRIGGLSAHPLCTQDPSPLPSGTAASCKKASLWSP

SEQ ID NO: 753307 - protein, 295 aa, Homo sapiens
PGISAARPEKKTFAPARRGRGLWGGAATILEREAEQSRLGATERAAAAAMNPEYDYLFKLLLIGDSGVGKSCLLLRFADDTYTESYISTIGVDFKIRTIELDGKTIKLQIWDTAGQERFRTITSSYYRGAHGIIVVYDVTDQESYANVKQWLQEIDRYASENVNKLLVGNKSDLTTKKVVDNTTAKEFADSLGIPFLETSAKNATNVEQAFMTMAAEIKKRMGPGAASGGERPNLKIDSTPVPSSLYLSPWAAPLGCPPLPGSPLVSCQAFCKEKPLGERWKRTKKINKFPLALG

SEQ ID NO: 753308 - protein, 146 aa, Homo sapiens
PGISAARPEKKTFAPARRGRGLWGGAATILEREAEQSRLGATERAAAAAMNPEYDYLFKLLLIGDSGVGKSCLLLRFADDTYTESYISTIGVDFKIRTIELDGKTIKLQIWDTAGQERFRTITSSYYRGAHGIIVVYDVTDQVLLD

SEQ ID NO: 753309 - protein, 173 aa, Homo sapiens
PTRSPTRRWHHFVVYDVTDQESYANVKQWLQEIDRYASENVNKLLVGNKSDLTTKKVVDNTTAKEFADSLGIPFLETSAKNATNVEQAFMTMAAEIKKRMGPGAASGGERPNLKIDSTPVPSSLYLSPWAAPLGCPPLPGSPLVSCQAFCKEKPLGERWKRTKKINKFPLALG

SEQ ID NO: 753310 - protein, 134 aa, Homo sapiens; identical to SEQ ID NO: 753298

SEQ ID NO: 753311 - protein, 141 aa, Homo sapiens
  misc_feature (138)..(138): Xaa can be any naturally occurring amino acid
MWLGPASVSGRETAAGSRAGRPKLGQLLRCWGSWQAAGAVLGLGWKRAGRKVQPGAEGFLCISASLSPGLKGPGAVLFPSEKVFSRPGVGVTVGSKITLAPGPLEESYANVKQWLQEIDRYASENVNKLLVGSLYGGXSSG

SEQ ID NO: 753312 - protein, 250 aa, Homo sapiens; identical to SEQ ID NO: 753292

SEQ ID NO: 753313 - protein, 250 aa, Homo sapiens; identical to SEQ ID NO: 753292

SEQ ID NO: 753314 - protein, 221 aa, Homo sapiens
  misc_feature (5)..(5): Xaa can be any naturally occurring amino acid
SVPRXMWEAGALGATRGAIAHERGSDYLFKLLLIGDSGVGKSCLLLRFADDTYTESYISTIGVDFKIRTIELDGKTIKLQIWDTAGQERFRTITSSYYRGAHGIIVVYDVTDQESYANVKQWLQEIDRYASENVNKLLVGNKSDLTTKKVVDNTTAKEFADSLGIPFLETSAKNATNVEQAFMTMAAEIKKRMGPGAASGGERPNLKIDSTPVKPAGGGCC

SEQ ID NO: 753315 - protein, 116 aa, Homo sapiens
GYRRPRRRESYANVKQWLQEIDRYASENVNKLLVGNKSDLTTKKVVDNTTAKEFADSLGIPFLETSAKNATNVEQAFMTMAAEIKKRMGPGAASGGERPNLKIDSTPVKPAGGGCC

SEQ ID NO: 753316 - protein, 128 aa, Homo sapiens
  misc_feature (5)..(5): Xaa can be any naturally occurring amino acid
FEDHXAHGLSDPRGYDVTDQESYANVKQWLQEIDRYASENVNKLLVGNKSDLTTKKVVDNTTAKEFADSLGIPFLETSAKNATNVEQAFMTMAAEIKKRMGPGAASGGERPNLKIDSTPVKPAGGGCC

SEQ ID NO: 753317 - protein, 213 aa, Homo sapiens
MWLGPASVSGRETAAGSRAGRPKLGQLLRCWGSWQAAGAVLGLGWKRAGRKVQPGAEGFLCISASLSPGLKGPGAVLFPSEKVFSRPGVGVTVGSKITLAPGPLEESYANVKQWLQEIDRYASENVNKLLVGNKSDLTTKKVVDNTTAKEFADSLGIPFLETSAKNATNVEQAFMTMAAEIKKRMGPGAASGGERPNLKIDSTPVKPAGGGCC

SEQ ID NO: 753318 - protein, 250 aa, Homo sapiens; identical to SEQ ID NO: 753292

SEQ ID NO: 753319 - protein, 250 aa, Homo sapiens; identical to SEQ ID NO: 753292

SEQ ID NO: 753320 - protein, 250 aa, Homo sapiens; identical to SEQ ID NO: 753292

SEQ ID NO: 753321 - protein, 108 aa, Homo sapiens
MRCLPTVPLCPHVRRRRKAHRARGWAPALTLTLLAPPPFPQGSTSGSLPTPSLEPTREGPHPLPLLLWGMWVPSRIGGLSAHPLCTQDPSPLPSGTAASCKKASLWSP

SEQ ID NO: 753322 - protein, 252 aa, Homo sapiens
PGISAARPEKKTFAPARRGRGLWGGAATILEREAEQSRLGATERAAAAAMNPEYDYLFKLLLIGDSGVGKSCLLLRFADDTYTESYISTIGVDFKIRTIELDGKTIKLQIWDTAGQERFRTITSSYYRGAHGIIVVYDVTDQESYANVKQWLQEIDRYASENVNKLLVGNKSDLTTKKVVDNTTAKEFADSLGIPFLETSAKNATNVEQAFMTMAAEIKKRMGPGAASGGERPNLKIDSTPATPSRAKTHYT

SEQ ID NO: 753323 - protein, 220 aa, Homo sapiens
PGISAARPEKKTFAPARRGRGLWGGAATILEREAEQSRLGATERAAAAAMNPEYDYLFKLLLIGDSGVGKSCLLLRFADDTYTESYISTIGVDFKIRTIELDGKTIKLQIWDTAGQERFRTITSSYYRGAHGIIVVYDVTDQESYANVKQWLQEIDRYASENVNKLLVGNKSDLTTKKVVDNTTAKEFAAGESPEPERQRRQRAQDHSHCTQPGLQGPLD

SEQ ID NO: 753324 - protein, 967 aa, Homo sapiens
MKKPSTEGGEEHVFENSPVLDERSALYSGVHKKPLFFDGSPEKPPEDDSDSLTTSPSSSSLDTWGAGRKLVKTFSKGESRGLIKPPKKMGTFFSYPEEEKAQKVSRSLTEGEMKKGLGSLSHGRTCSFGGFDLTNRSLHVGSNNSDPMGKEGDFVYKEVIKSPTASRISLGKKVKSVKETMRKRMSKKYSSSVSEQDSGLDGMPGSPPPSQPDPEHLDKPKLKAGGSVESLRSSLSGQSSMSGQTVSTTDSSTSNRESVKSEDGDDEEPPYRGPFCGRARVHTDFTPSPYDTDSLKLKKGDIIDIISKPPMGTWMGLLNNKVGTFKFIYVDVLSEDEEKPKRPTRRRRKGRPPQPKSVEDLLDRINLKEHMPTFLFNGYEDLDTFKLLEEEDLDELNIRDPEHRAVLLTAVELLQEYDSNSDQSGSQEKLLVDSQGLSGCSPRDSGCYESSENLENGKTRKASLLSAKSSTEPSLKSFSRNQLGNYPTLPLMKSGDALKQGQEEGRLGGGLAPDTSKSCDPPGVTGLNKNRRSLPVSICRSCETLEGPQTVDTWPRSHSLDDLQVEPGAEQDVPTEVTEPPPQIVPEVPQKTTASSTKAQPLERDSAVDNALLLTQSKRFSEPQKLTTKKLEGSIAASGRGLSPPQCLPRNYDAQPPGAKHGLARTPLEGHRKGHEFEGTHHPLGTKEGVDAEQRMQPKIPSQPPPVPAKKSRERLANGLHPVPMGPSGALPSPDAPCLPVKRGSPASPTSPSDCPPALAPRPLSGQAPGSPPSTRPPPWLSELPENTSLQEHGVKLGPALTRKVSCARGVDLETLTENKLHAEGIDLTEEPYSDKHGRCGIPEALVQRYAEDLDQPERDVAANMDQIRVKQLRKQHRMAIPSGGLTEICRKPVSPGCISSVSDWLISIGLPMYAGTLSTAGFSTLSQVPSLSHTCLQEAGITEERHIRKLLSAARLFKLPPGPEAM

SEQ ID NO: 753325 - protein, 199 aa, Homo sapiens
MEDAGAAGPGPEPEPEPEPEPEPAPEPEPEPKPGAGTSEAFSRLWTDVMGILDGSLGNIDDLAQQYADYYNTCFSDVCERMEELRKRRVSQDLEVEKPDASPTSLQLRSQIEESLGFCSAVSTPEVERKNPLHKSNSEDSSVGQYHFSWFTYLIISILYRKHEYVKIQNPQESFYSEINTVKILMYILILLFLGSFKKI

SEQ ID NO: 753326 - protein, 1247 aa, Homo sapiens
MEDAGAAGPGPEPEPEPEPEPEPAPEPEPEPKPGAGTSEAFSRLWTDVMGILDGSLGNIDDLAQQYADYYNTCFSDVCERMEELRKRRVSQDLEVEKPDASPTSLQLRSQIEESLGFCSAVSTPEVERKNPLHKSNSEDSSVGKGDWKKKNKYFWQNFRKNQKGIMRQTSKGEDVGYVASEITMSDEERIQLMMMVKEKMITIEEALARLKEYEAQHRQSAALDPADWPDGSYPTFDGSSNCNSREQSDDETEESVKFKRLHKLVNSTRRVRKKLIRVEEMKKPSTEGGEEHVFENSPVLDERSALYSGVHKKPLFFDGSPEKPPEDDSDSLTTSPSSSSLDTWGAGRKLVKTFSKGESRGLIKPPKKMGTFFSYPEEEKAQKVSRSLTEGEMKKGLGSLSHGRTCSFGGFDLTNRSLHVGSNNSDPMGKEGDFVYKEVIKSPTASRISLGKKVKSVKETMRKRMSKKYSSSVSEQDSGLDGMPGSPPPSQPDPEHLDKPKLKAGGSVESLRSSLSGQSSMSGQTVSTTDSSTSNRESVKSEDGDDEEPPYRGPFCGRARVHTDFTPSPYDTDSLKLKKGDIIDIISKPPMGTWMGLLNNKVGTFKFIYVDVLSEDEEKPKRPTRRRRKGRPPQPKSVEDLLDRINLKEHMPTFLFNGYEDLDTFKLLEEEDLDELNIRDPEHRAVLLTAVELLQEYDSNSDQSGSQEKLLVDSQGLSGCSPRDSGCYESSENLENGKTRKASLLSAKSSTEPSLKSFSRNQLGNYPTLPLMKSGDALKQGQEEGRLGGGLAPDTSKSCDPPGVTGLNKNRRSLPVSICRSCETLEGPQTVDTWPRSHSLDDLQVEPGAEQDVPTEVTEPPPQIVPEVPQKTTASSTKAQPLERDSAVDNALLLTQSKRFSEPQKLTTKKLEGSIAASGRGLSPPQCLPRNYDAQPPGAKHGLARTPLEGHRKGHEFEGTHHPLGTKEGVDAEQRMQPKIPSQPPPVPAKKSRERLANGLHPVPMGPSGALPSPDAPCLPVKRGSPASPTSPSDCPPALAPRPLSGQAPGSPPSTRPPPWLSELPENTSLQEHGVKLGPALTRKVSCARGVDLETLTENKLHAEGIDLTEEPYSDKHGRCGIPEALVQRYAEDLDQPERDVAANMDQIRVKQLRKQHRMAIPSGGLTEICRKPVSPGCISSVSDWLISIGLPMYAGTLSTAGFSTLSQVPSLSHTCLQEAGITEERHIRKLLSAARLFKLPPGPEAM

SEQ ID NO: 753327 - protein, 967 aa, Homo sapiens; identical to SEQ ID NO: 753324

SEQ ID NO: 753328 - protein, 65 aa, Homo sapiens
EIWIYPCSSYVSCTGGQTVSTTDSSTSNRESVKSEDGDDEEPPYRGPFCGRARVHTDFTPSPYDT

SEQ ID NO: 753329 - protein, 101 aa, Homo sapiens
HRNPVIETLNPYTSRPLRQLTRLFGGPSYIACSNLRVCCHRNPSSKPSLIVNFGISHERQDAHWVFCRVRNAAYSLPERLTQGCVLRSPGGNGPSFPTEQY

SEQ ID NO: 753330 - protein, 56 aa, Homo sapiens
MVARQPQAPGDTSPLPALYCLPAALLGVLYEDKERQDFIFTIYHWWQAVAIFTVYL

SEQ ID NO: 753331 - protein, 72 aa, Homo sapiens
RRRPEAHRRPQAQTPLPSCERTAGQTPKLARQASIELPSMAASSTKSWWETGEVQAQSAAKTPSCKMDSVTT

SEQ ID NO: 753332 - protein, 80 aa, Homo sapiens
TPSIHPQCYLLIEVLDAFCLHGCQSLWAGLCVDVFTPTPISSIQRSTTKAILLKHNHSVLHTPYDSLPPTLLIINPINKN

SEQ ID NO: 753333 - protein, 98 aa, Homo sapiens
RRRPEAHRRPQAQTPLPSCERTAGQTPKLARQASIELPSMAASSTKSWWETGEVQAQSAAKTPSCKDIVAGDMSKKSLWEQKGGSKTSSTIKMDSVTT

SEQ ID NO: 753334 - protein, 83 aa, Homo sapiens
RRRPEAHRRPQAQTPLPSCERTAGQTPKLARQASIELPSMAASSTKSWWETGEVQAQSAAKTPSCKTLWQLHWVLAEFWKTGM

SEQ ID NO: 753335 - protein, 93 aa, Homo sapiens
  misc_feature (65)..(65): Xaa can be any naturally occurring amino acid
  misc_feature (77)..(77): Xaa can be any naturally occurring amino acid
NNEHNRSKSAGDGKKVSIPAGTSNASRPRPTRLTVHKTELLHNNATTTATHQKKHPPKGAWFAPXTPSNTGNKQINXTRGMASRLNSALTRRN

SEQ ID NO: 753336 - protein, 113 aa, Homo sapiens
QADLELLSSSDPPVLASQSAGITGASHCNWPIKFLTPYLTDQLTLPRPVIWLNQSCDPTQEQKTARKPHFNTPVDDSIDLRKLQPISTPHFLSPYPPNYLSKLGSPNAQRRLI

SEQ ID NO: 753337 - protein, 297 aa, Homo sapiens
MKHIINSYENINNTARNNSDCPRVVLPEEIFFTISIVGVLENLIVLLAVFKNKNLQAPMYFFICSLAISDMLGSLYKILENILIILRNMGYLKPRGSFETTADDIIDSLFVLSLLGSIFSLSVIAADRYITIFHALRYHSIVTMRRTVVVLTVIWTFCTGTGITMVIFSHHVPTVITFTSLFPLMLVFILCLYVHMFLLARSHTRKISTLPRANMKGAITLTILLGVFIFCWAPFVLHVLLMTFCPSNPYCACYMSLFQVNGMLIMCNAVIDPFIYAFRSPELRDAFKKMIFCSRYW

SEQ ID NO: 753338 - protein, 170 aa, Homo sapiens [sequence omitted]

SEQ ID NO: 753339 - protein, 107 aa, Homo sapiens
SHLLFTGRQYSEYRMDTIPVTIATDLATVTLVLLIAKYKGLCSDFLLLAFSAGLPPSFVKPSFAMTDLSLPFGSLTSAGPLNAVVLKALSLVSWVHLGPIHFQVLHY

SEQ ID NO: 753340 - protein, 67 aa, Homo sapiens
AVVNDTSGENKSGAADIAASQHVMVCALQELGSLVQSLNATASPLIQEASIGLLEIVTSVLLHPSMA

SEQ ID NO: 753341 - protein, 67 aa, Homo sapiens
GFAIYASDSFFVGICNRIQFCHRSSAMSMIGSSSNEPRYRTSWYAPENRSVFPGSATGCNKLAAAST

SEQ ID NO: 753342 - protein, 69 aa, Homo sapiens
PSAFRNLQVLASTFMGASKLPAHKPGSSRAFPGSPCSALLRGHPQSQSTSKSPPSFGEEVTSPCEHHID

SEQ ID NO: 753343 - protein, 542 aa, Homo sapiens
MAKGFYISKSLGILGILLGVAAVCTIIALSVVYSQEKNKNANSSPVASTTPSASATTNPASATTLDQSKAWNRYRLPNTLKPDSYQVTLRPYLTPNDRGLYVFKGSSTVRFTCKEATDVIIIHSKKLNYTLSQGHRVVLRGVGGSQPPDIDKTELVEPTEYLVVHLKGSLVKDSQYEMDSEFEGELADDLAGFYRSEYMEGNVRKVVATTQMQAADARKSFPCFDEPAMKAEFNITLIHPKDLTALSNMLPKGPSTPLPEDPNWNVTEFHTTPKMSTYLLAFIVSEFDYVEKQASNGVLIRIWARPSAIAAGHGDYALNVTGPILNFFAGHYDTPYPLPKSDQIGLPDFNAGAMENWGLVTYRENSLLFDPLSSSSSNKERVVTVIAHELAHQWFGNLVTIEWWNDLWLNEGFASYVEYLGADYAEPTWNLKDLMVLNDVYRVMAVDALASSHPLSTPASEINTPAQISELFDAISYSKGASVLRMLSSFLSEDVFKQGLASYLHTFAYQNTIYLNLWDHLQEAVNNRSIQLPTTVRDIMNR

SEQ ID NO: 753344 - protein, 967 aa, Homo sapiens
MAKGFYISKSLGILGILLGVAAVCTIIALSVVYSQEKNKNANSSPVASTTPSASATTNPASATTLDQSKAWNRYRLPNTLKPDSYQVTLRPYLTPNDRGLYVFKGSSTVRFTCKEATDVIIIHSKKLNYTLSQGHRVVLRGVGGSQPPDIDKTELVEPTEYLVVHLKGSLVKDSQYEMDSEFEGELADDLAGFYRSEYMEGNVRKVVATTQMQAADARKSFPCFDEPAMKAEFNITLIHPKDLTALSNMLPKGPSTPLPEDPNWNVTEFHTTPKMSTYLLAFIVSEFDYVEKQASNGVLIRIWARPSAIAAGHGDYALNVTGPILNFFAGHYDTPYPLPKSDQIGLPDFNAGAMENWGLVTYRENSLLFDPLSSSSSNKERVVTVIAHELAHQWFGNLVTIEWWNDLWLNEGFASYVEYLGADYAEPTWNLKDLMVLNDVYRVMAVDALASSHPLSTPASEINTPAQISELFDAISYSKGASVLRMLSSFLSEDVFKQGLASYLHTFAYQNTIYLNLWDHLQEAVNNRSIQLPTTVRDIMNRWTLQMGFPVITVDTSTGTLSQEHFLLDPDSNVTRPSEFNYVWIVPITSIRDGRQQQDYWLIDVRAQNDLFSTSGNEWVLLNLNVTGYYRVNYDEENWRKIQTQLQRDHSAIPVINRAQIINDAFNLASAHKVPVTLALNNTLFLIEERQYMPWEAALSSLSYFKLMFDRSEVYGPMKNYLKKQVTPLFIHFRNNTNNWREIPENLMDQYSEVNAISTACSNGVPECEEMVSGLFKQWMENPNNNPIHPNLRSTVYCNAIAQGGEEEWDFAWEQFRNATLVNEADKLRAALACSKELWILNRYLSYTLNPDLIRKQDATSTIISITNNVIGQGLVWDFVQSNWKKLFNDYGGGSFSFSNLIQAVTRRFSTEYELQQLEQFKKDNEETGFGSGTRALEQALEKTKANIKWVKENKEVVLQWFTENSK

SEQ ID NO: 753345 - protein, 159 aa, Homo sapiens
MFIFNSIADDIFPLISCVGAIHCNILAIRTGNDFAAIKLQVIKLIYLMIWHSLVIISPVVTLAFFPASLKQGSLHFLLIIYFVLLLTPWLEFSKSGTHLPSNTKIIPAWWVSMDAYLNHASICCHQFSCLSAVKLQLSNEELIRDTRWDIQSYTTDFSF

SEQ ID NO: 753346 - protein, 156 aa, Homo sapiens
MKKQGVSPKPLQSSRPSPSKRPCGASPAREREVEKSALGGGKLPGGARRSSPGRIPNLKKRKGLELKVVAKALLGPFQFVCNSLAQLREEVHELQARWFPSRTTLHRGIENKEFPNQTGAQAVFAAPVKAPYPEPCLPAPSRLCGNSTLVTFSNTF

SEQ ID NO: 753347 - protein, 102 aa, Homo sapiens
GCGGLCVGLPSPEAARSGKRGGGGAARAGEHVGGHAGTARANGFQRMRPTLHFTVAMTTRRSASQRLVNGCGDKSVEAARRVRPFWTSPDSAGLCLKLTQLH

SEQ ID NO: 753348 - protein, 102 aa, Homo sapiens; identical to SEQ ID NO: 753347

SEQ ID NO: 753349 - protein, 141 aa, Homo sapiens
MKKQGVSPKPLQSSRPSPSKRPCGASPAREREVEKSALGGGKLPGGARRSSPGRIPNLKKRKGLELKVVAKALLGPFQFVCNSLAQLREEVHELQARWFPSRTTLHRGIENKEFPNQTGAQAVFAAPVKAPYPEPCLPAPR

SEQ ID NO: 753350 - protein, 122 aa, Homo sapiens
MKKQGVSPKPLQSSRPSPSKRPCGASPAREREVEKSALGGGKLPGGARRSSPGRIPNLKKRKGLELKVVAKALLGPFQFVCNSLAQLREEVHELQARWFPSRTTLHRRLCGNSTLVTFSNTF

SEQ ID NO: 753351 - protein, 102 aa, Homo sapiens; identical to SEQ ID NO: 753347

SEQ ID NO: 753352 - protein, 102 aa, Homo sapiens; identical to SEQ ID NO: 753347

SEQ ID NO: 753353 - protein, 303 aa, Homo sapiens
MFGTYFRVGFYGTKFGDLDEQEFVYKEPAITKLAEISHRLEGFYGERFGEDVVEVIKDSNPVDKCKLDPNKAYIQITYVEPYFDTYEMKDRITYFDKNYNLRRFMYCTPFTLDGRAHGELHEQFKRKTILTTSHAFPYIKTRVNVTHKEEIILTPIEVAIEDMQKKTQELAFATHQDPADPKMLQMVLQGSVGTTVNQGPLEVAQVFLSEIPSDPKLFRHHNKLRLCFKDFTKRCEDALRKNKSLIGPDQKEYQRELERNYHRLKEALQPLINRKIPQLYKAVLPVTCHRDSFSRMSLRKMDL

SEQ ID NO: 753354 - protein, 303 aa, Homo sapiens; identical to SEQ ID NO: 753353

SEQ ID NO: 753355 - protein, 303 aa, Homo sapiens; identical to SEQ ID NO: 753353

SEQ ID NO: 753356 - protein, 216 aa, Homo sapiens
MKDRITYFDKNYNLRRFMYCTPFTLDGRAHGELHEQFKRKTILTTSHAFPYIKTRVNVTHKEEIILTPIEVAIEDMQKKTQELAFATHQDPADPKMLQMVLQGSVGTTVNQGPLEVAQVFLSEIPSDPKLFRHHNKLRLCFKDFTKRCEDALRKNKSLIGPDQKEYQRELERNYHRLKEALQPLINRKIPQLYKAVLPVTCHRDSFSRMSLRKMDL

SEQ ID NO: 753357 - protein, 315 aa, Homo sapiens
MFGTYFRVGFYGTKFGDLDEQEFVYKEPAITKLAEISHRLEGFYGERFGEDVVEVIKDSNPVDKCKLDPNKAYIQITYVEPYFDTYEMKDRITYFDKNYNLRRFMYCTPFTLDGRAHGELHEQFKRKTILTTSHAFPYIKTRVNVTHKEEIILTPIEVAIEDMQKKTQELAFATHQDPADPKMLQMVLQGSVGTTVNQGPLEVAQVFLSEIPSDPKLFRHHNKLRLCFKDFTKRCEDALRKNKSLIGPDQKEYQRELERNYHRLKEALQPLINRKIPQLYKAVLPVTCHRDSFSRIPVTCHRDSFSRMSLRKMDL

SEQ ID NO: 753358 - protein, 517 aa, Homo sapiens
MAAPEQPLAISRGCTSSSSLSPPRGDRTLLVRHLPAELTAEEKEDLLKYFGAQSVRVLSDKGRLKHTAFATFPNEKAAIKALTRLHQLKLLGHTLVVEFAKEQDRVHSPCPTSGSEKKKRSDDPVEDDKEKKELGYLTVEKGMAPNHGLTFPLNSCLKYMYPPPSSTILANIVNALASVPKFYVQVLHLMNKMNLPTPFGPITARPPMYEDYMPLHAPLPPTSPQPPEEPPLPDEDEELSSEESEYESTDDEDRQRMNKLMELANLQPKRPKTIKQRHVRKKRKIKDMLNTPLCPSHSSLHPVLLPSDVFDQPQPVGNKRIEFHISTDMPAAFKKDLEKEQNCEEKNHDLPATEVDASNIGFGKIFPKPNLDITEEIKEDSDEMPSECISRRELEKGRISREEMETLSVFRSYEPGEPNCRIYVKNLAKHVQEKDLKYIFGRYVDFSSETQRIMFDIRLMKEGRMKGQAFIGLPNEKAAAKALKEANGYVLFGKPMVVQFARSARPKQDPKEGKRKC

SEQ ID NO: 753359 - protein, 70 aa, Homo sapiens
LGPHVLGSIKSEPCNTNVNEMIHIFGNLGTHIIFLQCKIKKTNQTTISDLLRFLWIPMSFKCFATLRRRN

SEQ ID NO: 753360 - protein, 517 aa, Homo sapiens; identical to SEQ ID NO: 753358

SEQ ID NO: 753361 - protein, 517 aa, Homo sapiens; identical to SEQ ID NO: 753358

SEQ ID NO: 753362 - protein, 517 aa, Homo sapiens; identical to SEQ ID NO: 753358

SEQ ID NO: 753363 - protein, 517 aa, Homo sapiens; identical to SEQ ID NO: 753358

SEQ ID NO: 753364 - protein, 517 aa, Homo sapiens; identical to SEQ ID NO: 753358

SEQ ID NO: 753365 - protein, 314 aa, Homo sapiens
MNHLIDIGVAGFRLDASKHMWPGDIKAILDKLHNLNSNWFPAGSKPFIYQEVIDLGGEPIKSSDYFGNGRVTEFKYGAKLGTVIRKWNGEKMSYLKNWGEGWGFVPSDRALVFVDNHDNQRGHGAGGASILTFWDARLYKMAVGFMLAHPYGFTRVMSSYRWPRQFQNGNDVNDWVGPPNNNGVIKEVTINPDTTCGNDWVCEHRWRQIRNMVIFRNVVDGQPFTNWYDNGSNQVAFGRGNRGFIVFNNDDWSFSLTLQTGLPAGTYCDVISGDKINGNCTGIKIYVSDDGKAHFSISNSAEDPFIAIHAESKL

SEQ ID NO: 753366 - protein, 517 aa, Homo sapiens; identical to SEQ ID NO: 753358

SEQ ID NO: 753367 - protein, 407 aa, Homo sapiens
MAAPEQPLAISRGCTSSSSLSPPRGDRTLLVRHLPAELTAEEKEDLLKYFGAQSVRVLSDKGRLKHTAFATFPNEKAAIKALTRLHQLKLLGHTLVVEFAKEQDRVHSPCPTSGSEKKKRSDDPVEDDKEKKELGYLTVEKGMAPNHGLTFPLNSCLKYMYPPPSSTILANIVNALASVPKFYVQVLHLMNKMNLPTPFGPITARPPMYEDYMPLHAPLPPTSPQPPEEPPLPDEDEELSSEESEYESTDDEDRQRMNKLMELANLQPKRPKTIKQRHVRKKRKIKDMLNTPLCPSHSSLHPVLLPSDVFDQPQPVGNKRIEFHISTDMPAAFKKDLEKEQNCEEKNHDLPATEVDASNIGFGKIFPKPNLDITEEIKEDSDEMPSECISRRELEKGRISREGNVTK

SEQ ID NO: 753368 - protein, 517 aa, Homo sapiens; identical to SEQ ID NO: 753358

SEQ ID NO: 753369 - protein, 517 aa, Homo sapiens; identical to SEQ ID NO: 753358

SEQ ID NO: 753370 - protein, 517 aa, Homo sapiens; identical to SEQ ID NO: 753358

SEQ ID NO: 753371 - protein, 517 aa, Homo sapiens; identical to SEQ ID NO: 753358

SEQ ID NO: 753372 - protein, 517 aa, Homo sapiens; identical to SEQ ID NO: 753358

SEQ ID NO: 753373 - protein, 438 aa, Homo sapiens
MAAPEQPLAISRGCTSSSSLSPPRGDRTLLVRHLPAELTAEEKEDLLKYFGAQSVRVLSDKGRLKHTAFATFPNEKAAIKALTRLHQLKLLGHTLVVEFAKEQDRVHSPCPTSGSEKKKRSDDPVEDDKEKKELGYLTVEKGMAPNHGLTFPLNSCLKYMYPPPSSTILANIVNALASVPKFYVQVLHLMNKMNLPTPFGPITARPPMYEDYMPLHAPLPPTSPQPPEEPPLPDEDEELSSEESEYESTDDEDRQRMNKLMELANLQPKRPKTIKQRHVRKKRKIKDMLNTPLCPSHSSLHPVLLPSDVFDQPQPVGNKRIEFHISTDMPAAFKKDLEKEQNCEEKNHDLPATEVDASNIGFGKIFPKPNLDITEEIKEDSDEMPSECISRRELEKGRISREEMETLSVFRSYEPGEPNCRIYVKNLAKHVQEKVGIN

SEQ ID NO: 753374 - protein, 213 aa, Homo sapiens
MNHLIDIGVAGFRLDASKHMWPGDIKAILDKLHNLNSNWFPAGSKPFIYQEVIDLGGEPIKSSDYFGNGRVTEFKYGAKLGTVIRKWNGEKMSYLKNWGEGWGFMPSDRALVFVDNHDNQRGHGAGGASILTFWDARLYKMAVGFMLAHPYGFTRVMSSYRWPRQFQNGNDVNDWVGPPNNNGVIKEVTINPDTTCGNDWVCEHRWRQIQEHG

SEQ ID NO: 753375 - protein, 517 aa, Homo sapiens; identical to SEQ ID NO: 753358

SEQ ID NO: 753376 - protein, 517 aa, Homo sapiens; identical to SEQ ID NO: 753358

SEQ ID NO: 753377 - protein, 517 aa, Homo sapiens; identical to SEQ ID NO: 753358

SEQ ID NO: 753378 - protein, 405 aa, Homo sapiens
MAAPEQPLAISRGCTSSSSLSPPRGDRTLLVRHLPAELTAEEKEDLLKYFGAQSVRVLSDKGRLKHTAFATFPNEKAAIKALTRLHQLKLLGHTLVVEFAKEQDRVHSPCPTSGSLLGIISHACNPNNLEAEEGGPLKLRNLRLQWTVIASLHSSLGDIEETPTQQVRDCRLVGLLDLALEKDYVRSKIAEYMNHLIDIGVAGFRLDASKHMWPGDIKAILDKLHNLNSNWFPAGSKPFIYQEVIDLGGEPIKSSDYFGNGRVTEFKYGAKLGTVIRKWNGEKMSYLKNWGEGWGFMPSDRALVFVDNHDNQRGHGAGGASILTFWDARLYKMAVGFMLAHPYGFTRVMSSYRWPRQFQNGNDVNDWVGPPNNNGVIKEVTINPDTTCGNDWVCEHRWRQIQEHG

SEQ ID NO: 753379 - protein, 175 aa, Homo sapiens [sequence omitted]

SEQ ID NO: 753380 - protein, 140 aa, Homo sapiens
SSPCCPGPRRHGLKRGCSHSQEKGRLEEALGEPQALSREMGSFAFRLASPPSPSPVPASLPQTHSASHAGAHAGWPRGLSQQQGLWFTPVLIIAQFQKHPTLRKDLAGGILRRVCGDVEGLLCGQLSLWWSLARIPFGLQ

SEQ ID NO: 753381 - protein, 115 aa, Homo sapiens
MGVPPYQALDFDVLKKCSRGWKTHFDSVLTVEHSLVGFQTPRFSGTVRGAEMSITVVQSARSQTGPHTGGFVKSFVLWLWTVSWNGFWSQVILFYPQDLGHGHLKLYRTGTPGFL

SEQ ID NO: 753382 - protein, 283 aa, Homo sapiens
  misc_feature (275)..(275): Xaa can be any naturally occurring amino acid
VSLELSVHSAEEIEGKVQGMNVSKLRNTRVNVDFQKQTVDPMQVSFNTSDRSQTVTDLLLTIDVTEVVEVGHFWGYRIDENNSEILKKLTAEINQLTLVPLPTHPHPDLVCLAPFADFDKQRYFRAQVLYVSGNSAEVFFVDYGNKSHVDLHLLMEIPCQFLELPFQALEFKICKMRPSAKSLVCGKHWSDGASQWFASLVSGCTLLVKVFSVVHSVLHVDVYQYSGVQDAINIRDVLIQQGYAELTGGVLRSPRQSHGSFFKGPLFPSSVEENXTVGSVAFS

SEQ ID NO: 753383 - protein, 106 aa, Homo sapiens
MLRIVEPYVTWGFPNLKSVRELILKRGQAKVKNKTIPLTDNTVIEEHLGKFGVICLEDLIHEIAFPGKHFQEISWFLCPFHLSVARHATKNKSGLPQGDGHTWLSG

SEQ ID NO: 753384 - protein, 226 aa, Homo sapiens
PFGSRKSPEKEEGLSSPQSHPGKAGTYGRARQKKGKGLRFKRLESFLHDSWRQKRDKVRLRRLEVKPHALELPDKHSLAFVVRIERIDGVSLLVQRTIARLRLKKIFSGVFVKVTPQNLKMLRIVEPYVTWGFPNLKSVRELILKRGQAKVKNKTIPLTDNTVIEEHLGKFGVICLEDLIHEIAFPGKHFQEISWFLCPFHLSVARHATKNKSGLPQGDGHTWLSG

SEQ ID NO: 753385 - protein, 1076 aa, Homo sapiens
QGAWNGLDGPFGRKASRDRSGGTQDLSSQRGKGQRGGKRSLGEQGSLEAENGEVQGPGALKEDEGQGVEEAGRSGRRPGSLRSRSQAQSGAEVGGGKRRGADEAGSMGWQPMGENWGCLEEMLNEDQSREPPGHLGSRRSGKDGRLDIYGERRDATRSSTSRYKPGTGSFSKDAQGPMGHFSQGLADMEVQPGEAATLSCTLTSDLGPGTWFKDGVKLTTQDGVIFKQDGLVHSLFITHVQGTQAGRYTFVAGDQQSEATLTVQDSPTIAPDVTEKLREPLVVKAGKPVIVKIPFQSHLPIQAAWRKDGAEVVGSSDREAQVDLGDGYTRLCLPSAGRKDCGQYSVTLRSEGGSVQAELTLQVIGTSPVFPQLRPESPWGSGPSLPSRAGLGYDLCWLCSSFACCLRSRPTTNSAQTAEEEAVEMNTVLGSCWGGGAGYASLTPIHWALRKLLGRMVVPSPEWCQQDKPDPPQGPMEVQDCHRAGVCLRWRPPRDNGGRTVECYVVERRQAGRSTWLKVGEAPADSTTFTDAHVEPGRKYTFRVRAVTSEGAGEALESEEILVAPEALPKAPSAPAILSASSQGITLTWTAPRGPGSAHILGYLIERRKKGSNTWTAVNDQPVPERRWTVADVRQGCQYEFRVTAVAPSGPGEPGPPSDAVFARDPMRPPGLVRNLQVTDRSNTSITLSWAGPDTQEGDEAQGYVVELCSSDSLQWLPCHVGTVPVTTYTAKGLRPGEGYFVRVTAVNEGGQSQPSALDTLVQAMPVTVCPKFLVDSSTKDLLTVKVGDTVRVPVSFEAMPMPEVTWLKDGLPLPKRSVTVTKDGLTQLLIPVAGLSDSGLYTVVLEDLQGKEVAHSFRIRVAACPQAPGPIHLQENVPGTVTAEWEPSPDEAQDVPLHYAVFTRSSAHGPWHEAADRIYTNRFTLLGILPGHEYHFRVVAKNELGASKPSDTSQPWCIPRQRDRFTVKAPCYREPDLSQKPRFLVGLRSHLLPQGCECCMSCAVQGSPRPHVTWFKNDRSLEGNPAVYSTDLLGVCSLTIPSVSPKDSGEYKAVAENTLGQAVSTATLIVIEPST

SEQ ID NO: 753386 - protein, 1011 aa, Homo sapiens
QGAWNGLDGPFGRKASRDRSGGTQDLSSQRGKGQRGGKRSLGEQGSLEAENGEVQGPGALKEDEGQGVEEAGRSGRRPGSLRSRSQAQSGAEVGGGKRRGADEAGSMGWQPMGENWGCLEEMLNEDQSREPPGHLGSRRSGKDGRLDIYGERRDATRSSTSRYKPGTGSFSKDAQGPMGHFSQGLADMEVQPGEAATLSCTLTSDLGPGTWFKDGVKLTTQDGVIFKQDGLVHSLFITHVQGTQAGRYTFVAGDQQSEATLTVQDSPTIAPDVTEKLREPLVVKAGKPVIVKIPFQSHLPIQAAWRKDGAEVVGSSDREAQVDLGDGYTRLCLPSAGRKDCGQYSVTLRSEGGSVQAELTLQVIGTSPVFPQLRPESPWGSGPSLPSRAGLGYDLCWLCSSFACCLRSRPTTNSAQTAEEEAVEMNTVLGSCWGGGAGYASLTPIHWALRKLLGRMVVPSPEWCQQDKPDPPQGPMEVQDCHRAGVCLRWRPPRDNGGRTVECYVVERRQAGRSTWLKVGEAPADSTTFTDAHVEPGRKYTFRVRAVTSEGAGEALESEEILVAPEALPKAPSAPAILSASSQGITLTWTAPRGPGSAHILGYLIERRKKGSNTWTAVNDQPVPERRWTVADVRQGCQYEFRVTAVAPSGPGEPGPPSDAVFARDPMRPPGLVRNLQVTDRSNTSITLSWAGPDTQEGDEAQGYVVELCSSDSLQWLPCHVGTVPVTTYTAKGLRPGEGYFVRVTAVNEGGQSQPSALDTLVQAMPVTVCPKFLVDSSTKDLLTVKVGDTVRVPVSFEHALQAPGPIHLQENVPGTVTAEWEPSPDEAQDVPLHYAVFTRSSAHGPWHEAADRIYTNRFTLLGILPGHEYHFRVVAKNELGASKPSDTSQPWCIPRQRDRFTVKAPCYREPDLSQKPRFLVGLRSHLLPQGCECCMSCAVQGSPRPHVTWFKNDRSLEGNPAVYSTDLLGVCSLTIPSVSPKDSGEYKAVAENTLGQAVSTATLIVIEPST

SEQ ID NO: 753387 - protein, 1011 aa, Homo sapiens; identical to SEQ ID NO: 753386

SEQ ID NO: 753388 - protein, 730 aa, Homo sapiens
FVSLSPFFLFSAEVFNFDRAKSINLGLAPRQQRGRGGERGTGGGEGAGISRRSGCQSCWECARSDHKAAAEEAQPAAAVPPSFLLPSRSLFRPPAPSLPACVTAAAMAENGESSGPPRPSRGPAAAQGSAAAPAEPKIIKVTVKTPKEKEEFAVPENSSVQQFKEAISKRFKSQTDQLVLIFAGKILKDQDTLIQHGIHDGLTVHLVIKSQNRPQGQSTQPSNAAGTNTTSASTPRSNSTPISTNSNPFGLGSLGGLAGLSSLGLSSTNFSELQSQMQQQLMASPEMMIQIMENPFVQSMLSNPDLMRQLIMANPQMQQLIQRNPEISHLLNNPDIMRQTLEIARNPAMMQEMMRNQDLALSNLESIPGGYNALRRMYTDIQEPMLNAAQEQFGGNPFASVGSSSSSGEGTQPSRTENRDPLPNPWAPPPATQSSATTSTTTSTGSGSGNSSSNATGNTVAAANYVASIFSTPGMQSLLQQITENPQLIQNMLSAPYMRSMMQSLSQNPDLAAQMMLNSPLFTANPQLQEQMRPQLPAFLQQMQNPDTLSAMSNPRAMQALMQIQQGLQTLATEAPGLIPSFTPGVGVGVLGTAIGPVGPVTPIGPIGPIVPFTPIGPIGPIGPTGPAAPPGSTGSGGPTGPTVSSAAPSETTSPTSESGPNQQFIQQMVQALAGANAPQLPNPEVRFQQQLEQLNAMGFLNREANLQALIATGGDINAAIERLLGSQPS

SEQ ID NO: 753389 - protein, 624 aa, Homo sapiens
MAENGESSGPPRPSRGPAAAQGSAAAPAEPKIIKVTVKTPKEKEEFAVPENSSVQQFKEAISKRFKSQTDQLVLIFAGKILKDQDTLIQHGIHDGLTVHLVIKSQNRPQGQSTQPSNAAGTNTTSASTPRSNSTPISTNSNPFGLGSLGGLAGLSSLGLSSTNFSELQSQMQQQLMASPEMMIQIMENPFVQSMLSNPDLMRQLIMANPQMQQLIQRNPEISHLLNNPDIMRQTLEIARNPAMMQEMMRNQDLALSNLESIPGGYNALRRMYTDIQEPMLNAAQEQFGGNPFASVGSSSSSGEGTQPSRTENRDPLPNPWAPPPATQSSATTSTTTSTGSGSGNSSSNATGNTVAAANYVASIFSTPGMQSLLQQITENPQLIQNMLSAPYMRSMMQSLSQNPDLAAQMMLNSPLFTANPQLQEQMRPQLPAFLQQMQNPDTLSAMSNPRAMQALMQIQQGLQTLATEAPGLIPSFTPGVGVGVLGTAIGPVGPVTPIGPIGPIVPFTPIGPIGPIGPTGPAAPPGSTGSGGPTGPTVSSAAPSETTSPTSESGPNQQFIQQMVQALAGANAPQLPNPEVRFQQQLEQLNAMGFLNREANLQALIATGGDINAAIERLLGSQPS

SEQ ID NO: 753390 - protein, 551 aa, Homo sapiens
MAENGESSGPPRPSRGPAAAQGSAAAPAEPKIIKVTVKTPKEKEEFAVPENSSVQQFKEAISKRFKSQTDQLVLIFAGKILKDQDTLIQHGIHDGLTVHLVIKSQNRPQGQSTQPSNAAGTNTTSASTPRSNSTPISTNSNPFGLGSLGGLAGLSSLGLSSTNFSELQSQMQQQLMASPEMMIQIMENPFVQSMLSNPDLMRQLIMANPQMQQLIQRNPEISHLLNNPDIMRQTLEIARNPAMMQEMMRNQDLALSNLESIPGGYNALRRMYTDIQEPMLNAAQEQFGGNPFASVGSSSSSGEGTQPSRTENRDPLPNPWAPPPATQSSATTSTTTSTGSGSGNSSSNATGNTVAAANYVASIFSTPGMQSLLQQITENPQLIQNMLSAPYMRSMMQSLSQNPDLAAQMMLNSPLFTANPQLQEQMRPQLPAFLQQMQNPDTLSAMSNPRAMQALMQIQQGLQTLATEAPSETTSPTSESGPNQQFIQQMVQALAGANAPQLPNPEVRFQQQLEQLNAMGFLNREANLQALIATGGDINAAIERLLGSQPS

SEQ ID NO: 753391 - protein, 275 aa, Homo sapiens
LHAWGTKDAGDIISGSNGVPSSLLQQITENPQLIQNMLSAPYMRSMMQSLSQNPDLAAQMMLNSPLFTANPQLQEQMRPQLPAFLQQMQNPDTLSAMSNPRAMQALMQIQQGLQTLATEAPGLIPSFTPGVGVGVLGTAIGPVGPVTPIGPIGPIVPFTPIGPIGPIGPTGPAAPPGSTGSGGPTGPTVSSAAPSETTSPTSESGPNQQFIQQMVQALAGANAPQLPNPEVRFQQQLEQLNAMGFLNREANLQALIATGGDINAAIERLLGSQPS

SEQ ID NO: 753392 - protein, 624 aa, Homo sapiens; identical to SEQ ID NO: 753389

SEQ ID NO: 753393 - protein, 624 aa, Homo sapiens; identical to SEQ ID NO: 753389

SEQ ID NO: 753394 - protein, 274 aa, Homo sapiens
AALLLLLNSQPVIFSTPGMQSLLQQITENPQLIQNMLSAPYMRSMMQSLSQNPDLAAQMMLNSPLFTANPQLQEQMRPQLPAFLQQMQNPDTLSAMSNPRAMQALMQIQQGLQTLATEAPGLIPSFTPGVGVGVLGTAIGPVGPVTPIGPIGPIVPFTPIGPIGPIGPTGPAAPPGSTGSGGPTGPTVSSAAPSETTSPTSESGPNQQFIQQMVQALAGANAPQLPNPEVRFQQQLEQLNAMGFLNREANLQALIATGGDINAAIERLLGSQPS

SEQ ID NO: 753395 - protein, 119 aa, Homo sapiens
KPDGARRCGGQTQAHLEKGLAVGGAEGKRNDTIGLPSRWRTRWGVLRGFGEGSARIVALRPRSERHPGLLEPDPQPALVGGEEQRKPRIPISLMANDIKGFHMVICHLHIFSEVSVYVF

SEQ ID NO: 753396 - protein, 109 aa, Homo sapiens
DSLGQTDGESGSYRGPSFPRCKLPVQQLYLQMGWHCHFTPYCFSVITNQTPTEGEAKTMWEQMLHPNSKPVLYVFCWTLLSTPSPAPGVGLGVLWCNPRYGHSSKYFRP

SEQ ID NO: 753397 - protein, 94 aa, Homo sapiens
  misc_feature (58)..(58): Xaa can be any naturally occurring amino acid
ADRSSIWVGTIQPAASRARKCTWKSGKRWNKQTCCVFRPSSYSHTGCFLPLNIRLQFXWLLDPWTYTSGLPGALGPLGTDCRKYDIIIAKKGEL

SEQ ID NO: 753398 - protein, 70 aa, Homo sapiens
HHLANTLSSPPADKGTIAGEGGLAGGTRVGTRVTRQEVWARSGQHKGKMTLIGALRGHSVEEKHRRLPEV

SEQ ID NO: 753399 - protein, 101 aa, Homo sapiens
VETGFCHVGQAGLKLLTSGDPPALTSQSVGITGMSHRTQPGLLNLKPMMLARISPVSQGLSYLRCAKEEKGVSLLMGQYMCIALITALVLSSPLKGGLAYG

SEQ ID NO: 753400 - protein, 106 aa, Homo sapiens
  misc_feature (12)..(12): Xaa can be any naturally occurring amino acid
  misc_feature (19)..(19): Xaa can be any naturally occurring amino acid
RAPIHKKEKKPXCKPRACXWLQIEPPTAPAPQVAPVPAPAPASAKSANVPPARSAAALAAPWAVPSVPRAVSAKAHQRSAAAVPDVGRALLPDINRATSTNLDFFF

SEQ ID NO: 753401 - protein, 83 aa, Homo sapiens
  misc_feature (10)..(10): Xaa can be any naturally occurring amino acid
KDKPLSGSKXQKNEDYSLSWLQMDPNCSCTTGGSCACAGSCKCKECKCTSCKKCCCSCCPVGCAKCAQGCVCKGSSEKCRCCA

SEQ ID NO: 753402 - protein, 101 aa, Homo sapiens
CGSLLTVGLILNEKRNEKKLEHYPALSCVPNGPQQLLHHRWLLCLRRLLQVQRVQMYLLQEVLLLLLPRGLCQVCPGLCLQRLIREVPLLCLMLGEPCSQT

SEQ ID NO: 753403 - protein, 171 aa, Homo sapiens
MGKSICAVQGVTRGSHGGVPLRSPYSRPATRGGVSGQLSRSASAFKLRLHASQTASKQRPGTAMVQGLTISGQYGTLREGNLCTSTPCFAGLGFLRAALQSKAPPTQISFLAPLLSQVLVLHHELKVFLVWSCSLSLLCFIGVAPNKPFVYLTLYPYIIERDRFIEGDTLK

SEQ ID NO: 753404 - protein, 60 aa, Homo sapiens
MPPSMLSLYPSHVPDSDRRQKANTLYLLVPIRQTMHQQEGKIPRENFESRCQRGLWAEKP

SEQ ID NO: 753405 - protein, 130 aa, Homo sapiens
MRLFTGIVFCSLVMGVTSESWRSFFKEALQGVGDMGRAYWDIMISNHQNSNRYLYARGNYDAAQRGPGGVWAAKLISRSRVYLQGLIDYYLFGNSSTVLEDSKSNEKAEEWGRSGKDPDRFRPDGLPKKY

SEQ ID NO: 753406 - protein, 196 aa, Homo sapiens
LSEPDDRYPLIVKIDLNLLTRIPGKPYKETEPPKGEKKNVPEKHTREAQKQASEKVSNKGKRKHKNEDDNRASESKKPKTEDKNSAGHKPSSNRESSKQSAAKEKDLLPSPAGPVPSKDPKTEHGSRKRTISQSSSLKSSSNSNKETSGSSKNSSSTSKQKKTEGKTSSSSKEVKVKCWGPGAFENHSTCHVTFPG

SEQ ID NO: 753407 - protein, 98 aa, Homo sapiens
LSEPDDRYPLIVKIDLNLLTRIPGKPYKETEPPKGEKKNVPEKHTREAQKQASEKVSNKGKRKHKVCEGFLLFVLKHQNLKCGGNLSKPQSNKVGHKL

SEQ ID NO: 753408 - protein, 333 aa, Homo sapiens
LSEPDDRYPLIVKIDLNLLTRIPGKPYKETEPPKGEKKNVPEKHTREAQKQASEKVSNKGKRKHKNEDDNRASESKKPKTEDKNSAGHKPSSNRESSKQSAAKEKDLLPSPAGPVPSKDPKTEHGSRKRTISQSSSLKSSSNSNKETSGSSKNSSSTSKQKKTEGKTSSSSKEVKEKAPSSSSNCPPSAPTLDSSKPRRTKLVFDDRNYSADHYLQEAKKLKHNADALSDRFEKAVYYLDAVVSFIECGNALEKNAQESKSPFPMYSETVDLIKYTMKLKNYLAPDATAADKRLTVLCLRCESLLYLRLFKLKKENALKYSKTLTEHLKVSMQ

SEQ ID NO: 753409 - protein, 181 aa, Homo sapiens
RNAISFIFNLLTVFIVVIYFFGQEKAPSSSSNCPPSAPTLDSSKPRRTKLVFDDRNYSADHYLQEAKKLKHNADALSDRFEKAVYYLDAVVSFIECGNALEKNAQESKSPFPMYSETVDLIKYTMKLKNYLAPDATAADKRLTVLCLRCESLLYLRLFKLKKENALKYSKTLTEHLKVSMQ

SEQ ID NO: 753410 - protein, 118 aa, Homo sapiens
LSEPDDRYPLIVKIDLNLLTRIPGKPYKETEPPKGEKKNVPEKHTREAQKQASEKVSNKGKRKHKNEDDNRASESKKPKTEDKNSAGHKPSSNREYVPKTCCMPVLLIYVYHLIVGTF

SEQ ID NO: 753411 - protein, 277 aa, Homo sapiens
VTGVIDAPPVLQPQSSAGKAVAGWVLWLSSHQAAVLRLGPLPAGSSQEGPAGPSPAGPVPSKDPKTEHGSRKRTISQSSSLKSSSNSNKETSGSSKNSSSTSKQKKTEGKTSSSSKEVKEKAPSSSSNCPPSAPTLDSSKPRRTKLVFDDRNYSADHYLQEAKKLKHNADALSDRFEKAVYYLDAVVSFIECGNALEKNAQESKSPFPMYSETVDLIKYTMKLKNYLAPDATAADKRLTVLCLRCESLLYLRLFKLKKENALKYSKTLTEHLKVSMQ

SEQ ID NO: 753412 - protein, 236 aa, Homo sapiens
MGKAEIWLIRTYWDFEFPRPYLPNFEFVGGLHCKPAKPLPKVLWRYKGKKPATLGNNTQLFDWIPQNDLLGHPKTKAFITHGGTNGIYEAIYHGVPMVGVPMFADQPDNIAHMKAKGAAVEVNLNTMTSVDLLSALRTVINEPSYKENAMRLSRIHHDQPVKPLDRAVFWIEFVMRHKGAKHLRVAAHDLTWFQYHSLDVIGFLLVCVTTAIFLVIQCCLFSCQKFGKIGKKKKRE

SEQ ID NO: 753413 - protein, 548 aa, Homo sapiens
KLQQRKTFASHLIKSSASSHIMLNNLLLFSLQISLIGTTLGGNVLIWPMEGSHWLNVKIIIDELIKKEHNVTVLVASGALFITPTSNPSLTFEIYKVPFGKERIEGVIKDFVSTWLENRPSPSTIWRFYQEMAKVIKDFHMVSQEICDGVLKNQQLMAKLKKSKFEVLVSDPVFPCGDIVALKLGIPFMYSLRFSPASTVEKHCGKVPYPPSYVPAVLSELTDQMSFTDRIRNFISYHLQDYMFETLWKSWDSYYSKALGRPTTLCETMGKAEIWLIRTYWDFEFPRPYLPNFEFVGGLHCKPAKPLPKEMEEFIQSSGKNGVVVFSLGSMVKNLTEEKANLIASALAQIPQKVLWRYKGKKPATLGNNTQLFDWIPQNDLLGHPKTKAFITHGGTNGIYEAIYHGVPMVGVPMFADQPDNIAHMKAKGAAVEVNLNTMTSVDLLSALRTVINEPSYKENAMRLSRIHHDQPVKPLDRAVFWIEFVMRHKGAKHLRVAAHDLTWFQYHSLDVIGFLLVCVTTAIFLVIQCCLFSCQKFGKIGKKKKRE

SEQ ID NO: 753414 - protein, 132 aa, Homo sapiens [sequence omitted]

SEQ ID NO: 753415 - protein, 200 aa, Homo sapiens
QSPLSAAGPGSPAPLGALTPAEPGLGSAPRAPRARAPVTGKRRSRRSAVALGSAPAQPGPRERTGRASPVTLQRPHEPAQCLLSVKGHCSPWVTPMMPDRSSCLLEQPGPYEVVTTPVSRGGKWYQSNPGGGGAARSRCREMEEPTPEPVYVDVDKGLTLACFVFLCLFLVVMIIRCAKVIMDPYSAIPTSTWEEQHLDD

SEQ ID NO: 753416 - protein, 256 aa, Homo sapiens
DRSGAPGAAATDRSRTPRAPGPPAHGARHAGGPPLPAGNMWAQTWSNIYDLVVPFPSAPSMDTTEAMLKQGWTPRRMFKEADDFFTSLGLLPVPPEFWNKSMLEKPTDGREVVCHASAWDFYNGKDFRIKQCTTVNLEDLVVAHHEMGHIQYFMQYKDLPVALREGANPGFHEAIGDVLALSVSTPKHLHSLNLLSSEGGSDEHDINFLMKMALDKIAFIPFSYLVDQWRWRVFDGSITKENYNQEWWSLRFWNTP

SEQ ID NO: 753417 - protein, 1306 aa, Homo sapiens
MGAASGRRGPGLLLPLPLLLLLPPQPALALDPGLQPGNFSADEAGAQLFAQSYNSSAEQVLFQSVAASWAHDTNITAENARRQEEAALLSQEFAEAWGQKAKELYEPIWQNFTDPQLRRIIGAVRTLGSANLPLAKRQQYNALLSNMSRIYSTAKVCLPNKTATCWSLDPDLTNILASSRSYAMLLFAWEGWHNAAGIPLKPLYEDFTALSNEAYKQDGFTDTGAYWRSWYNSPTFEDDLEHLYQQLEPLYLNLHAFVRRALHRRYGDRYINLRGPIPAHLLGDMWAQSWENIYDMVVPFPDKPNLDVTSTMLQQGWNATHMFRVAEEFFTSLELSPMPPEFWEGSMLEKPADGREVVCHASAWDFYNRKDFRIKQCTRVTMDQLSTVHHEMGHIQYYLQYKDLPVSLRRGANPGFHEAIGDVLALSVSTPEHLHKIGLLDRVTNDTESDINYLLKMALEKIAFLPFGYLVDQWRWGVFSGRTPPSRYNFDWWYLRTKYQGICPPVTRNETHFDAGAKFHVPNVTPYIRYFVSFVLQFQFHEALCKEAGYEGPLHQCDIYRSTKAGAKLRKVLQAGSSRPWQEVLKDMVGLDALDAQPLLKYFQPVTQWLQEQNQQNGEVLGWPEYQWHPPLPDNYPEGIDLVTDEAEASKFVEEYDRTSQVVWNEYAEANWNYNTNITTETSKILLQKNMQIANHTLKYGTQARKFDVNQLQNTTIKRIIKKVQDLERAALPAQELEEYNKILLDMETTYSVATVCHPNGSCLQLEPDLTNVMATSRKYEDLLWAWEGWRDKAGRAILQFYPKYVELINQAARLNGYVDAGDSWRSMYETPSLEQDLERLFQELQPLYLNLHAYVRRALHRHYGAQHINLEGPIPAHLLGNMWAQTWSNIYDLVVPFPSAPSMDTTEAMLKQGWTPRRMFKEADDFFTSLGLLPVPPEFWNKSMLEKPTDGREVVCHASAWDFYNGKDFRIKQCTTVNLEDLVVAHHEMGHIQYFMQYKDLPVALREGANPGFHEAIGDVLALSVSTPKHLHSLNLLSSEGGSDEHDINFLMKMALDKIAFIPFSYLVDQWRWRVFDGSITKENYNQEWWSLRLKYQGLCPPVPRTQGDFDPGAKFHIPSSVPYIRYFVSFIIQFQFHEALCQAAGHTGPLHKCDIYQSKEAGQRLATAMKLGFSRPWPEAMQLITGQPNMSASAMLSYFKPLLDWLRTENELHGEKLGWPQYNWTPNSARSEGPLPDSGRVSFLGLDLDAQQARVGQWLLLFLGIALLVATLGLSQRLFSIRHRSLHRHSHGPQFGSEVELRHS

SEQ ID NO: 753418 - protein, 748 aa, Homo sapiens
RIGQGTVAAGLCSPAAMGQGWATAGLPSLLFLLLCYGHPLLVPSQEASQQVTVTHGTSSQATTSSQTTTHQATAHQTSAQSPNLVTDEAEASKFVEEYDRTSQVVWNEYAEANWNYNTNITTETSKILLQKNMQIANHTLKYGTQARKFDVNQLQNTTIKRIIKKVQDLERAALPAQELEEYNKILLDMETTYSVATVCHPNGSCLQLEPDLTNVMATSRKYEDLLWAWEGWRDKAGRAILQFYPKYVELINQAARLNGYVDAGDSWRSMYETPSLEQDLERLFQELQPLYLNLHAYVRRALHRHYGAQHINLEGPIPAHLLGNMWAQTWSNIYDLVVPFPSAPSMDTTEAMLKQGWTPRRMFKEADDFFTSLGLLPVPPEFWNKSMLEKPTDGREVVCHASAWDFYNGKDFRIKQCTTVNLEDLVVAHHEMGHIQYFMQYKDLPVALREGANPGFHEAIGDVLALSVSTPKHLHSLNLLSSEGGSDEHDINFLMKMALDKIAFIPFSYLVDQWRWRVFDGSITKENYNQEWWSLRLKYQGLCPPVPRTQGDFDPGAKFHIPSSVPYIRYFVSFIIQFQFHEALCQAAGHTGPLHKCDIYQSKEAGQRLATAMKLGFSRPWPEAMQLITGQPNMSASAMLSYFKPLLDWLRTENELHGEKLGWPQYNWTPNSARSEGPLPDSGRVSFLGLDLDAQQARVGQWLLLFLGIALLVATLGLSQRLFSIRHRSLHRHSHGPQFGSEVELRHS

SEQ ID NO: 753419 - protein, 745 aa, Homo sapiens
ENKIRSTLNEIYFGKTKDIVNGLRSVQTFADKSKQEALKNDLVEDFEEKAAMLNLCFMLTRHAVHSLDSFLRKLVFCSLPSSLPSPTGHITAASLTAQRHLSLRIKPIANWNYNTNITTETSKILLQKNMQIANHTLKYGTQARKFDVNQLQNTTIKRIIKKVQDLERAALPAQELEEYNKILLDMETTYSVATVCHPNGSCLQLEPDLTNVMATSRKYEDLLWAWEGWRDKAGRAILQFYPKYVELINQAARLNGYVDAGDSWRSMYETPSLEQDLERLFQELQPLYLNLHAYVRRALHRHYGAQHINLEGPIPAHLLGNMWAQTWSNIYDLVVPFPSAPSMDTTEAMLKQGWTPRRMFKEADDFFTSLGLLPVPPEFWNKSMLEKPTDGREVVCHASAWDFYNGKDFRIKQCTTVNLEDLVVAHHEMGHIQYFMQYKDLPVALREGANPGFHEAIGDVLALSVSTPKHLHSLNLLSSEGGSDEHDINFLMKMALDKIAFIPFSYLVDQWRWRVFDGSITKENYNQEWWSLRLKYQGLCPPVPRTQGDFDPGAKFHIPSSVPYIRYFVSFIIQFQFHEALCQAAGHTGPLHKCDIYQSKEAGQRLATAMKLGFSRPWPEAMQLITGQPNMSASAMLSYFKPLLDWLRTENELHGEKLGWPQYNWTPNSARSEGPLPDSGRVSFLGLDLDAQQARVGQWLLLFLGIALLVATLGLSQRLFSIRHRSLHRHSHGPQFGSEVELRHS

SEQ ID NO: 753420 - protein, 774 aa, Homo sapiens
RIGQGTVAAGLCSPAAMGQGWATAGLPSLLFLLLCYGHPLLVPSQEASQQVTVTHGTSSQATTSSQTTTHQATAHQTSAQSPNLVTDEAEASKFVEEYDRTSQVVWNEYAEANWNYNTNITTETSKILLQKNMQIANHTLKYGTQARKFDVNQLQNTTIKRIIKKVQDLERAALPAQELEEYNKILLDMETTYSVATVCHPNGSCLQLEPALKFSELPLQAEVSSGLELKPFKPLPDLTNVMATSRKYEDLLWAWEGWRDKAGRAILQFYPKYVELINQAARLNGYVDAGDSWRSMYETPSLEQDLERLFQELQPLYLNLHAYVRRALHRHYGAQHINLEGPIPAHLLGNMWAQTWSNIYDLVVPFPSAPSMDTTEAMLKQGWTPRRMFKEADDFFTSLGLLPVPPEFWNKSMLEKPTDGREVVCHASAWDFYNGKDFRIKQCTTVNLEDLVVAHHEMGHIQYFMQYKDLPVALREGANPGFHEAIGDVLALSVSTPKHLHSLNLLSSEGGSDEHDINFLMKMALDKIAFIPFSYLVDQWRWRVFDGSITKENYNQEWWSLRLKYQGLCPPVPRTQGDFDPGAKFHIPSSVPYIRYFVSFIIQFQFHEALCQAAGHTGPLHKCDIYQSKEAGQRLATAMKLGFSRPWPEAMQLITGQPNMSASAMLSYFKPLLDWLRTENELHGEKLGWPQYNWTPNSARSEGPLPDSGRVSFLGLDLDAQQARVGQWLLLFLGIALLVATLGLSQRLFSIRHRSLHRHSHGPQFGSEVELRHS

SEQ ID NO: 753421 - protein, 775 aa, Homo sapiens
RIGQGTVAAGLCSPAAMGQGWATAGLPSLLFLLLCYGHPLLVPSQEASQQVTVTHGTSSQATTSSQTTTHQATAHQTSAQSPNLVTDEAEASKFVEEYDRTSQVVWNEYAEANWNYNTNITTETSKILGLYDTWGSSLLCPCLDMCCLTAGIQGELQKNMQIANHTLKYGTQARKFDVNQLQNTTIKRIIKKVQDLERAALPAQELEEYNKILLDMETTYSVATVCHPNGSCLQLEPDLTNVMATSRKYEDLLWAWEGWRDKAGRAILQFYPKYVELINQAARLNGYVDAGDSWRSMYETPSLEQDLERLFQELQPLYLNLHAYVRRALHRHYGAQHINLEGPIPAHLLGNMWAQTWSNIYDLVVPFPSAPSMDTTEAMLKQGWTPRRMFKEADDFFTSLGLLPVPPEFWNKSMLEKPTDGREVVCHASAWDFYNGKDFRIKQCTTVNLEDLVVAHHEMGHIQYFMQYKDLPVALREGANPGFHEAIGDVLALSVSTPKHLHSLNLLSSEGGSDEHDINFLMKMALDKIAFIPFSYLVDQWRWRVFDGSITKENYNQEWWSLRLKYQGLCPPVPRTQGDFDPGAKFHIPSSVPYIRYFVSFIIQFQFHEALCQAAGHTGPLHKCDIYQSKEAGQRLATAMKLGFSRPWPEAMQLITGQPNMSASAMLSYFKPLLDWLRTENELHGEKLGWPQYNWTPNSARSEGPLPDSGRVSFLGLDLDAQQARVGQWLLLFLGIALLVATLGLSQRLFSIRHRSLHRHSHGPQFGSEVELRHS

SEQ ID NO: 753422 - protein, 414 aa, Homo sapiens
RIGQGTVAAGLCSPAAMGQGWATAGLPSLLFLLLCYGHPLLVPSQEASQQVTVTHGTSSQATTSSQTTTHQATAHQTSAQSPNLVTDEAEASKFVEEYDRTSQVVWNEYAEANWNYNTNITTETSKILLQKNMQIANHTLKYGTQARKFDVNQLQNTTIKRIIKKVQDLERAALPAQELEEYNKILLDMETTYSVATVCHPNGSCLQLEPDLTNVMATSRKYEDLLWAWEGWRDKAGRAILQFYPKYVELINQAARLNGYVDAGDSWRSMYETPSLEQDLERLFQELQPLYLNLHAYVRRALHRHYGAQHINLEGPIPAHLLGNMWAQTWSNIYDLVVPFPSAPSMDTTEAMLKQGWTPRRMFKEADDFFTSLGLLPVPPEFWNKSMLEKPTDGREVVCHASAWDFYNGKDFRA

SEQ ID NO: 753423 - protein, 616 aa, Homo sapiens
MQIANHTLKYGTQARKFDVNQLQNTTIKRIIKKVQDLERAALPAQELEEYNKILLDMETTYSVATVCHPNGSCLQLEPDLTNVMATSRKYEDLLWAWEGWRDKAGRAILQFYPKYVELINQAARLNGYVDAGDSWRSMYETPSLEQDLERLFQELQPLYLNLHAYVRRALHRHYGAQHINLEGPIPAHLLGNMWAQTWSNIYDLVVPFPSAPSMDTTEAMLKQGWTPRRMFKEADDFFTSLGLLPVPPEFWNKSMLEKPTDGREVVCHASAWDFYNGKDFRIKQCTTVNLEDLVVAHHEMGHIQYFMQYKDLPVALREGANPGFHEAIGDVLALSVSTPKHLHSLNLLSSEGGSDEHDINFLMKMALDKIAFIPFSYLVDQWRWRVFDGSITKENYNQEWWSLRLKYQGLCPPVPRTQGDFDPGAKFHIPSSVPYIRYFVSFIIQFQFHEALCQAAGHTGPLHKCDIYQSKEAGQRLATAMKLGFSRPWPEAMQLITGQPNMSASAMLSYFKPLLDWLRTENELHGEKLGWPQYNWTPNSARSEGPLPDSGRVSFLGLDLDAQQARVGQWLLLFLGIALLVATLGLSQRLFSIRHRSLHRHSHGPQFGSEVELRHS

SEQ ID NO: 753424 - protein, 560 aa, Homo sapiens
METTYSVATVCHPNGSCLQLEPDLTNVMATSRKYEDLLWAWEGWRDKAGRAILQFYPKYVELINQAARLNGYVDAGDSWRSMYETPSLEQDLERLFQELQPLYLNLHAYVRRALHRHYGAQHINLEGPIPAHLLGNMWAQTWSNIYDLVVPFPSAPSMDTTEAMLKQGWTPRRMFKEADDFFTSLGLLPVPPEFWNKSMLEKPTDGREVVCHASAWDFYNGKDFRIKQCTTVNLEDLVVAHHEMGHIQYFMQYKDLPVALREGANPGFHEAIGDVLALSVSTPKHLHSLNLLSSEGGSDEHDINFLMKMALDKIAFIPFSYLVDQWRWRVFDGSITKENYNQEWWSLRLKYQGLCPPVPRTQGDFDPGAKFHIPSSVPYIRYFVSFIIQFQFHEALCQAAGHTGPLHKCDIYQSKEAGQRLATAMKLGFSRPWPEAMQLITGQPNMSASAMLSYFKPLLDWLRTENELHGEKLGWPQYNWTPNSARSEGPLPDSGRVSFLGLDLDAQQARVGQWLLLFLGIALLVATLGLSQRLFSIRHRSLHRHSHGPQFGSEVELRHS

SEQ ID NO: 753425 - protein, 642 aa, Homo sapiens
MQIANHTLKYGTQARKFDVNQLQNTTIKRIIKKVQDLERAALPAQELEEYNKILLDMETTYSVATVCHPNGSCLQLEPALKFSELPLQAEVSKGLELKPFKPLPDLTNVMATSRKYEDLLWAWEGWRDKAGRAILQFYPKYVELINQAARLNGYVDAGDSWRSMYETPSLEQDLERLFQELQPLYLNLHAYVRRALHRHYGAQHINLEGPIPAHLLGNMWAQTWSNIYDLVVPFPSAPSMDTTEAMLKQGWTPRRMFKEADDFFTSLGLLPVPPEFWNKSMLEKPTDGREVVCHASAWDFYNGKDFRIKQCTTVNLEDLVVAHHEMGHIQYFMQYKDLPVALREGANPGFHEAIGDVLALSVSTPKHLHSLNLLSSEGGSDEHDINFLMKMALDKIAFIPFSYLVDQWRWRVFDGSITKENYNQEWWSLRLKYQGLCPPVPRTQGDFDPGAKFHIPSSVPYIRYFVSFIIQFQFHEALCQAAGHTGPLHKCDIYQSKEAGQRLATAMKLGFSRPWPEAMQLITGQPNMSASAMLSYFKPLLDWLRTENELHGEKLGWPQYNWTPNSARSEGPLPDSGRVSFLGLDLDAQQARVGQWLLLFLGIALLVATLGLSQRLFSIRHRSLHRHSHGPQFGSEVELRHS

SEQ ID NO: 753426 - protein, 424 aa, Homo sapiens
MWAQTWSNIYDLVVPFPSAPSMDTTEAMLKQGWTPRRMFKEADDFFTSLGLLPVPPEFWNKSMLEKPTDGREVVCHASAWDFYNGKDFRIKQCTTVNLEDLVVAHHEMGHIQYFMQYKDLPVALREGANPGFHEAIGDVLALSVSTPKHLHSLNLLSSEGGSDEHDINFLMKMALDKIAFIPFSYLVDQWRWRVFDGSITKENYNQEWWSLRLKYQGLCPPVPRTQGDFDPGAKFHIPSSVPYIRYFVSFIIQFQFHEALCQAAGHTGPLHKCDIYQSKEAGQRLATAMKLGFSRPWPEAMQLITGQPNMSASAMLSYFKPLLDWLRTENELHGEKLGWPQYNWTPNSARSEGPLPDSGRVSFLGLDLDAQQARVGQWLLLFLGIALLVATLGLSQRLFSIRHRSLHRHSHGPQFGSEVELRHS

SEQ ID NO: 753427 - protein, 372 aa, Homo sapiens
RIGQGTVAAGLCSPAAMGQGWATAGLPSLLFLLLCYGHPLLVPSQEASQQVTVTHGTSSQATTSSQTTTHQATAHQTSAQSPNLVTDEAEASKFVEEYDRTSQVVWNEYAEANWNYNTNITTETSKILLQKNMQIANHTLKYGTQARKFDVNQLQNTTIKRIIKKVQDLERAALPAQELEEYNKILLDMETTYSVATVCHPNGSCLQLEPDLTNVMATSRKYEDLLWAWEGWRDKAGRAILQFYPKYVELINQAARLNGYVDAGDSWRSMYETPSLEQDLERLFQELQPLYLNLHAYVRRALHRHYGAQHINLEGPIPAHLLGNMWAQTWSNIYDLVVPFPSPLLPAHGCLTLSPTSPSLSVNTIKGPALPI

SEQ ID NO: 753428 - protein, 850 aa, Homo sapiens
MGAASGRRGPGLLLPLPLLLLLPPQPALALDPGLQPGNFSADEAGAQLFAQSYNSSAEQVLFQSVAASWAHDTNITAENARRQEEAALLSQEFAEAWGQKAKELYEPIWQNFTDPQLRRIIGAVRTLGSANLPLAKRQQYNALLSNMSRIYSTAKVCLPNKTATCWSLDPDLTNILASSRSYAMLLFAWEGWHNAAGIPLKPLYEDFTALSNEAYKQDGFTDTGAYWRSWYNSPTFEDDLEHLYQQLEPLYLNLHAFVRRALHRRYGDRYINLRGPIPAHLLGDMWAQSWENIYDMVVPFPDKPNLDVTSTMLQQGWNATHMFRVAEEFFTSLELSPMPPEFWEGSMLEKPADGREVVCHASAWDFYNRKDFRIKQCTRVTMDQLSTVHHEMGHIQYYLQYKDLPVSLRRGANPGFHEAIGDVLALSVSTPEHLHKIGLLDRVTNDTESDINYLLKMALEKIAFLPFGYLVDQWRWGVFSGRTPPSRYNFDWWYLRTKYQGICPPVTRNETHFDAGAKFHVPNVTPYIRYFVSFVLQFQFHEALCKEAGYEGPLHQCDIYRSTKAGAKLRKVLQAGSSRPWQEVLKDMVGLDALDAQPLLKYFQPVTQWLQEQNQQNGEVLGWPEYQWHPPLPDNYPEGIDLVTDEAEASKFVEEYDRTSQVVWNEYAEANWNYNTNITTETSKILLQKNMQIANHTLKYGTQARKFDVNQLQNTTIKRIIKKVQDLERAALPAQELEEYNKILLDMETTYSVATVCHPNGSCLQLEPDLTNVMATSRKYEDLLWAWEGWRDKAGRAILQFYPKYVELINQAARLNGYVGCRDSGRFYVRESIPWSKNWSGFLQEVRHFN

SEQ ID NO: 753429 - protein, 158 aa, Homo sapiens
PRYVIKYLLSGPSGWHGATQMPPATIREIPGPRVLLPQFLQSIGGRKWPGACGPGSRSRLQPESPVPMVPTLPTRKVLQAGSSRPWQEVLKDMVGLDALDAQPLLKYFQPVTQWLQEQNQQNGEVLGWPEYQWHPPLPDNYPEGIGKALSEDGVGLRW

SEQ ID NO: 753430 - protein, 1306 aa, Homo sapiens; identical to SEQ ID NO: 753417

SEQ ID NO: 753431 - protein, 1306 aa, Homo sapiens; identical to SEQ ID NO: 753417

SEQ ID NO: 753432 - protein, 1160 aa, Homo sapiens
MSRIYSTAKVCLPNKTATCWSLDPDLTNILASSRSYAMLLFAWEGWHNAAGIPLKPLYEDFTALSNEAYKQDGFTDTGAYWRSWYNSPTFEDDLEHLYQQLEPLYLNLHAFVRRALHRRYGDRYINLRGPIPAHLLGDMWAQSWENIYDMVVPFPDKPNLDVTSTMLQQGWNATHMFRVAEEFFTSLELSPMPPEFWEGSMLEKPADGREVVCHASAWDFYNRKDFRIKQCTRVTMDQLSTVHHEMGHIQYYLQYKDLPVSLRRGANPGFHEAIGDVLALSVSTPEHLHKIGLLDRVTNDTESDINYLLKMALEKIAFLPFGYLVDQWRWGVFSGRTPPSRYNFDWWYLRTKYQGICPPVTRNETHFDAGAKFHVPNVTPYIRYFVSFVLQFQFHEALCKEAGYEGPLHQCDIYRSTKAGAKLRKVLQAGSSRPWQEVLKDMVGLDALDAQPLLKYFQPVTQWLQEQNQQNGEVLGWPEYQWHPPLPDNYPEGIDLVTDEAEASKFVEEYDRTSQVVWNEYAEANWNYNTNITTETSKILLQKNMQIANHTLKYGTQARKFDVNQLQNTTIKRIIKKVQDLERAALPAQELEEYNKILLDMETTYSVATVCHPNGSCLQLEPDLTNVMATSRKYEDLLWAWEGWRDKAGRAILQFYPKYVELINQAARLNGYVDAGDSWRSMYETPSLEQDLERLFQELQPLYLNLHAYVRRALHRHYGAQHINLEGPIPAHLLGNMWAQTWSNIYDLVVPFPSAPSMDTTEAMLKQGWTPRRMFKEADDFFTSLGLLPVPPEFWNKSMLEKPTDGREVVCHASAWDFYNGKDFRIKQCTTVNLEDLVVAHHEMGHIQYFMQYKDLPVALREGANPGFHEAIGDVLALSVSTPKHLHSLNLLSSEGGSDEHDINFLMKMALDKIAFIPFSYLVDQWRWRVFDGSITKENYNQEWWSLRLKYQGLCPPVPRTQGDFDPGAKFHIPSSVPYIRYFVSFIIQFQFHEALCQAAGHTGPLHKCDIYQSKEAGQRLATAMKLGFSRPWPEAMQLITGQPNMSASAMLSYFKPLLDWLRTENELHGEKLGWPQYNWTPNSARSEGPLPDSGRVSFLGLDLDAQQARVGQWLLLFLGIALLVATLGLSQRLFSIRHRSLHRHSHGPQFGSEVELRHS

SEQ ID NO: 753433 - protein, 616 aa, Homo sapiens; identical to SEQ ID NO: 753423

SEQ ID NO: 753434 - protein, 811 aa, Homo sapiens
PRYVIKYLLSGPSGWHGATQMPPATIREIPGPRVLLPQFLQSIGGRKWPGACGPGSRSRLQPESPVPMVPTLPTRKVLQAGSSRPWQEVLKDMVGLDALDAQPLLKYFQPVTQWLQEQNQQNGEVLGWPEYQWHPPLPDNYPEGIDLVTDEAEASKFVEEYDRTSQVVWNEYAEANWNYNTNITTETSKILLQKNMQIANHTLKYGTQARKFDVNQLQNTTIKRIIKKVQDLERAALPAQELEEYNKILLDMETTYSVATVCHPNGSCLQLEPDLTNVMATSRKYEDLLWAWEGWRDKAGRAILQFYPKYVELINQAARLNGYVDAGDSWRSMYETPSLEQDLERLFQELQPLYLNLHAYVRRALHRHYGAQHINLEGPIPAHLLGNMWAQTWSNIYDLVVPFPSAPSMDTTEAMLKQGWTPRRMFKEADDFFTSLGLLPVPPEFWNKSMLEKPTDGREVVCHASAWDFYNGKDFRIKQCTTVNLEDLVVAHHEMGHIQYFMQYKDLPVALREGANPGFHEAIGDVLALSVSTPKHLHSLNLLSSEGGSDEHDINFLMKMALDKIAFIPFSYLVDQWRWRVFDGSITKENYNQEWWSLRLKYQGLCPPVPRTQGDFDPGAKFHIPSSVPYIRYFVSFIIQFQFHEALCQAAGHTGPLHKCDIYQSKEAGQRLATAMKLGFSRPWPEAMQLITGQPNMSASAMLSYFKPLLDWLRTENELHGEKLGWPQYNWTPNSARSEGPLPDSGRVSFLGLDLDAQQARVGQWLLLFLGIALLVATLGLSQRLFSIRHRSLHRHSHGPQFGSEVELRHS

SEQ ID NO: 753435 - protein, 628 aa, Homo sapiens
  misc_feature (13)..(13): Xaa can be any naturally occurring amino acid
FLVVSSHGICHAXVHLRTAERAALPSSLAPHLPAHGAWGQCRPQRDQVQRSTAHCLSFLLQYNKILLDMETTYSVATVCHPNGSCLQLEPDLTNVMATSRKYEDLLWAWEGWRDKAGRAILQFYPKYVELINQAARLNGYVDAGDSWRSMYETPSLEQDLERLFQELQPLYLNLHAYVRRALHRHYGAQHINLEGPIPAHLLGNMWAQTWSNIYDLVVPFPSAPSMDTTEAMLKQGWTPRRMFKEADDFFTSLGLLPVPPEFWNKSMLEKPTDGREVVCHASAWDFYNGKDFRIKQCTTVNLEDLVVAHHEMGHIQYFMQYKDLPVALREGANPGFHEAIGDVLALSVSTPKHLHSLNLLSSEGGSDEHDINFLMKMALDKIAFIPFSYLVDQWRWRVFDGSITKENYNQEWWSLRLKYQGLCPPVPRTQGDFDPGAKFHIPSSVPYIRYFVSFIIQFQFHEALCQAAGHTGPLHKCDIYQSKEAGQRLATAMKLGFSRPWPEAMQLITGQPNMSASAMLSYFKPLLDWLRTENELHGEKLGWPQYNWTPNSARSEGPLPDSGRVSFLGLDLDAQQARVGQWLLLFLGIALLVATLGLSQRLFSIRHRSLHRHSHGPQFGSEVELRHS

SEQ ID NO: 753436 - protein, 798 aa, Homo sapiens
RIGQGTVAAGLCSPAAMGQGWATAGLPSLLFLLLCYGHPLLVPSQEASQQVTVTHGTSSQATTSSQTTTHQATAHQTSAQSPNLVTDEAEASKFVEEYDRTSQVVWNEYAEANWNYNTNITTETSKILLQKNMQIANHTLKYGTQARKFDVNQLQNTTIKRIIKKVQDLERAALPAQELEEYNKILLDMETTYSVATVCHPNGSCLQLEPDLTNVMATSRKYEDLLWAWEGWRDKAGRAILQFYPKYVELINQAARLNGYVDAGDSWRSMYETPSLEQDLERLFQELQPLYLNLHAYVRRALHRHYGAQHINLEGPIPAHLLGNMWAQTWSNIYDLVVPFPSAPSMDTTEAMLKQGWTPRRMFKEADDFFTSLGLLPVPPEFWNKSMLEKPTDGREVVCHASAWDFYNGKDFRIKQCTTVNLEDLVVAHHEMGHIQYFMQYKDLPVALREGANPGFHEAIGDVLALSVSTPKHLHSLNLLSSEGGSDEHDINFLMKMALDKIAFIPFSYLVDQWRWRVFDGSITKENYNQEWWSLRLKYQGLCPPVPRTQGDFDPGAKFHIPSSVPYIRYFVSFIIQFQFHEALCQAAGHTGPLHKCDIYQSKEAGQRLATAMKLGFSRPWPEAMQLITGQPNMSASAMLSYFKPLLDWLRTENELHGEKLGWPQYNWTPNSGPPPTPPPALGLNPLPRLGSHAADLGAWPCPAPLPCPALPCPCCLLASHSARSEGPLPDSGRVSFLGLDLDAQQARVGQWLLLFLGIALLVATLGLSQRLFSIRHRSLHRHSHGPQFGSEVELRHS

SEQ ID NO: 753437 - protein, 252 aa, Homo sapiens
MALDKIAFIPFSYLVDQWRWRVFDGSITKENYNQEWWSLRLKYQGLCPPVPRTQGDFDPGAKFHIPSSVPYIRYFVSFIIQFQFHEALCQAAGHTGPLHKCDIYQSKEAGQRLATAMKLGFSRPWPEAMQLITGQPNMSASAMLSYFKPLLDWLRTENELHGEKLGWPQYNWTPNSARSEGPLPDSGRVSFLGLDLDAQQARVGQWLLLFLGIALLVATLGLSQRLFSIRHRSLHRHSHGPQFGSEVELRHS

SEQ ID NO: 753438 - protein, 717 aa, Homo sapiens
MGAASGRRGPGLLLPLPLLLLLPPQPALALDPGLQPGNFSADEAGAQLFAQSYNSSAEQVLFQSVAASWAHDTNITAENARRQEEAALLSQEFAEAWGQKAKELYEPIWQNFTDPQLRRIIGAVRTLGSANLPLAKRQQYNALLSNMSRIYSTAKVCLPNKTATCWSLDPDLTNILASSRSYAMLLFAWEGWHNAAGIPLKPLYEDFTALSNEAYKQDGFTDTGAYWRSWYNSPTFEDDLEHLYQQLEPLYLNLHAFVRRALHRRYGDRYINLRGPIPAHLLGDMWAQSWENIYDMVVPFPDKPNLDVTSTMLQQGWNATHMFRVAEEFFTSLELSPMPPEFWEGSMLEKPADGREVVCHASAWDFYNRKDFRIKQCTRVTMDQLSTVHHEMGHIQYYLQYKDLPVSLRRGANPGFHEAIGDVLALSVSTPEHLHKIGLLDRVTNDTESDINYLLKMALEKIAFLPFGYLVDQWRWGVFSGRTPPSRYNFDWWYLRTKYQGICPPVTRNETHFDAGAKFHVPNVTPYIRYFVSFVLQFQFHEALCKEAGYEGPLHQCDIYRSTKAGAKLRKVLQAGSSRPWQEVLKDMVGLDALDAQPLLKYFQPVTQWLQEQNQQNGEVLGWPEYQWHPPLPDNYPEGIDLVTDEAEASKFVEEYDRTSQVVWNEYAEANWNYNTNITTETSKILVGATSPPPNLSMCTHTEMLSRSPHSGAATTF

SEQ ID NO: 753439 - protein, 266 aa, Homo sapiens
RYSHFRGGSEVALFCFEMAAGMYLEHYLDSIENLPFELQRNFQLMRDLDQRTEDLKAEIDKLATEYMSSARSLSSEEKLALLKQIQEAYGKCKEFGDDKVQLAMQTYEMVDKHIRRLDTDLARFEADLKEKQIESSDYDSSSSKGKKKGRTQKEKKAARARSKGKNSDEEAPKTAQKKLKLVRTSPEYGMPSVTFGSVHPSDVLDMPVDPNEPTYCLCHQVSYGEMIGCDNPDCSIEWFHFACVGLTTKPRGKWFCPRCSQERKKK

SEQ ID NO: 753440 - protein, 143 aa, Homo sapiens
SAIVIHVHCDATCIVIHVHCDPEHCDQASVSVVDLKAEIDKLATEYMSSARSLSSEEKLALLKQIQEAYGKCKEFGDDKVQLAMQTYEMVWPCSWLPTYFPSNPQGLRPLLQLCWDLFGVCEIHKLCLNLFSLIGDSFVPLLS

SEQ ID NO: 753441 - protein, 200 aa, Homo sapiens
MSSARSLSSEEKLALLKQIQEAYGKCKEFGDDKVQLAMQTYEMVDKHIRRLDTDLARFEADLKEKQIESSDYDSSSSKGKKKGRTQKEKKAARARSKGKNSDEEAPKTAQKKLKLVRTSPEYGMPSVTFGSVHPSDVLDMPVDPNEPTYCLCHQVSYGEMIGCDNPDCSIEWFHFACVGLTTKPRGKWFCPRCSQERKKK

SEQ ID NO: 753442 - protein, 242 aa, Homo sapiens
RYSHFRGGSEVALFCFEMAAGMYLEHYLDNLKAEIDKLATEYMSSARSLSSEEKLALLKQIQEAYGKCKEFGDDKVQLAMQTYEMVDKHIRRLDTDLARFEADLKEKQIESSDYDSSSSKGKKKGRTQKEKKAARARSKGKNSDEEAPKTAQKKLKLVRTSPEYGMPSVTFGSVHPSDVLDMPVDPNEPTYCLCHQVSYGEMIGCDNPDCSIEWFHFACVGLTTKPRGKWFCPRCSQERKKK

SEQ ID NO: 753443 - protein, 200 aa, Homo sapiens; identical to SEQ ID NO: 753441

SEQ ID NO: 753444 - protein, 161 aa, Homo sapiens
RYSHFRGGSEVALFCFEMAAGMYLEHYLDSIENLPFELQRNFQLMRDLDQRTEDLKAEIDKLATEYMSSARSLSSEEKLALLKQIQEAYGKCKEFGDDKVQLAMQTYEMVDKHIRRLDTDLARFEADLKEKQIESSDYDSSSSKGKKKVRRGRGCERWGED

SEQ ID NO: 753445 - protein, 266 aa, Homo sapiens; identical to SEQ ID NO: 753439

SEQ ID NO: 753446 - protein, 113 aa, Homo sapiens
TRPWNIIWTVWKNSDEEAPKTAQKKLKLVRTSPEYGMPSVTFGSVHPSDVLDMPVDPNEPTYCLCHQVSYGEMIGCDNPDCSIEWFHFACVGLTTKPRGKWFCPRCSQERKKK

SEQ ID NO: 753447 - protein, 163 aa, Homo sapiens
RYSHFRGGSEVALFCFEMAAGMYLEHYLDSIENLPFELQRNFQLMRDLDQRTEDLKAEIDKLATEYMSSARSLSSEEKLALLKQIQEAYGKCKEFGDDKVQLAMQTYEMVWPCSWLPTYFPSNPQGLRPLLQLCWDLFGVCEIHKLCLNLFSLIGDSFVPLLS

SEQ ID NO: 753448 - protein, 142 aa, Homo sapiens
MSSARSLSSEEKLALLKQIQEAYGKCKEFGDDKVQLAMQTYEMVDKHIRRLDTDLARFEADLKEKQIESSDYDSSSSKGKKKGRTQKEKKAARARSKGKNSDEEAPKTAQKKLKLVRTSPEYGMPVGGQCPPNWGVGARLEW

SEQ ID NO: 753449 - protein, 266 aa, Homo sapiens; identical to SEQ ID NO: 753439

SEQ ID NO: 753450 - protein, 266 aa, Homo sapiens; identical to SEQ ID NO: 753439

SEQ ID NO: 753451 - protein, 200 aa, Homo sapiens; identical to SEQ ID NO: 753441

SEQ ID NO: 753452 - protein, 266 aa, Homo sapiens; identical to SEQ ID NO: 753439

SEQ ID NO: 753453 - protein, 208 aa, Homo sapiens
RYSHFRGGSEVALFCFEMAAGMYLEHYLDSIENLPFELQRNFQLMRDLDQRTEDLKAEIDKLATEYMSSARSLSSEEKLALLKQIQEAYGKCKEFGDDKVQLAMQTYEMVDKHIRRLDTDLARFEADLKEKQIESSDYDSSSSKGKKKGRTQKEKKAARARSKGKNSDEEAPKTAQKKLKLVRTSPEYGMPVGGQCPPNWGVGARLEW

SEQ ID NO: 753454 - protein, 239 aa, Homo sapiens
CASLRATHRHLYALPFAPVRSKVGSPGEVKLKSSFVTTLKLTLSSLHTGQSQPLNSVLTAHQQALWCFYLTEEDARACPTLSPCQSRAAELWQIWGAVVGVSVSLPHPGLYPPYSLEVESNHRSAGFFLCTWQPLEGKACTFPAVTPAHVSHIISLSCSKNFSPERRWQRWAGGAKVGALTARFQGALLSQPTTMVRQGDSAGLRIRALKMAFVLLVFSLFICCLFSDDVLVKSSFENP

SEQ ID NO: 753455 - protein, 163 aa, Homo sapiens
GLCLSLWSQEDSADLKCQLHFAKEESALMCKKLTKLAKENDSMKEELLKYRSLYGDLDSALSAEELADAPHSRETELKVHLKLVEEEANLLSRRIVELEVENRGLRAEMDDMKDHGGGCGGPEARLAFSALGGGECGESLAELRRHLQFVEEEAELLRRSSAE

SEQ ID NO: 753456 - protein, 117 aa, Homo sapiens
GSEHEQVRDLSCKTHTDGASAYLGRRFKHKLAKTCQTSSMVLFNQQPPDVSEYLCAVNQTSLSLLWADLESVVYTLQYLTASLCLCLNPGGSVIATARPVLMWPRRQLLRQTKPQKV

SEQ ID NO: 753457 - protein, 369 aa, Homo sapiens
MLKPSLPFTSLLFLQLPLLGVGLNTTILTPNGNEDTTADFFLTTMPTDSLSVSTLPLPEVQCFVFNVEYMNCTWNSSSEPQPTNLTLHYWYKNSDNDKVQKCSHYLFSEEITSGCQLQKKEIHLYQTFVVQLQDPREPRRQATQMLKLQNLVIPWAPENLTLHKLSESQLELNWNNRFLNHCLEHLVQYRTDWDHSWTEQSVDYRHKFSLPSVDGQKRYTFRVRSRFNPLCGSAQHWSEWSHPIHWGSNTSKENPFLFALEAVVISVGSMGLIISLLCVYFWLERTMPRIPTLKNLEDLVTEYHGNFSAWSGVSKGLAESLQPDYSERLCLVSEIPPKGGALGEGPGASPCNQHSPYWAPPCYTLKPET

SEQ ID NO: 753458 - protein, 369 aa, Homo sapiens; identical to SEQ ID NO: 753457

SEQ ID NO: 753459 - protein, 345 aa, Homo sapiens [sequence omitted]

SEQ ID NO: 753460 - protein, 318 aa, Homo sapiens
MLKPSLPFTSLLFLQLPLLGVGLNTTILTPNGNEDTTADFFLTTMPTDSLSVSTLPLPEVQCFVFNVEYMNCTWNSSSEPQPTNLTLHYWYKNSDNDKVQKCSHYLFSEEITSGCQLQKKEIHLYQTFVVQLQDPREPRRQATQMLKLQNLVIPWAPENLTLHKLSESQLELNWNNRFLNHCLEHLVQYRTDWDHSWTEQSVDYRHKFSLPSVDGQKRYTFRVRSRFNPLCGSAQHWSEWSHPIHWGSNTSKENPFLFALEAVVISVGSMGLIISLLCVYFWLERTMPRIPTLKNLEDLVTEYHGNFSARSGVFKGTG

SEQ ID NO: 753461 - protein, 357 aa, Homo sapiens [sequence omitted]

SEQ ID NO: 753462 - protein, 71 aa, Homo sapiens
VSVDDTGTFLAWSGVSKGLAESLQPDYSERLCLVSEIPPKGGALGEGPGASPCNQHSPYWAPPCYTLKPET

SEQ ID NO: 753463 - protein, 369 aa, Homo sapiens; identical to SEQ ID NO: 753457

SEQ ID NO: 753464 - protein, 343 aa, Homo sapiens
MLKPSLPFTSLLFLQLPLLGVGLNTTILTPNGNEDTTADFFLTTMPTDSLSVSTLPLPEVQCFVFNVEYMNCTWNSSSEPQPTNLTLHYWYKNSDNDKVQKCSHYLFSEEITSGCQLQKKEIHLYQTFVVQLQDPREPRRQATQMLKLQNLVIPWAPENLTLHKLSESQLELNWNNRFLNHCLEHLVQYRTDWDHSWTEQSVDYRHKFSLPSVDGQKRYTFRVRSRFNPLCGSAQHWSEWSHPIHWGSNTSKENPFLFALEAVVISVGSMGLIISLLCVYFWLERTMPRIPTLKNLEDLVTEYHGNFSAWSGVSKGLAESLHLKPEPQSSDRRTPGSCSPKWY

SEQ ID NO: 753465 - protein, 379 aa, Homo sapiens
RVVSTQSGHYVRGVSTGTQLRQQLRLPLLGVGLNTTILTPNGNEDTTADFFLTTMPTDSLSVSTLPLPEVQCFVFNVEYMNCTWNSSSEPQPTNLTLHYWYKNSDNDKVQKCSHYLFSEEITSGCQLQKKEIHLYQTFVVQLQDPREPRRQATQMLKLQNLVIPWAPENLTLHKLSESQLELNWNNRFLNHCLEHLVQYRTDWDHSWTEQSVDYRHKFSLPSVDGQKRYTFRVRSRFNPLCGSAQHWSEWSHPIHWGSNTSKENPFLFALEAVVISVGSMGLIISLLCVYFWLERTMPRIPTLKNLEDLVTEYHGNFSAWSGVSKGLAESLQPDYSERLCLVSEIPPKGGALGEGPGASPCNQHSPYWAPPCYTLKPET

SEQ ID NO: 753466 - protein, 348 aa, Homo sapiens
MGMKTPQLVGNLGLEGADFFLTTMPTDSLSVSTLPLPEVQCFVFNVEYMNCTWNSSSEPQPTNLTLHYWYKNSDNDKVQKCSHYLFSEEITSGCQLQKKEIHLYQTFVVQLQDPREPRRQATQMLKLQNLVIPWAPENLTLHKLSESQLELNWNNRFLNHCLEHLVQYRTDWDHSWTEQSVDYRHKFSLPSVDGQKRYTFRVRSRFNPLCGSAQHWSEWSHPIHWGSNTSKENPFLFALEAVVISVGSMGLIISLLCVYFWLERTMPRIPTLKNLEDLVTEYHGNFSAWSGVSKGLAESLQPDYSERLCLVSEIPPKGGALGEGPGASPCNQHSPYWAPPCYTLKPET

SEQ ID NO: 753467 - protein, 501 aa, Homo sapiens
MVLWGPVLGALLVVIAGYLCLPGMLRQRRPWEPPLDKGTVPWLGHAMAFRKNMFEFLKRMRTKHGDVFTVQLGGQYFTFVMDPLSFGPILKDTQRKLDFGQYAKKLVLKVFGYRSVQGDHEMIHSASTKHLRGDGLKDLNETMLDSLSFVMLTSKGWSLDASCWHEDSLFRFCYYILFTAGYLSLFGYTKDKEQDLLQAGELFMEFRKFDLLFPRFVYSLLWPREWLEVGRLQRLFHKMLSVSHSQEKEGISNWLGNMLQFLREQGVPSAMQDKFNFMMLWASQGNTGPTSFWALLYLLKHPEAIRAVREEATQVLGEARLETKQSFAFKLGALQHTPVLDSVVEETLRLRAAPTLLRLVHEDYTLKMSSGQEYLFRHGDILALFPYLSVHMDPDIHPEPTVFKYDRFLNPNGSRKVDFFKTGKKIHHYTMPWGSGVSICPGRFFALSEVKLFILLMVTHFDLELVDPDTPLPHVDPQRWGFGTMQPSHDVRFRYRLHPTE

SEQ ID NO: 753468 - protein, 72 aa, Homo sapiens
MTSEQNASPFPHLPSMAFQSVSSSALPRAHFLVQHSCQANRPILVPCPKLCRLGSSCLLLASPALLPSLPGK

SEQ ID NO: 753469 - protein, 148 aa, Homo sapiens
TLLGEVSAAGCGFSFLQRLTQVGMGSFSGSESGCDAWNAAAILAPEGDANMWRKAEQTAEQQNWACMLCPERARQSTAQPIPGQKNGTAWKAGPNRTCPLGLGRGPDEGCRTGWTPRPLLPAVTTSVWVVGTCLNFILSTVYKFCNKP

SEQ ID NO: 753470 - protein, 106 aa, Homo sapiens
MASSGAGDPLDSKRGEAPFAQRIDPTREKLTPEQLHSMRQAELAQWQKVLPRRRTRNIVTGLGIGALVLAIYGYTFYSISQERFLDELEDEAKAARARALARASGS

SEQ ID NO: 753471 - protein, 106 aa, Homo sapiens; identical to SEQ ID NO: 753470

SEQ ID NO: 753472 - protein, 106 aa, Homo sapiens; identical to SEQ ID NO: 753470

SEQ ID NO: 753473 - protein, 106 aa, Homo sapiens; identical to SEQ ID NO: 753470

SEQ ID NO: 753474 - protein, 106 aa, Homo sapiens; identical to SEQ ID NO: 753470

SEQ ID NO: 753475 - protein, 119 aa, Homo sapiens
GNMASSGAGDPLDSKRGEAPFAQRIDPTREKLTPEQLHSMRQAELAQWQKVLPRRRTRNIVTGLGIGALVLAICIRPCCRLKGTAYRGRGTECARGLNHPFNFGVKWVVLSFVIPKVLF

SEQ ID NO: 753476 - protein, 106 aa, Homo sapiens; identical to SEQ ID NO: 753470

SEQ ID NO: 753477 - protein, 106 aa, Homo sapiens; identical to SEQ ID NO: 753470

SEQ ID NO: 753478 - protein, 106 aa, Homo sapiens; identical to SEQ ID NO: 753470

SEQ ID NO: 753479 - protein, 361 aa, Homo sapiens
MDPLGAAKPQWPWRRCLAALLFQLLVAVCFFSYLRVSRDDATGSPRAPSGSSRQDTTPTRPTLLILLWTWPFHIPVALSRCSEMVPGTADCHITADRKVYPQADTVIVHHWDIMSNPKSRLPPSPRPQGQRWIWFNLEPPPNCQHLEALDRYFNLTMSYRSDSDIFTPYGWLEPWSGQPAHPPLNLSAKTELVAWAVSNWKPDSARVRYYQSLQAHLKVDVYGRSHKPLPKGTMMETLSRYKFYLAFENSLHPDYITEKLWRNALEAWAVPVVLGPSRSNYERFLPPDAFIHVDDFQSPKDLARYLQELDKDHARYLSYFRWRETLRPRSFSWALDFCKACWKLQQESRYQTVRSIAAWFT

SEQ ID NO: 753480 - protein, 361 aa, Homo sapiens; identical to SEQ ID NO: 753479

SEQ ID NO: 753481 - protein, 361 aa, Homo sapiens; identical to SEQ ID NO: 753479

SEQ ID NO: 753482 - protein, 361 aa, Homo sapiens; identical to SEQ ID NO: 753479

SEQ ID NO: 753483 - protein, 361 aa, Homo sapiens; identical to SEQ ID NO: 753479

SEQ ID NO: 753484 - protein, 96 aa, Homo sapiens
KKEDTEEGKRGKVRRGGSGDHQEGNRETEEVWVARACEKEVQSRVGDRDGGGVEQLGEEPGSAGRDGMDRSSVQAGGGAAVQGGRWTVWGPDKLHN

SEQ ID NO: 753485 - protein, 119 aa, Homo sapiens
PLYSSLGGRVRLCPQKTNKQTKNHITPRDCNHLRASHCTWPDVQTLFSGDPNPPRSRPSLPPHPRFFPHPLICRAATMQAFSCSSDTPSLVPPYGFAFAVPYVCNARPEPGFPGSGNRG

SEQ ID NO: 753486 - protein, 925 aa, Homo sapiens
AGTGHARRAVGTGCERAGGSRLHRQQLARRSRPARGRRCARLGDRCSLAGCRRRLRGSRTTGWARIRLGGFLPVPSHLVWARGVSGESRGPEGGSENTQVKDTMNGHISNHPSSFGMYPSQMNGYGSSPTFSQTDREHGSKTSAKALYEQRKNYARDSVSSVSDISQYRVEHLTTFVLDRKDAMITVDDGIRKLKLLDAKGKVWTQDMILQVDDRAVSLIDLESKNELENFPLNTIQHCQAVMHSCSYDSVLALVCKEPTQNKPDLHLFQCDEVKANLISEDIESAISDSKGGKQKRRPDALRMISNADPSIPPPPRAPAPAPPGTVTQVDVRSRVAAWSAWAADQGDFEKPRQYHEQEETPEMMAARIDRDVQILNHILDDIEFFITKLQKAAEAFSELSKRKKNKKGKRKGPGEGVLTLRAKPPPPDEFLDCFQKFKHGFNLLAKLKSHIQNPSAADLVHFLFTPLNMVVQATGGPELASSVLSPLLNKDTIDFLNYTVNGDERQLWMSLGGTWMKARAEWPKEQFIPPYVPRFRNGWEPPMLNFMGATMEQDLYQLAESVANVAEHQRKQEIKRLSTEHSSVSEYHPADGYAFSSNIYTRGSHLDQGEAAVAFKPTSNRHIDRNYEPLKTQPKKYAKSKYDFVARNNSELSVLKDDILEILDDRKQWWKVRNASGDSGFVPNNILDIVRPPESGLGRADPPYTHTIQKQRMEYGPRPADTPPAPSPPPTPAPVPVPLPPSTPAPVPVSKVPANITRQNSSSSDSGGSIVRDSQRHKQLPVDRRKSQMEEVQDELIHRLTIGRSAAQKKFHVPRQNVPVINITYDSTPEDVKTWLQSKGFNPVTVNSLGVLNGAQLFSLNKDELRTVCPEGARVYSQITVQKAALEDSSGSSELQEIMRRRQEKISAAASDSGVESFDEGSSH

SEQ ID NO: 753487 - protein, 879 aa, Homo sapiens
AGTGHARRAVGTGCERAGGSRLHRQQLARRSRPARGRRCARLGDRCSLAGCRRRLRGSRTTGWARIRLGGFLPVPSHLVWARGVSGESRGPEGGSENTQVKDTMNGHISNHPSSFGMYPSQMNGYGSSPTFSQTDREHGSKTSAKALYEQRKNYARDSVSSVSDISQYRVEHLTTFVLDRKDAMITVDDGIRKLKLLDAKGKVWTQDMILQVDDRAVSLIDLESKNELENFPLNTIQHCQAVMHSCSYDSVLALVCKEPTQNKPDLHLFQCDEVKANLISEDIESAISDSKGGKQKRRPDALSWKPRQYHEQEETPEMMAARIDRDVQILNHILDDIEFFITKLQKAAEAFSELSKRKKNKKGKRKGPGEGVLTLRAKPPPPDEFLDCFQKFKHGFNLLAKLKSHIQNPSAADLVHFLFTPLNMVVQATGGPELASSVLSPLLNKDTIDFLNYTVNGDERQLWMSLGGTWMKARAEWPKEQFIPPYVPRFRNGWEPPMLNFMGATMEQDLYQLAESVANVAEHQRKQEIKRLSTEHSSVSEYHPADGYAFSSNIYTRGSHLDQGEAAVAFKPTSNRHIDRNYEPLKTQPKKYAKSKYDFVARNNSELSVLKDDILEILDDRKQWWKVRNASGDSGFVPNNILDIVRPPESGLGRADPPYTHTIQKQRMEYGPRPADTPPAPSPPPTPAPVPVPLPPSTPAPVPVSKVPANITRQNSSSSDSGGSIVRDSQRHKQLPVDRRKSQMEEVQDELIHRLTIGRSAAQKKFHVPRQNVPVINITYDSTPEDVKTWLQSKGFNPVTVNSLGVLNGAQLFSLNKDELRTVCPEGARVYSQITVQKAALEDSSGSSELQEIMRRRQEKISAAASDSGVESFDEGSSH

SEQ ID NO: 753488 - protein, 925 aa, Homo sapiens; identical to SEQ ID NO: 753486

SEQ ID NO: 753489 - protein, 561 aa, Homo sapiens
MAARIDRDVQILNHILDDIEFFITKLQKAAEAFSELSKRKKNKKGKRKGPGEGVLTLRAKPPPPDEFLDCFQKFKHGFNLLAKLKSHIQNPSAADLVHFLFTPLNMVVQATGGPELASSVLSPLLNKDTIDFLNYTVNGDERQLWMSLGGTWMKARAEWPKEQFIPPYVPRFRNGWEPPMLNFMGATMEQDLYQLAESVANVAEHQRKQEIKRLSTEHSSVSEYHPADGYAFSSNIYTRGSHLDQGEAAVAFKPTSNRHIDRNYEPLKTQPKKYAKSKYDFVARNNSELSVLKDDILEILDDRKQWWKVRNASGDSGFVPNNILDIVRPPESGLGRADPPYTHTIQKQRMEYGPRPADTPPAPSPPPTPAPVPVPLPPSTPAPVPVSKVPANITRQNSSSSDSGGSIVRDSQRHKQLPVDRRKSQMEEVQDELIHRLTIGRSAAQKKFHVPRQNVPVINITYDSTPEDVKTWLQSKGFNPVTVNSLGVLNGAQLFSLNKDELRTVCPEGARVYSQITVQKAALEDSSGSSELQEIMRRRQEKISAAASDSGVESFDEGSSH

SEQ ID NO: 753490 - protein, 416 aa, Homo sapiens [sequence omitted]

SEQ ID NO: 753491 - protein, 136 aa, Homo sapiens [sequence omitted]

SEQ ID NO: 753492 - protein, 291 aa, Homo sapiens
TLPETPPLPLRSEMRGLTVAKRGFDILEILDDRKQWWKVRNASGDSGFVPNNILDIVRPPESGLGRADPPYTHTIQKQRMEYGPRPADTPPAPSPPPTPAPVPVPLPPSTPAPVPVSKVPANITRQNSSSSDSGGSIVRDSQRHKQLPVDRRKSQMEEVQDELIHRLTIGRSAAQKKFHVPRQNVPVINITYDSTPEDVKTWLQSKGFNPVTVNSLGVLNGAQLFSLNKDELRTVCPEGARVYSQITVQKAALEDSSGSSELQEIMRRRQEKISAAASDSGVESFDEGSSH

SEQ ID NO: 753493 - protein, 276 aa, Homo sapiens
AGTGHARRAVGTGCERAGGSRLHRQQLARRSRPARGRRCARLGDRCSLAGCRRRLRGSRTTGWARIRLGGFLPVPSHLVWARGVSGESRGPEGGSENTQVKDTMNGHISNHPSSFGMYPSQMNGYGSSPTFSQTDREHGSKTSAKALYEQRKNYARDSVSSVSDISQYRVEHLTTFVLDRKDAMITVDDGIRKLKLLDAKGKVWTQDMILQVDDRAVSLIDLESKNELENFPLNTIQHCQAVMHSCSYDSVLALVCKEPTQNKPDLHLFQCDEVKI

SEQ ID NO: 753494 - protein, 925 aa, Homo sapiens; identical to SEQ ID NO: 753486

SEQ ID NO: 753495 - protein, 854 aa, Homo sapiens
AGTGHARRAVGTGCERAGGSRLHRQQLARRSRPARGRRCARLGDRCSLAGCRRRLRGSRTTGWARIRLGGFLPVPSHLVWARGVSGESRGPEGGSENTQVKDTMNGHISNHPSSFGMYPSQMNGYGSSPTFSQTDREHGSKTSAKALYEQRKNYARDSVSSVSDISQYRVEHLTTFVLDRKDAMITVDDGIRKLKLLDAKGKVWTQDMILQVDDRAVSLIDLESKNELENFPLNTIQHCQAVMHSCSYDSVLALVCKEPTQNKPDLHLFQCDEVKANLISEDIESAISDSKGGKQKRRPDALRMISNADPSIPPPPRAPAPAPPGTVTQVDVRSRVAAWSAWAADQGDFEKPRQYHEQEETPEMMAARIDRDVQILNHILDDIEFFITKLQKAAEAFSELSKRKKNKKGKRKGPGEGVLTLRAKPPPPDEFLDCFQKFKHGFNLLAKLKSHIQNPSAADLVHFLFTPLNMVVQATGGPELASSVLSPLLNKDTIDFLNYTVNGDERQLWMSLGGTWMKARAEWPKEQFIPPYVPRFRNGWEPPMLNFMGATMEQDLYQLAESVANVAEHQRKQEIKRLSTEHSSVSEYHPADGYAFSSNIYTRGSHLDQGEAAVAFKPTSNRHIDRNYEPLKTQPKKYAKSKYDFVARNNSELSVLKDDILEILDDRKQWWKVRNASGDSGFVPNNILDIVRPPESGLGRADPPYTHTIQKQGWSMGQEPVDMPLVPKLLQTSPGLDPVRMSMQHRARGKRSRHYRRSKTAIRGQHGGDELLERQHRTQTSAWTTRNPTEGRQRNHQTRRVRPHNHAAGRGPQHQTTGDVSVAYNDSTDESNQEEQRTTLGSLIKATHHYLKNK

SEQ ID NO: 753496 - protein, 352 aa, Homo sapiens
AGTGHARRAVGTGCERAGGSRLHRQQLARRSRPARGRRCARLGDRCSLAGCRRRLRGSRTTGWARIRLGGFLPVPSHLVWARGVSGESRGPEGGSENTQVKDTMNGHISNHPSSFGMYPSQMNGYGSSPTFSQTDREHGSKTSAKALYEQRKNYARDSVSSVSDISQYRVEHLTTFVLDRKDAMITVDDGIRKLKLLDAKGKVWTQDMILQVDDRAVSLIDLESKNELENFPLNTIQHCQAVMHSCSYDSVLALVCKEPTQNKPDLHLFQCDEVKANLISEDIESAISDSKGGKQKRRPDALRMISNADPSIPPPPRAPAPAPPGTVTQVDVRSRVAAWSAWAADQGDCESS

SEQ ID NO: 753497 - protein, 172 aa, Homo sapiens
GGSRLHRQQLARRSRPARGRRCARLGDRCSLAGCRRRLRGSRTTGWARIRLGGFLPVPSHLVWARGVSGESRGPEGGSEVRAPWRKAPVPGSGGFDFLDFKNPPLCAGIGAVPGAASASLHFDCFQLVLAARCGRALRPEASARRVRASCGARADPRPGLREAGQGGFAVAQ

SEQ ID NO: 753498 - protein, 119 aa, Homo sapiens
MAWRVPGVRPASTFFPQVLRASSELPNRLPEGSTVGPKPDSSWEAGSQGNWGLTSSGAGQDSSAQKLGILSVQISLKIWTWEKPSGWGHLHAAVTGASCCSPLSQGGCHLPCHCSSGQA

SEQ ID NO: 753499 - protein, 350 aa, Homo sapiens
MGCFFSKRRKADKESRPENEEERPKQYSWDQREKVDPKDYMFSGLKDETVGRLPGTVAGQQFLIQDCENCNIYIFDHSATVTIDDCTNCIIFLGPVKGSVFFRNCRDCKCTLACQQFRVRDCRKLEVFLCCATQPIIESSSNIKFGCFQWYYPELAFQFKDAGLSIFNNTWSNIHDFTPVSGELNWSLLPEDAVVQDYVPIPTTEELKAVRVSTEANRSIVPISRGQRQKSSDESCLVVLFAGDYTIANARKLIDEMVGKGFFLVQTKEVSMKAEDAQRVFREKAPDFLPLLNKGPVIALEFNGDGAVEVCQLIVNEIFNGTKMFVSESKETASGDVDSFYNFADIQMGI

SEQ ID NO: 753500 - protein, 103 aa, Homo sapiens
MEKAAQVTMLRPPSSQKLAPLGIGNCWLILEQSSLGMEKEEEAALTLGSDERVLQKLAELSNTLITKASGHLRSGGHGTVVPEPAQDTFKCPQKDIPGEPMKG

SEQ ID NO: 753501 - protein, 104 aa, Homo sapiens
MVQQLPLLLQEGNMKHSRAVWKCEQPRLGESHMFPCSSQELQNGLQPSVLLNNITHLKQRIHGPSRSKLLTQLKSMENVSYGISTNIPSKGKRLCPSEDEEYLR

SEQ ID NO: 753502 - protein, 727 aa, Homo sapiens
MEASVILPILKKKLAFLSGGKDRRSGLILTIPLCLEQTNMDELSVTLDYLLSIPSEKCKARGFTVIVDGRKSQWNVVKTVVVMLQNVVPAEVSLVCVVKPDEFWDKKVTHFCFWKEKDRLGFEVILVSANKLTRYIEPCQLTEDFGGSLTYDHMDWLNKRLVFEKFTKESTSLLDELALINNGSDKGNQQEKERSVDLNFLPSVDPETVLQTGHELLSELQQRRFNGSDGGVSWSPMDDELLAQPQVMKLLDSLREQYTRYQEVCRQRSKRTQLEEIQQKVMQVVNWLEGPGSEQLRAQWGIGDSIRASQALQQKHEEIESQHSEWFAVYVELNQQIAALLNAGDEEDLVELKSLQQQLSDVCYRQASQLEFRQNLLQAALEFHGVAQDLSQQLDGLLGMLCVDVAPADGASIQQTLKLLEEKLKSVDVGLQGLREKGQGLLDQISNQASWAYGKDVTIENKENVDHIQGVMEDMQLRKQRCEDMVDVRRLKMLQMVQLFKCEEDAAQAVEWLSELLDALLKTHIRLGDDAQETKVLLEKHRKFVDVAQVQNWLSSFSTSSVFESFLHDYNVTLPSKYKKSTYDYGRQLLQATVVLCQSLRCTSRSSGDTLPRLNRVWKQFTIASEERVHRLEMAIAFHSNAEKILQDCPEEPEAINDEEQFDEIEAVGKSLLDRLTVPVVYPDGTEQYFGSPSDMASTAENIRDRMKLVNLKRQQLRHPEMVTTES

SEQ ID NO: 753503 - protein, 127 aa, Homo sapiens
MEASVILPILKKKLAFLSGGKDRRSGLILTIPLCLEQTNMDELSVTLDYLLSIPSEKCKARGFTVIVDGRKSQWNVVKTVVVMLQNVVPAEVSLVCVVKPDEFWDKKVTHFCFWKEKDRLGFEEDIL

SEQ ID NO: 753504 - protein, 62 aa, Homo sapiens
SRVSPYPGCTSRSSGDTLPRLNRVWKQFTIASEERVHRLEMAIAFHSNAEKILQDCPEVRLG

SEQ ID NO: 753505 - protein, 696 aa, Homo sapiens
MEASVILPILKKKLAFLSGGKDRRSGLILTIPLCLEQTNMDELSVTLDYLLSIPSEKCKARGFTVIVDGRKSQWNVVKTVVVMLQNVVPAEVSLVCVVKPDEFWDKKVTHFCFWKEKDRLGFEVILVSANKLTRYIEPCQLTEDFGGSLTYDHMDWLNKRLVFEKFTKESTSLLDELALINNGSDKGNQQEKERSVDLNFLPSVDPETVLQTGHELLSELQQRRFNGSDGGVSWSPMDDELLAQPQVMKLLDSLREQYTRYQEVCRQRSKRTQLEEIQQKVMQVVNWLEGPGSEQLRAQWGIGDSIRASQALQQKHEEIESQHSEWFAVYVELNQQIAALLNAGDEEDLVELKSLQQQLSDVCYRQASQLEFRQNLLQAALEFHGVAQDLSQQLDGLLGMLCVDVAPADGASIQQTLKLLEEKLKSVDVGLQGLREKGQGLLDQISNQASWAYGKDVTIENKENVDHIQGVMEDMQLRKQRCEDMVDVRRLKMLQMVQLFKCEEDAAQAVEWLSELLDALLKTHIRLGDDAQETKVLLEKHRKFVDVAQSTYDYGRQLLQATVVLCQSLRCTSRSSGDTLPRLNRVWKQFTIASEERVHRLEMAIAFHSNAEKILQDCPEEPEAINDEEQFDEIEAVGKSLLDRLTVPVVYPDGTEQYFGSPSDMASTAENIRDRMKLVNLKRQQLRHPEMVTTES

SEQ ID NO: 753506 - protein, 696 aa, Homo sapiens; identical to SEQ ID NO: 753505

SEQ ID NO: 753507 - protein, 334 aa, Homo sapiens
MEASVILPILKKKLAFLSGGKDRRSGLILTIPLCLEQTNMDELSVTLDYLLSIPSEKCKARGFTVIVDGRKSQWNVVKTVVVMLQNVVPAEVSLVCVVKPDEFWDKKVTHFCFWKEKDRLGFEVILVSANKLTRYIEPCQLTEDFGGSLTYDHMDWLNKRLVFEKFTKESTSLLDELALINNGSDKGNQQEKERSVDLNFLPSVDPETVLQTGHELLSELQQRRFNGSDGGVSWSPMDDELLAQPQVMKLLDSLREQYTRYQEVCRQRSKRTQLEEIQQKVMQVVNWLEGPGSEQLRAQWGIGDSIRASQALQQKHEEIESQHSVRGFFLCKLQ

SEQ ID NO: 753508 - protein, 182 aa, Homo sapiens
MEFSSPSREECPKPLSRVSIMAGSLTGLLLLQAVSWASGARPCIPKSFGYSSVVCVCNATYCDSFDPPTFPALGTFSRYESTRSGRRMELSMGPIQANHTGTGLLLTLQPEQKFQKVKGFGGAMTDAAALNILALSPPAQNLLLKSYFSEEGIGYNIIRVPMGSCDFSIRTYTYADTPDDFQ

SEQ ID NO: 753509 - protein, 182 aa, Homo sapiens; identical to SEQ ID NO: 753508

SEQ ID NO: 753510 - protein, 182 aa, Homo sapiens; identical to SEQ ID NO: 753508

SEQ ID NO: 753511 - protein, 120 aa, Homo sapiens
SHLRLQKEQLAPGSNVPSSCLTASSPLPSFLGSKWTPTAPAPLGAPAPVPAPASAKSANEPPARRAAAPAAPWAVPSVPRAASAKGRRRSAAAVPDVGTALLPDVNRATCTNLDFFFIQP

SEQ ID NO: 753512 - protein, 120 aa, Homo sapiens; identical to SEQ ID NO: 753511

SEQ ID NO: 753513 - protein, 85 aa, Homo sapiens
GRLLLLNSRPRRPRNGPQLLLRHWGLLLLCQLLQVQRVQMNLLQEELLLLLPHGLCQVCPGLRLQRGVGEVQLLCLMWGQPCSQM

SEQ ID NO: 753514 - protein, 81 aa, Homo sapiens
QEEPLNEIISMAELGAREGVGVDFSSCESHSISTWKLRKREGVEKNQTRDTVPDAFPSGCALLLFAEEWLWSAPAALDGLP

SEQ ID NO: 753515 - protein, 72 aa, Homo sapiens
RHLLQEVEVTWKVTLILPPPHRVSAYPLYRLECLAWVPGPLRASVSPPVILVRTQPLPAHLHGAGATKQTGS

SEQ ID NO: 753516 - protein, 75 aa, Homo sapiens
GKGLSVGEGYTREDRHLGFIDTTLDARSHCHYFPVTFPPSFFHQATNSKVMVTLRLPALCGVHDNTCETYTCFSS

SEQ ID NO: 753517 - protein, 586 aa, Homo sapiens
AALGRKCRSAAGAKRGRRAALAGEAGGLSVAAAGKPRGGGARPGTSPGPAPPSLSMDEESLESALQTYRAQLQQVELALGAGLDSSEQADLRQLQGDLKELIELTEASLVSVRKSRLLAALDEERPGRQEDAEYQAFREAITEAVEAPAAARGSGSETVPKAEAGPESAAGGQEEEEGEDEEELSGTKVSAPYYSSWGTLEYHNAMVVGTEEAEDGSAGVRVLYLYPTHKSLKPCPFFLEGKCRFKENCRFSHGQVVSLDELRPFQDPDLSSLQAGSACLAKHQDGLWHAARITDVDNGYYTVKFDSLLLREAVVEGDGILPPLRTEATESDSDSDGTGDSSYARVVGSDAVDSAQSSALCPSLAVVGSDAVDSGTCSSAFAGWEVHTRGIGSRLLTKVGYEFGKGLGRHAEGRVEPIHAVVLPRGKSLDQCVETLQKQTRVGKAGTNKPPRCRGRGARPGGRPAPRNVFDFLNEKLQGQAPGALEAGAAPAGRRSKDMYHASKSAKRALSLRLFQTEEKIERTQRDIRSIQEALARNAGRHSVASAQLQEKLAGAQRQLGQLRAQEAGLQQERRKADTHKKMTEF

SEQ ID NO: 753518 - protein, 563 aa, Homo sapiens
GGAREEVPIGCWGEKGAPGRSSRPGPAPPSLSMDEESLESALQTYRAQLQQVELALGAGLDSSEQADLRQLQGDLKELIELTEASLVSVRKSRLLAALDEERPGRQEDAEYQAFREAITEAVEAPAAARGSGSETVPKAEAGPESAAGGQEEEEGEDEEELSGTKVSAPYYSSWGTLEYHNAMVVGTEEAEDGSAGVRVLYLYPTHKSLKPCPFFLEGKCRFKENCRFSHGQVVSLDELRPFQDPDLSSLQAGSACLAKHQDGLWHAARITDVDNGYYTVKFDSLLLREAVVEGDGILPPLRTEATESDSDSDGTGDSSYARVVGSDAVDSAQSSALCPSLAVVGSDAVDSGTCSSAFAGWEVHTRGIGSRLLTKVGYEFGKGLGRHAEGRVEPIHAVVLPRGKSLDQCVETLQKQTRVGKAGTNKPPRCRGRGARPGGRPAPRNVFDFLNEKLQGQAPGALEAGAAPAGRRSKDMYHASKSAKRALSLRLFQTEEKIERTQRDIRSIQEALARNAGRHSVASAQLQEKLAGAQRQLGQLRAQEAGLQQERRKADTHKKMTEF

SEQ ID NO: 753519 - protein, 101 aa, Homo sapiens
KTPKPFQRSSRLPLPLLAQSSKRAEWFGMTSCCPGLPWVSSPHISGAAFLSHPSCGSGGHRCDVEGKSHKPWQHTHGTNFAGVQNAKAEGACLLPPTFQRV

SEQ ID NO: 753520 - protein, 695 aa, Homo sapiens
MADIKTGIFAKNVQKRLNRAQEKVLQKLGKADETKDEQFEEYVQNFKRQEAEGTRLQRELRGYLAAIKGMQEASMKLTESLHEVYEPDWYGREDVKMVGEKCDVLWEDFHQKLVDGSLLTLDTYLGQFPDIKNRIAKRSRKLVDYDSARHHLEALQSSKRKDESRISKAEEEFQKAQKVFEEFNVDLQEELPSLWSRRVGFYVNTFKNVSSLEAKFHKEIAVLCHKLYEVMTKLGDQHADKAFTIQGAPSDSGPLRIAKTPSPPEEPSPLPSPTASPNHTLAPASPAPARPRSPSQTRKGPPVPPLPKVTPTKELQQENIISFFEDNFVPEISVTTPSQNEVPEVKKEETLLDLDFDPFKPEVTPAGSAGVTHSPMSQTLPWDLWTTSTDLVQPASGGSFNGFTQPQDTSLFTMQTDQSMICNLAESEQAPPTEPKAEEPLAAVTPAVGLDLGMDTRAEEPVEEAVIIPGADADAAVGTLVSAAEGAPGEEAEAEKATVPAGEGVSLEEAKIGTETTEGAESAQPEAEELEATVPQEKVIPSVVIEPASNHEEEGENEITIGAEPKETTEDAAPPGPTSETPELATEQKPIQDPQPTPSAPAMGAADQLASAREASQELPPGFLYKVETLHDFEAANSDELTLQRGDVVLVVPSDSEADQDAGWLVGVKESDWLQYRDLATYKGLFPENFTRRLD

SEQ ID NO: 753521 - protein, 653 aa, Homo sapiens
MADIKTGIFAKNVQKRLNRAQEKVLQKLGKADETKDEQFEEYVQNFKRQEAEGTRLQRELRGYLAAIKGMQEASMKLTESLHEVYEPDWYGREDVKMVGEKCDVLWEDFHQKLVDGSLLTLDTYLGQFPDIKNRIAKRSRKLVDYDSARHHLEALQSSKRKDESRISKAEEEFQKAQKVFEEFNVDLQEELPSLWSRRVGFYVNTFKNVSSLEAKFHKEIAVLCHKLYEVMTKLGDQHADKAFTIQGAPSDSGPLRIAKTPSPPEEPSPLPSPTASPNHTLAPASPAPARPRSPSQTRKGPPVPPLPKVTPTKELQQENIISFFEDNFVPEISVTTPSQNEVPEVKKEETLLDLDFDPFKPEVTPAGSAGVTHSPMSQTLPWDLWTTSTDLVQPASGGSFNGFTQPQDTSLFTMQTDQSMICNLIIPGADADAAVGTLVSAAEGAPGEEAEAEKATVPAGEGVSLEEAKIGTETTEGAESAQPEAEELEATVPQEKVIPSVVIEPASNHEEEGENEITIGAEPKETTEDAAPPGPTSETPELATEQKPIQDPQPTPSAPAMGAADQLASAREASQELPPGFLYKVETLHDFEAANSDELTLQRGDVVLVVPSDSEADQDAGWLVGVKESDWLQYRDLATYKGLFPENFTRRLD

SEQ ID NO: 753522 - protein, 651 aa, Homo sapiens
SSSVPGLLAKNVRTTQVRAEKVLQKLGKADETKDEQFEEYVQNFKRQEAEGTRLQRELRGYLAAIKGMQEASMKLTESLHEVYEPDWYGREDVKMVGEKCDVLWEDFHQKLVDGSLLTLDTYLGQFPDIKNRIAKRSRKLVDYDSARHHLEALQSSKRKDESRISKAEEEFQKAQKVFEEFNVDLQEELPSLWSRRVGFYVNTFKNVSSLEAKFHKEIAVLCHKLYEVMTKLGDQHADKAFTIQGAPSDSGPLRIAKTPSPPEEPSPLPSPTASPNHTLAPASPAPARPRSPSQTRKGPPVPPLPKVTPTKELQQENIISFFEDNFVPEISVTTPSQNEVPEVKKEETLLDLDFDPFKPEVTPAGSAGVTHSPMSQTLPWDLWTTSTDLVQPASGGSFNGFTQPQDTSLFTMQTDQSMICNLIIPGADADAAVGTLVSAAEGAPGEEAEAEKATVPAGEGVSLEEAKIGTETTEGAESAQPEAEELEATVPQEKVIPSVVIEPASNHEEEGENEITIGAEPKETTEDAAPPGPTSETPELATEQKPIQDPQPTPSAPAMGAADQLASAREASQELPPGFLYKVETLHDFEAANSDELTLQRGDVVLVVPSDSEADQDAGWLVGVKESDWLQYRDLATYKGLFPENFTRRLD

SEQ ID NO: 753523 - protein, 868 aa, Homo sapiens
ACLEQQRLQGQAATMSLSEEQARSFLDQNPDFARQYFGKKLSPENVGRGCEDGCPPDCDSLRDLCQVEESTALLELVQDMQESINMERVVFKVLRRLCTLLQADRCSLFMYRQRNGVAELATRLFSVQPDSVLEDCLVPPDSEIVFPLDIGVVGHVAQTKKMVNVEDVAECPHFSSFADELTDYKTKNMLATPIMNGKDVVAVIMAVNKLNGPFFTSEDEDVFLKYLNFATLYLKIYHLSYLHNCETRRGQVLLWSANKVFEELTDIERQFHKAFYTVRAYLNCERYSVGLLDMTKEKEFFDVWSVLMGESQPYSGPRTPDGREIVFYKVIDYILHGKEEIKVIPTPSADHWALASGLPSYVAESGFICNIMNASADEMFKFQEGALDDSGWLIKNVLSMPIVNKKEEIVGVATFYNRKDGKPFDEQDEVLMESLTQFLGWSVMNTDTYDKMNKLENRKDIAQDMVLYHVKCDRDEIQLILPTRARLGKEPADCDEDELGEILKEELPGPTTFDIYEFHFSDLECTELDLVKCGIQMYYELGVVRKFQIPQEVLVRFLFSISKGYRRITYHNWRHGFNVAQTMFTLLMTGKLKSYYTDLEAFAMVTAGLCHDIDHRGTNNLYQMKSQNPLAKLHGSSILERHHLEFGKFLLSEETLNIYQNLNRRQHEHVIHLMDIAIIATDLALYFKKRAMFQKIVDESKNYQDKKSWVEYLSLETTRKEIVMAMMMTACDLSAITKPWEVQSKVALLVAAEFWEQGDLERTVLDQQPIPMMDRNKAAELPKLQVGFIDFVCTFVYKEFSRFHEEILPMFDRLQNNRKEWKALADEYEAKVKALEEKEEEERVAAKKVGTEICNGGPAPKSSTCCIL

SEQ ID NO: 753524 - protein, 951 aa, Homo sapiens
MLHSQTLGGGHRRPDVRKPRPDVLKALLAAGGSGAAGRRKGWSDVCLSSSKRQIPLSTRPLLSDQGHDRSLEASPPASSRAPQAQMKPGHGATNQGLCQAPRLGRWSDQGAHLCQAGVKPLLLWSDRREGGSGHRPQVCPSLQVLLWSANKVFEELTDIERQFHKAFYTVRAYLNCERYSVGLLDMTKEKEFFDVWSVLMGESQPYSGPRTPDGREIVFYKVIDYILHGKEEIKVIPTPSADHWALASGLPSYVAESGFICNIMNASADEMFKFQEGALDDSGWLIKNVLSMPIVNKKEEIVGVATFYNRKDGKPFDEQDEVLMESLTQFLGWSVMNTDTYDKMNKLENRKDIAQDMVLYHVKCDRDEIQLILPTRARLGKEPADCDEDELGEILKEELPGPTTFDIYEFHFSDLECTELDLVKCGIQMYYELGVVRKFQIPQEVLVRFLFSISKGYRRITYHNWRHGFNVAQTMFTLLMTGKLKSYYTDLEAFAMVTAGLCHDIDHRGTNNLYQMKSQNPLAKLHGSSILERHHLEFGKFLLSEEVGILTLGFCCGRWGRSVLQAQGRILRRLLMQRVSTGCVSTGGGRQRRRRAEAEGRCIGGPGKTLVGKTLERPLMGWGGSRRGSGPGPTSGGMKGSRALSGPQGPGHSVDPSLRSPVVTSEAICVPSRRWSRWWRAGHPEEGPEQQAIRGPAHRGPEGGGVRGTGSRGEGAGSPGTLRGGRRRLTRWALPPQTLNIYQNLNRRQHEHVIHLMDIAIIATDLALYFKKRAMFQKIVDESKNYQDKKSWVEYLSLETTRKEIVMAMMMTACDLSAITKPWEVQSKVALLVAAEFWEQGDLERTVLDQQPIPMMDRNKAAELPKLQVGFIDFVCTFVYKEFSRFHEEILPMFDRLQNNRKEWKALADEYEAKVKALEEKEEEERVAAKKVGTEICNGGPAPKSSTCCIL

SEQ ID NO: 753525 - protein, 992 aa, Homo sapiens
AAAASVRRQGWWGLGLGLDQGGRERWPKEGPGVSLSLVAALTQQPGACAAGCPEWGLARTSWSASAMLHSQTLGGGHRRPDVRKPRPDVLKALLAAGGSGAAGRRKGWSDVCLSSSKRQIPLSTRPLLSDQGHDRSLEASPPASSRAPQAQMKPVSGLSKPLLLWSDRREGGSGHRPQVCPSLQVLLWSANKVFEELTDIERQFHKAFYTVRAYLNCERYSVGLLDMTKEKEFFDVWSVLMGESQPYSGPRTPDGREIVFYKVIDYILHGKEEIKVIPTPSADHWALASGLPSYVAESGFICNIMNASADEMFKFQEGALDDSGWLIKNVLSMPIVNKKEEIVGVATFYNRKDGKPFDEQDEVLMESLTQFLGWSVMNTDTYDKMNKLENRKDIAQDMVLYHVKCDRDEIQLILPTRARLGKEPADCDEDELGEILKEELPGPTTFDIYEFHFSDLECTELDLVKCGIQMYYELGVVRKFQIPQEVLVRFLFSISKGYRRITYHNWRHGFNVAQTMFTLLMTGKLKSYYTDLEAFAMVTAGLCHDIDHRGTNNLYQMKSQNPLAKLHGSSILERHHLEFGKFLLSEEVGILTLGFCCGRWGRSVLQAQGRILRRLLMQRVSTGCVSTGGGRQRRRRAEAEGRCIGGPGKTLVGKTLERPLMGWGGSRRGSGPGPTSGGMKGSRALSGPQGPGHSVDPSLRSPVVTSEAICVPSRRWSRWWRAGHPEEGPEQQAIRGPAHRGPEGGGVRGTGSRGEGAGSPGTLRGGRRRLTRWALPPQTLNIYQNLNRRQHEHVIHLMDIAIIATDLALYFKKRAMFQKIVDESKNYQDKKSWVEYLSLETTRKEIVMAMMMTACDLSAITKPWEVQSKVALLVAAEFWEQGDLERTVLDQQPIPMMDRNKAAELPKLQVGFIDFVCTFVYKEFSRFHEEILPMFDRLQNNRKEWKALADEYEAKVKALEEKEEEERVAAKKVGTEICNGGPAPKSSTCCIL

SEQ ID NO: 753526 - protein, 799 aa, Homo sapiens
MGEAGVRVLLWSANKVFEELTDIERQFHKAFYTVRAYLNCERYSVGLLDMTKEKEFFDVWSVLMGESQPYSGPRTPDGREIVFYKVIDYILHGKEEIKVIPTPSADHWALASGLPSYVAESGFEGALDDSGWLIKNVLSMPIVNKKEEIVGVATFYNRKDGKPFDEQDEVLMESLTQFLGWSVMNTDTYDKMNKLENRKDIAQDMVLYHVKCDRDEIQLILPTRARLGKEPADCDEDELGEILKEELPGPTTFDIYEFHFSDLECTELDLVKCGIQMYYELGVVRKFQIPQEVLVRFLFSISKGYRRITYHNWRHGFNVAQTMFTLLMTGKLKSYYTDLEAFAMVTAGLCHDIDHRGTNNLYQMKSQNPLAKLHGSSILERHHLEFGKFLLSEEVGILTLGFCCGRWGRSVLQAQGRILRRLLMQRVSTGCVSTGGGRQRRRRAEAEGRCIGGPGKTLVGKTLERPLMGWGGSRRGSGPGPTSGGMKGSRALSGPQGPGHSVDPSLRSPVVTSEAICVPSRRWSRWWRAGHPEEGPEQQAIRGPAHRGPEGGGVRGTGSRGEGAGSPGTLRGGRRRLTRWALPPQTLNIYQNLNRRQHEHVIHLMDIAIIATDLALYFKKRAMFQKIVDESKNYQDKKSWVEYLSLETTRKEIVMAMMMTACDLSAITKPWEVQSKVALLVAAEFWEQGDLERTVLDQQPIPMMDRNKAAELPKLQVGFIDFVCTFVYKEFSRFHEEILPMFDRLQNNRKEWKALADEYEAKVKALEEKEEEERVAAKKVGTEICNGGPAPKSSTCCIL

SEQ ID NO: 753527 - protein, 541 aa, Homo sapiens
MLHSQTLGGGHRRPDVRKPRPDVLKALLAAGGSGAAGRRKGWSDVCLSSSKRQIPLSTRPLLSDQGHDRSLEASPPASSRAPQAQMKPGHGATNQGLCQAPRLGRWSDQGAHLCQAGVKPLLLWSDRREGGSGHRPQVCPSLQVLLWSANKVFEELTDIERQFHKAFYTVRAYLNCERYSVGLLDMTKEKEFFDVWSVLMGESQPYSGPRTPDGREIVFYKVIDYILHGKEEIKVIPTPSADHWALASGLPSYVAESGFICNIMNASADEMFKFQEGALDDSGWLIKNVLSMPIVNKKEEIVGVATFYNRKDGKPFDEQDEVLMESLTQFLGWSVMNTDTYDKMNKLENRKDIAQDMVLYHVKCDRDEIQLILPTRARLGKEPADCDEDELGEILKEELPGPTTFDIYEFHFSDLECTELDLVKCGIQMYYELGVVRKFQIPQEVLVRFLFSISKGYRRITYHNWRHGFNVAQTMFTLLMTGKLKSYYTDLEAFAMVTAGLCHDIDHRGTNNLYQMKVGTSGRACELALNQLHALGILGFA

SEQ ID NO: 753528 - protein, 868 aa, Homo sapiens; identical to SEQ ID NO: 753523

SEQ ID NO: 753529 - protein, 868 aa, Homo sapiens; identical to SEQ ID NO: 753523

SEQ ID NO: 753530 - protein, 1033 aa, Homo sapiens
MLHSQTLGGGHRRPDVRKPRPDVLKALLAAGGSGAAGRRKGWSDVCLSSSKRQIPLSTRPLLSDQGHDRSLEASPPASSRAPQAQMKPGHGATNQGLCQAPRLGRWSDQGAHLCQAGVKPLLLWSDRREGGSGHRPQVCPSLQVLLWSANKVFEELTDIERQFHKAFYTVRAYLNCERYSVGLLDMTKEKEFFDVWSVLMGESQPYSGPRTPDGREIVFYKVIDYILHGKEEIKVIPTPSADHWALASGLPSYVAESGFICNIMNASADEMFKFQEGALDDSGWLIKNVLSMPIVNKKEEIVGVATFYNRKDGKPFDEQDEVLMESLTQFLGWSVMNTDTYDKMNKLENRKDIAQDMVLYHVKCDRDEIQLILPTRARLGKEPADCDEDELGEILKEELPGPTTFDIYEFHFSDLECTELDLVKCGIQMYYELGVVRKFQIPQEVLVRFLFSISKGYRRITYHNWRHGFNVAQTMFTLLMTGKLKSYYTDLEAFAMVTAGLCHDIDHRGTNNLYQMKSQNPLAKLHGSSILERHHLEFGKFLLSEEVGILTLGFCCGRWGRSVLQAQGRILRRLLMQRVSTGCVSTGGGRQRRRRAEAEGRCIGGPGKTLVGKTLERPLMGWGGSRRGSGPGPTSGGMKGSRALSGPQGPGHSVDPSLRSPVVTSEAICVPSRRWSRWWRAGHPEEGPEQQAIRGPAHRGPEGGGVRGTGSRGEGAGSPGTLRGGRRRLTRWALPPQTLNIYQNLNRRQHEHVIHLMDIAIIATDLALYFKCARLPGGGASRGGRVAWDPRQIMGAHGRHSPGDAAPDSVPARRPRAPRMGPRSGSAPPCRRALGAGSPHLLPPAPPLFPGFRKRAMFQKIVDESKNYQDKKSWVEYLSLETTRKEIVMAMMMTACDLSAITKPWEVQSKVALLVAAEFWEQGDLERTVLDQQPIPMMDRNKAAELPKLQVGFIDFVCTFVYKEFSRFHEEILPMFDRLQNNRKEWKALADEYEAKVKALEEKEEEERVAAKKVGTEICNGGPAPKSSTCCIL

SEQ ID NO: 753531 - protein, 332 aa, Homo sapiens
MGWGGSRRGSGPGPTSGGMKGSRALSGPQGPGHSVDPSLRSPVVTSEAICVPSRRWSRWWRAGHPEEGPEQQAIRGPAHRGPEGGGVRGTGSRGEGAGSPGTLRGGRRRLTRWALPPQTLNIYQNLNRRQHEHVIHLMDIAIIATDLALYFKKRAMFQKIVDESKNYQDKKSWVEYLSLETTRKEIVMAMMMTACDLSAITKPWEVQSKVALLVAAEFWEQGDLERTVLDQQPIPMMDRNKAAELPKLQVGFIDFVCTFVYKEFSRFHEEILPMFDRLQNNRKEWKALADEYEAKVKALEEKEEEERVAAKKVGTEICNGGPAPKSSTCCIL

SEQ ID NO: 753532 - protein, 410 aa, Homo sapiens
MLHSQTLGGGHRRPDVRKPRPDVLKALLAAGGSGAAGRRKGWSDVCLSSSKRQIPLSTRPLLSDQGHDRSLEASPPASSRAPQAQMKPGHGATNQGLCQAPRLGRWSDQGAHLCQAGVKPLLLWSDRREGGSGHRPQVCPSLQVLLWSANKVFEELTDIERQFHKAFYTVRAYLNCERYSVGLLDMTKEKEFFDVWSVLMGESQPYSGPRTPDGREIVFYKVIDYILHGKEEIKVIPTPSADHWALASGLPSYVAESGFICNIMNASADEMFKFQEGALDDSGWLIKNVLSMPIVNKKEEIVGVATFYNRKDGKPFDEQDEVLMESLTQFLGWSVMNTDTYDKMNKLENRKDIAQDMVLYHVKCDRDEIQLILPTRARLGKEPADCDEDELGEILVRTLLPVPPMEAGHV

SEQ ID NO: 753533 - protein, 506 aa, Homo sapiens
INTEAASDPLEPRSPPSPAPTPPPAHAPPPPRPSLIPHQLRHPRGLPPGALSRPPKKRRSPLLAHPFPSSLPPPPELSLSHAFPLHHGSPLGCRLPGSCVRSERRRWRRWRRRRQLGSAMTGKLAEKLPVTMSSLLNQLPDNLYPEEIPSALNLFSGSSDSVVHYNQMATENVMDIGLTNEKPNPELSYSGSFQPAPGNKTVTYLGKFAFDSPSNWCQDNIISLMSAGILGVPPASGALSTQTSTASMVQPPQGDVEAMYPALPPYSNCGDLYSEPVSFHDPQGNPGLAYSPQDYQSAKPALDSNLFPMIPDYNLYHHPNDMGSIPEHKPFQGMDPIRVNPPPITPLETIKAFKDKQIHPGFGSLPQPPLTLKPIRPRKYPNRPSKTPLHERPHACPAEGCDRRFSRSDELTRHLRIHTGHKPFQCRICMRSFSRSDHLTTHIRTHTGEKPFACEFCGRKFARSDERKRHAKIHLKQKEKKAEKGGAPSASSAPPVSLAPVVTTCA

SEQ ID NO: 753534 - protein, 506 aa, Homo sapiens; identical to SEQ ID NO: 753533

SEQ ID NO: 753535 - protein, 103 aa, Homo sapiens [sequence omitted]

SEQ ID NO: 753536 - protein, 352 aa, Homo sapiens
MTSSLLLAFLLLAPTTVATPRAGGQCPACGGPTLELESQRELLLDLAKRSILDKLHLTQRPTLNRPVSRAALRTALQHLHGVPQGALLEDNREQECEIISFAETGLSTINQTRLDFHFSSDRTAGDREVQQASLMFFVQLPSNTTWTLKVRVLVLGPHNTNLTLATQYLLEVDASGWHQLPLGPEAQAACSQGHLTLELVLEGQVAQSSVILGGAAHRPFVAARVRVGGKHQIHRRGIDCQGGSRMCCRQEFFVDFREIGWHDWIIQPEGYAMNFCIGQCPLHIAGMPGIAASFHTAVLNLLKANTAAGTTGGGSCCVPTARRPLSLLYYDRDSNIVKTDIPDMVVEACGCS

SEQ ID NO: 753537 - protein, 352 aa, Homo sapiens; identical to SEQ ID NO: 753536

SEQ ID NO: 753538 - protein, 588 aa, Homo sapiens
MGGTARGPGRKDAGPPGAGLPPQQRRLGDGVYDTFMMIDETKCPPCSNVLCNPSEPPPPRRLNMTTEQFTGDHTQHFLDGGEMKVEQLFQEFGNRKSNTIQSDGISDSEKCSPTVSQGKSSDCLNTVKSNSSSKAPKVVPLTPEQALKQYKHHLTAYEKLEIINYPEIYFVGPNAKKRHGVIGGPNNGGYDDADGAYIHVPRDHLAYRYEVLKIIGKGSFGQVARVYDHKLRQYVALKMVRNEKRFHRQAAEEIRILEHLKKQDKTGSMNVIHMLESFTFRNHVCMAFELLSIDLYELIKKNKFQGFSVQLVRKFAQSILQSLDALHKNKIIHCDLKPENILLKHHGRSSTKVIDFGSSCFEYQKLYTYIQSRFYRAPEIILGSRYSTPIDIWSFGCILAELLTGQPLFPGEDEGDQLACMMELLGMPPPKLLEQSKRAKYFINSKGIPRYCSVTTQADGRVVLVGGRSRRGKKRGPPGSKDWGTALKGCDDYLFIEFLKRCLHWDPSARLTPAQALRHPWISKSVPRPLTTIDKVSGKRVVNPASAFQGLGSKLPPVVGIANKLKANLMSETNGSIPLCSVLPKLIS

SEQ ID NO: 753539 - protein, 568 aa, Homo sapiens
MKWKEKLGDGVYDTFMMIDETKCPPCSNVLCNPSEPPPPRRLNMTTEQFTGDHTQHFLDGGEMKVEQLFQEFGNRKSNTIQSDGISDSEKCSPTVSQGKSSDCLNTVKSNSSSKAPKVVPLTPEQALKQYKHHLTAYEKLEIINYPEIYFVGPNAKKRHGVIGGPNNGGYDDADGAYIHVPRDHLAYRYEVLKIIGKGSFGQVARVYDHKLRQYVALKMVRNEKRFHRQAAEEIRILEHLKKQDKTGSMNVIHMLESFTFRNHVCMAFELLSIDLYELIKKNKFQGFSVQLVRKFAQSILQSLDALHKNKIIHCDLKPENILLKHHGRSSTKVIDFGSSCFEYQKLYTYIQSRFYRAPEIILGSRYSTPIDIWSFGCILAELLTGQPLFPGEDEGDQLACMMELLGMPPPKLLEQSKRAKYFINSKGIPRYCSVTTQADGRVVLVGGRSRRGKKRGPPGSKDWGTALKGCDDYLFIEFLKRCLHWDPSARLTPAQALRHPWISKSVPRPLTTIDKVSGKRVVNPASAFQGLGSKLPPVVGIANKLKANLMSETNGSIPLCSVLPKLIS

SEQ ID NO: 753540 - protein, 568 aa, Homo sapiens; identical to SEQ ID NO: 753539

SEQ ID NO: 753541 - protein, 568 aa, Homo sapiens; identical to SEQ ID NO: 753539

SEQ ID NO: 753542 - protein, 534 aa, Homo sapiens
MKWKEKLGDGVYDTFMMIDETKCPPCSNVLCNPSEPPPPRRLNMTTEQFTGDHTQHFLDGGEMKVEQLFQEFGNRKSNTIQSDGISDSEKCSPTVSQGKSSDCLNTVKSNSSSKAPKVVPLTPEQALKQYKHHLTAYEKLEIINYPEIYFVGPNAKKRHGVIGGPNNGGYDDADGAYIHVPRDHLAYRYEVLKIIGKGSFGQVARVYDHKLRQYVALKMVRNEKRFHRQAAEEIRILEHLKKQDKTGSMNVIHMLESFTFRNHVCMAFELLSIDLYELIKKNKFQGFSVQLVRKFAQSILQSLDALHKNKIIHCDLKPENILLKHHGRSSTKVIDFGSSCFEYQKLYTYIQSRFYRAPEIILGSRYSTPIDIWSFGCILAELLTGQPLFPGEDEGDQLACMMELLGMPPPKLLEQSKRAKYFINSKGIPRYCSVTTQADGRVVLVGGRSRRGKKRGPPGSKDWGTALKGCDDYLFIEFLKRCLHWDPSARLTPAQALRHPWISKSVPRPLTTIDKVSGKRVVNPERSQNYKCIV

SEQ ID NO: 753543 - protein, 383 aa, Homo sapiens
QIVYLYIQRIIRVFHGVNAPDNPLKEEHLVQLNETDILRVLDGNTGGTYGGHIPGSDRAGLNRHDKSENPGRIYAGGSSTAAGDPSLLSAARIMAAAALGQIWARKLLSVPWLLCGPRRYASSSFKAADLQLEMTQKPHKKPGPGEPLVFGKTFTDHMLMVEWNDKGWGQPRIQPFQNLTLHPASSSLHYSLQLFEGMKAFKGKDQQVRLFRPWLNMDRMLRSAMRLCLPSFDKLELLECIRRLIEVDKDWVPDAAGTSLYVRPVLIGNEPSLGVSQPTRALLFVILCPVGAYFPGGSVTPVSLLADPAFIRAWVGGVGNYKLGGILGPRLCTEASAGGQSCCGRPSPGTVCPAPWCVAPCVRASGCPGVSHMAGRTGPISSR

SEQ ID NO: 753544 - protein, 411 aa, Homo sapiens
LFFIESLLKRGGPVRIPGIMAAAALGQIWARKLLSVPWLLCGPRRYASSSFKAADLQLEMTQKPHKKPGPGEPLVFGKTFTDHMLMVEWNDKGWGQPRIQPFQNLTLHPASSSLHYSLQLFEGMKAFKGKDQQVRLFRPWLNMDRMLRSAMRLCLPSFDKLELLECIRRLIEVDKDWVPDAAGTSLYVRPVLIGNEPSLGVSQPTRALLFVILCPVGAYFPGGSVTPVSLLADPAFIRAWVGGVGNYKLGGNYGPTVLVQQEALKRGCEQVLWLYGPDHQLTEVGTMNIFVYWTHEDGVLELVTPPLNGVILPGVVRQSLLDMAQTWGEFRVVERTITMKQLLRALEEGRVREVFGSGTACQVCPVHRILYKDRNLHIPTMENGPELILRFQKELKEIQYGIRAHEWMFPV

SEQ ID NO: 753545 - protein, 485 aa, Homo sapiens
QIVYLYIQRIIRVFHGVNAPDNPLKEEHLVQLNETDILRVLDGNTGGTYGGHIPGSDRAGLNRHDKSENPGRIYAGGSSTAAGDPSLLSAARIMAAAALGQIWARKLLSVPWLLCGPRRYASSSFKAADLQLEMTQKPHKKPGPGEPLVFGKTFTDHMLMVEWNDKGWGQPRIQPFQNLTLHPASSSLHYSLQLFEGMKAFKGKDQQVRLFRPWLNMDRMLRSAMRLCLPSFDKLELLECIRRLIEVDKDWVPDAAGTSLYVRPVLIGNEPSLGVSQPTRALLFVILCPVGAYFPGGSVTPVSLLADPAFIRAWVGGVGNYKLGGNYGPTVLVQQEALKRGCEQVLWLYGPDHQLTEVGTMNIFVYWTHEDGVLELVTPPLNGVILPGVVRQSLLDMAQTWGEFRVVERTITMKQLLRALEEGRVREVFGSGTACQVCPVHRILYKDRNLHIPTMENGPELILRFQKELKEIQYGIRAHEWMFPV

SEQ ID NO: 753546 - protein, 352 aa, Homo sapiens
MTQKPHKKPGPGEPLVFGKTFTDHMLMVEWNDKGWGQPRIQPFQNLTLHPASSSLHYSLQLFEGMKAFKGKDQQVRLFRPWLNMDRMLRSAMRLCLPSFDKLELLECIRRLIEVDKDWVPDAAGTSLYVRPVLIGNEPSLGVSQPTRALLFVILCPVGAYFPGGSVTPVSLLADPAFIRAWVGGVGNYKLGGNYGPTVLVQQEALKRGCEQVLWLYGPDHQLTEVGTMNIFVYWTHEDGVLELVTPPLNGVILPGVVRQSLLDMAQTWGEFRVVERTITMKQLLRALEEGRVREVFGSGTACQVCPVHRILYKDRNLHIPTMENGPELILRFQKELKEIQYGIRAHEWMFPV

SEQ ID NO: 753547 - protein, 352 aa, Homo sapiens; identical to SEQ ID NO: 753546

SEQ ID NO: 753548 - protein, 392 aa, Homo sapiens
MAAAALGQIWARKLLSVPWLLCGPRRYASSSFKAADLQLEMTQKPHKKPGPGEPLVFGKTFTDHMLMVEWNDKGWGQPRIQPFQNLTLHPASSSLHYSLQLFEGMKAFKGKDQQVRLFRPWLNMDRMLRSAMRLCLPSFDKLELLECIRRLIEVDKDWVPDAAGTSLYVRPVLIGNEPSLGVSQPTRALLFVILCPVGAYFPGGSVTPVSLLADPAFIRAWVGGVGNYKLGGNYGPTVLVQQEALKRGCEQVLWLYGPDHQLTEVGTMNIFVYWTHEDGVLELVTPPLNGVILPGVVRQSLLDMAQTWGEFRVVERTITMKQLLRALEEGRVREVFGSGTACQVCPVHRILYKDRNLHIPTMENGPELILRFQKELKEIQYGIRAHEWMFPV

SEQ ID NO: 753549 - protein, 392 aa, Homo sapiens; identical to SEQ ID NO: 753548

SEQ ID NO: 753550 - protein, 288 aa, Homo sapiens [sequence omitted]

SEQ ID NO: 753551 - protein, 411 aa, Homo sapiens; identical to SEQ ID NO: 753544

SEQ ID NO: 753552 - protein, 192 aa, Homo sapiens [sequence omitted]

SEQ ID NO: 753553 - protein, 183 aa, Homo sapiens [sequence omitted]

SEQ ID NO: 753554 - protein, 81 aa, Homo sapiens
MKAFKGKDQQVRLFRPWLNMDRMLRSAMRLCLPSFDKLELLECIRRLIEVDKDWVPDAAGTSLYVRPVLIGNEVGPTPGLG

SEQ ID NO: 753555 - protein, 411 aa, Homo sapiens; identical to SEQ ID NO: 753544

SEQ ID NO: 753556 - protein, 352 aa, Homo sapiens; identical to SEQ ID NO: 753546

SEQ ID NO: 753557 - protein, 390 aa, Homo sapiens
MPQRSGIWARKLLSVPWLLCGPRRYASSSFKAADLQLEMTQKPHKKPGPGEPLVFGKTFTDHMLMVEWNDKGWGQPRIQPFQNLTLHPASSSLHYSLQLFEGMKAFKGKDQQVRLFRPWLNMDRMLRSAMRLCLPSFDKLELLECIRRLIEVDKDWVPDAAGTSLYVRPVLIGNEPSLGVSQPTRALLFVILCPVGAYFPGGSVTPVSLLADPAFIRAWVGGVGNYKLGGNYGPTVLVQQEALKRGCEQVLWLYGPDHQLTEVGTMNIFVYWTHEDGVLELVTPPLNGVILPGVVRQSLLDMAQTWGEFRVVERTITMKQLLRALEEGRVREVFGSGTACQVCPVHRILYKDRNLHIPTMENGPELILRFQKELKEIQYGIRAHEWMFPV

SEQ ID NO: 753558 - protein, 300 aa, Homo sapiens
MAAAALGQLFEGMKAFKGKDQQVRLFRPWLNMDRMLRSAMRLCLPSFDKLELLECIRRLIEVDKDWVPDAAGTSLYVRPVLIGNEPSLGVSQPTRALLFVILCPVGAYFPGGSVTPVSLLADPAFIRAWVGGVGNYKLGGNYGPTVLVQQEALKRGCEQVLWLYGPDHQLTEVGTMNIFVYWTHEDGVLELVTPPLNGVILPGVVRQSLLDMAQTWGEFRVVERTITMKQLLRALEEGRVREVFGSGTACQVCPVHRILYKDRNLHIPTMENGPELILRFQKELKEIQYGIRAHEWMFPV

SEQ ID NO: 753559 - protein, 472 aa, Homo sapiens
LFFIESLLKRGGPVRIPGIMAAAALGQIWARKLLSVPWLLCGPRRYASSSFKAADLQLEMTQKPHKKPGPGEPLVFGKTFTDHMLMVEWNDKGWGQPRIQPFQNLTLHPASSSLHYSLQLFEGMKAFKGKDQQVRLFRPWLNMDRMLRSAMRLCLPSFDKLELLECIRRLIEVDKDWVPDAAGTSLYVRPVLIGNEPSLGVSQPTRALLFVILCPVGAYFPGGSVTPVSLLADPAFIRAWVGGVGNYKLGGNYGPTVLVQQEALKRGCEQVLWLYGPDHQLTEVGTMNIFVYWTHEDGVLELVTPPLNGVILPGVVRQSLLDMAQTWGEFRVVERTITMKQLLRALEEGRVREVFGSGTACQVCPVHRILYKDRNLHIPTMENGPELILRFQKELKEIQYQEQIMAFLIEALESGLSVLLCGLENPLGLNHPFLGAPGALDMSSALETPSCDPLRLLGALYGIRAHEWMFPV

SEQ ID NO: 753560 - protein, 389 aa, Homo sapiens
  misc_feature (7)..(7): Xaa can be any naturally occurring amino acid
  misc_feature (11)..(11): Xaa can be any naturally occurring amino acid
  misc_feature (15)..(15): Xaa can be any naturally occurring amino acid
  misc_feature (18)..(18): Xaa can be any naturally occurring amino acid
  misc_feature (21)..(22): Xaa can be any naturally occurring amino acid
  misc_feature (28)..(32): Xaa can be any naturally occurring amino acid
  misc_feature (34)..(35): Xaa can be any naturally occurring amino acid
  misc_feature (58)..(58): Xaa can be any naturally occurring amino acid
  misc_feature (75)..(75): Xaa can be any naturally occurring amino acid
  misc_feature (77)..(77): Xaa can be any naturally occurring amino acid
  misc_feature (95)..(95): Xaa can be any naturally occurring amino acid
  misc_feature (102)..(102): Xaa can be any naturally occurring amino acid
KLLSVPXLLSXPTTXPPXTFXXADLQLXXXXXPXXQASPPPPPPPPPPPPPPPPPLPXPPHLPSPPPPPPPTPPXPXPPPPPPPPPPPPPPPPLXPHPPPPXPHPPPPPPPPPPPPLPPLPPPPTPPPPPPPPPTPPPPPTPSPPPPPPPPPPPPPPPPPHPPTPPPPPPPTPPPPPPHPPPTRALLFVILCPVGAYFPGGSVTPVSLLADPAFIRAWVGGVGNYKLGGNYGPTVLVQQEALKRGCEQVLWLYGPDHQLTEVGTMNIFVYWTHEDGVLELVTPPLNGVILPGVVRQSLLDMAQTWGEFRVVERTITMKQLLRALEEGRVREVFGSGTACQVCPVHRILYKDRNLHIPTMENGPELILRFQKELKEIQYGIRAHEWMFPV

SEQ ID NO: 753561 - protein, 183 aa, Homo sapiens [sequence omitted]

SEQ ID NO: 753562 - protein, 899 aa, Homo sapiens
MARKRAAGGEPRGRELRSQKSKAKSKARREEEEEDAFEDEKPPKKSLLSKVSQGKRKRGCSHPGGSADGPAKKKVAKVTVKSENLKVIKDEALSDGDDLRDFPSDLKKAHHLKRGATMNEDSNEEEEESENDWEEVEVKKIKLEFETYLRRAMKRFNKGVHEDTHKVHLLCLLANGFYRNNICSQPDLHAIGLSIIPARFTRVLPRDVDTYYLSNLVKWFIGTFTVNAELSASEQDNLQTTLERRFAIYSARDDEELVHIFLLILRALQLLTRLVLSLQPIPLKSATAKGKKPSKERLTADPGGSSETSSQVLENHTKPKTSKGTKQEETFAKGTCRPSAKGKRNKGGRKKRSKPSSSEEDEGPGDKQEKATQRRPHGRERRVASRVSYKEESGSDEAGSGSDFELSSGEASDPSDEDSEPGPPKQRKAPAPQRTKAGSKSASRTHRGSHRKDPSLPAASSSSSSSKRGKKMCSDGEKAEKRSIAGIDQWLEVFCEQEEKWVCVDCVHGVVGQPLTCYKYATKPMTYVVGIDSDGWVRDVTQRYDPVWMTVTRKCRVDAEWWAETLRPYQSPFMDREKKEDLEFQAKHMDQPLPTAIGLYKNHPLYALKRHLLKYEAIYPETAAILGYCRGEAVYSRDCVHTLHSRDTWLKKARVVRLGEVPYKMVKGFSNRARKARLAEPQLREENDLGLFGYWQTEEYQPPVAVDGKVPRNEFGNVYLFLPSMMPIGCVQLNLPNLHRVARKLDIDCVQAITGFDFHGGYSHPVTDGYIVCEEFKDVLLTAWENEQAVIERKEKEKKEKRALGNWKLLAKGLLIRERLKRRYGPKSEAAAPHTDAGGGLSSDEEEGTSSQAEAARILAASWPQNREDEEKQKLKGGPKKTKREKKAAASHLFPFEKL

SEQ ID NO: 753563 - protein, 36 aa, Homo sapiens
MQEVDSLLMKRRGPALKQKRPGYWLPPGLKTEKMKK

SEQ ID NO: 753564 - protein, 940 aa, Homo sapiens
MARKRAAGGEPRGRELRSQKSKAKSKARREEEEEDAFEDEKPPKKSLLSKVSQGKRKRGCSHPGGSADGPAKKKVAKVTVKSENLKVIKDEALSDGDDLRDFPSDLKKAHHLKRGATMNEDSNEEEEESENDWEEVEELSEPVLGDVRESTAFSRSLLPVKPVEIEIETPEQAKTRERSEKIKLEFETYLRRAMKRFNKGVHEDTHKVHLLCLLANGFYRNNICSQPDLHAIGLSIIPARFTRVLPRDVDTYYLSNLVKWFIGTFTVNAELSASEQDNLQTTLERRFAIYSARDDEELVHIFLLILRALQLLTRLVLSLQPIPLKSATAKGKKPSKERLTADPGGSSETSSQVLENHTKPKTSKGTKQEETFAKGTCRPSAKGKRNKGGRKKRSKPSSSEEDEGPGDKQEKATQRRPHGRERRVASRVSYKEESGSDEAGSGSDFELSSGEASDPSDEDSEPGPPKQRKAPAPQRTKAGSKSASRTHRGSHRKDPSLPAASSSSSSSKRGKKMCSDGEKAEKRSIAGIDQWLEVFCEQEEKWVCVDCVHGVVGQPLTCYKYATKPMTYVVGIDSDGWVRDVTQRYDPVWMTVTRKCRVDAEWWAETLRPYQSPFMDREKKEDLEFQAKHMDQPLPTAIGLYKNHPLYALKRHLLKYEAIYPETAAILGYCRGEAVYSRDCVHTLHSRDTWLKKARVVRLGEVPYKMVKGFSNRARKARLAEPQLREENDLGLFGYWQTEEYQPPVAVDGKVPRNEFGNVYLFLPSMMPIGCVQLNLPNLHRVARKLDIDCVQAITGFDFHGGYSHPVTDGYIVCEEFKDVLLTAWENEQAVIERKEKEKKEKRALGNWKLLAKGLLIRERLKRRYGPKSEAAAPHTDAGGGLSSDEEEGTSSQAEAARILAASWPQNREDEEKQKLKGGPKKTKREKKAAASHLFPFEKL

SEQ ID NO: 753565 - protein, 374 aa, Homo sapiens
MDPLGPAKPQWLWRRCLAGLLFQLLVAVCFFSYLRVSRDDATGSPRPGLMAVEPVTGAPNGSRCQDSMATPAHPTLLILLWTWPFNTPVALPRCSEMVPGAADCNITADSSVYPQADAVIVHHWDIMYNPSANLPPPTRPQGQRWIWFSMESPSNCRHLEALDGYFNLTMSYRSDSDIFTPYGWLEPWSGQPAHPPLNLSAKTELVAWAVSNWKPDSARVRYYQSLQAHLKVDVYGRSHKPLPKGTMMETLSRYKFYLAFENSLHPDYITEKLWRNALEAWAVPVVLGPSRSNYERFLPPDAFIHVDDFQSPKDLARYLQELDKDHARYLSYFRWRETLRPRSFSWALAFCKACWKLQQESRYQTVRSIAAWFT

SEQ ID NO: 753566 - protein, 113 aa, Homo sapiens
MFRIVIPFPFSLFLRWSLSLCCPGWSVVDGNSGPSGPSGVATAKMLAAARRLCPCCELHRARGSGDKQEPSSFQVGGWELPRHSCSCPSHGCWLSLPVFLETRSRQEPCSPGC

SEQ ID NO: 753567 - protein, 245 aa, Homo sapiens
MGRLDGKVIILTAAAQGIGQAAALAFAREGAKVIATDINESKLQELEKYPGIQTRVLDVTKKKQIDQFANEVERLDVLFNVAGFVHHGTVLDCEEKDWDFSMNLNVRSMYLMIKAFLPKMLAQKSGNIINMSSVASSVKGVVNRCVYSTTKAAVIGLTKSVAADFIQQGIRCNCVCPGTVDTPSLQERIQARGNPEEARNDFLKRQKTGRFATAEEIAMLCVYLASDESAYVTGNPVIIDGGWSL

SEQ ID NO: 753568 - protein, 173 aa, Homo sapiens
MGRLDGKVIILTAAAQGIGQAAALAFAREGAKVIATDINESKLQELEKYPGIQTRVLDVTKKKQIDQFANEVERLDVLFNVAGFVHHGTVLDCEEKDWDFSMNLNVRSMYLMIKAFLPKMLAQKSGNIINMSSVASSVKGGSVSFRGLRCSYTHIIKSSAFGNRHSRDYNFKY

SEQ ID NO: 753569 - protein, 245 aa, Homo sapiens; identical to SEQ ID NO: 753567

SEQ ID NO: 753570 - protein, 173 aa, Homo sapiens; identical to SEQ ID NO: 753568

SEQ ID NO: 753571 - protein, 245 aa, Homo sapiens; identical to SEQ ID NO: 753567

SEQ ID NO: 753572 - protein, 207 aa, Homo sapiens
MGRLDGKVIILTAAAQGIGQAAALAFAREGAKVIATDINESKLQELEKYPGIQTRVLDVTKKKQIDQFANEVERLDVLFNVAGFVHHGTVLDCEEKDWDFSMNLNVRSMYLMIKAFLPKMLAQKSGNIINMSSVASSVKGTVDTPSLQERIQARGNPEEARNDFLKRQKTGRFATAEEIAMLCVYLASDESAYVTGNPVIIDGGWSL

SEQ ID NO: 753573 - protein, 245 aa, Homo sapiens; identical to SEQ ID NO: 753567

SEQ ID NO: 753574 - protein, 173 aa, Homo sapiens; identical to SEQ ID NO: 753568

SEQ ID NO: 753575 - protein, 245 aa, Homo sapiens; identical to SEQ ID NO: 753567

SEQ ID NO: 753576 - protein, 173 aa, Homo sapiens; identical to SEQ ID NO: 753568

SEQ ID NO: 753577 - protein, 253 aa, Homo sapiens
MAAAFRKAAKSRQREHRERSQPGFRKHLGLLEKKKDYKLRADDYRKKQEYLKALRKKALEKNPDEFYYKMTRVKLQDGVHIIKETKEEVTPEQLKLMRTQDVKYIEMKRVAEAKKIERLKSELHLLDFQGKQQNKHVFFFDTKKEVEQFDVATHLQTAPELVDRVFNRPRIETLQKEKVKGVTNQTGLKRIAKERQKQYNCLTQRIEREKKLFVIAQKIQTRKDLMDKTQKVKVKKETVNSPAIYKFQSRRKR

SEQ ID NO: 753578 - protein, 230 aa, Homo sapiens
MAAAFRKAAKSRQREHRERSQPGFRKHLGLLEKKKDYKLRADDYRKKQEYLKALRKKALEKNPDEFYYKMTRVKLQDGVHIIKETKEEVTPEQLKLMRTQDVKYIEMKRVAEAKKIERLKSELHLLDFQGKQQNKHVFFFDTKKEVEQFDVATHLQTAPELVDRVFNRPRIETLQKEKVKGVTNQTGLKRIAKERQKQYNCLTQRIEREKKLFVIAQKIQTRKDLMVNPK

SEQ ID NO: 753579 - protein, 184 aa, Homo sapiens
MTRVKLQDGVHIIKETKEEVTPEQLKLMRTQDVKYIEMKRVAEAKKIERLKSELHLLDFQGKQQNKHVFFFDTKKEVEQFDVATHLQTAPELVDRVFNRPRIETLQKEKVKGVTNQTGLKRIAKERQKQYNCLTQRIEREKKLFVIAQKIQTRKDLMDKTQKVKVKKETVNSPAIYKFQSRRKR

SEQ ID NO: 753580 - protein, 253 aa, Homo sapiens; identical to SEQ ID NO: 753577

SEQ ID NO: 753581 - protein, 113 aa, Homo sapiens
MAAAFRKAAKSRQREHRERSQPGFRKHLGLLEKKKDYKLRADDYRKKQEYLKALRKKALEKNPDEFYYKMTRVKLQEEYIIIKGGEGEKTPPFYTKKRRGAPIRTPNILERKR

SEQ ID NO: 753582 - protein, 698 aa, Homo sapiens
MLPARLPFRLLSLFLRGSAPTAARHGLREPLLERRCAAASSFQHSSSLGRELPYDPVDTEGFGEGGDMQERFLFPEYILDPEPQPTREKQLQELQQQQEEEERQRQQRREERRQQNLRARSREHPVVGHPDPALPPSGVNCSGCGAELHCQDAGVPGYLPREKFLRTAEADGGLARTVCQRCWLLSHHRRALRLQVSREQYLELVSAALRRPGPSLVLYMVDLLDLPDALLPDLPALVGPKQLIVLGNKVDLLPQDAPGYRQRLRERLWEDCARAGLLLAPGHQGPQRPVKDEPQDGENPNPPNWSRTVVRDVRLISAKTGYGVEELISALQRSWRYRGDVYLVGATNAGKSTLFNTLLESDYCTAKGSEAIDRATISPWPGTTLNLLKFPICNPTPYRMFKRHQRLKKDSTQAEEDLSEQEQNQLNVLKKHGYVVGRVGRTFLYSEEQKDNIPFEFDADSLAFDMENDPVMGTHKSTKQVELTAQDVKDAHWFYDTPGITKENCILNLLTEKEVNIVLPTQSIVPRTFVLKPGMVLFLGAIGRIDFLQGNQSAWFTVVASNILPVHITSLDRADALYQKHAGHTLLQIPMGGKERMAGFPPLVAEDIMLKEGLGASEAVADIKFSSAGWVSVTPNFKDRLHLRGYTPEGTVLTVRPPLLPYIVNIKGQRIKKSVAYKTKKPPSLMYNVRKKKGKINV

SEQ ID NO: 753583 - protein, 696 aa, Homo sapiens
  misc_feature (689)..(689): Xaa can be any naturally occurring amino acid
  misc_feature (695)..(695): Xaa can be any naturally occurring amino acid
MLPARLPFRLLSLFLRGSAPTAARHGLREPLLERRCAAASSFQHSSSLGRELPYDPVDTEGFGEGGDMQERFLFPEYILDPEPQPTREKQLQELQQQQEEEERQRQQRREERRQQNLRARSREHPVVGHPDPALPPSGVNCSGCGAELHCQDAGVPGYLPREKFLRTAEADGGLARTVCQRCWLLSHHRRALRLQVSREQYLELVSAALRRPGPSLVLYMVDLLDLPDALLPDLPALVGPKQLIVLGNKVDLLPQDAPGYRQRLRERLWEDCARAGLLLAPGHQGPQRPVKDEPQDGENPNPPNWSRTVVRDVRLISAKTGYGVEELISALQRSWRYRGDVYLVGATNAGKSTLFNTLLESDYCTAKGSEAIDRATISPWPGTTLNLLKFPICNPTPYRMFKRHQRLKKDSTQAEEDLSEQEQNQLNVLKKHGYVVGRVGRTFLYSEEQKDNIPFEFDADSLAFDMENDPVMGTHKSTKQVELTAQDVKDAHWFYDTPGITKENCILNLLTEKEVNIVLPTQSIVPRTFVLKPGMVLFLGAIGRIDFLQGNQSAWFTVVASNILPVHITSLDRADALYQKHAGHTLLQIPMGGKERMAGFPPLVAEDIMLKEGLGASEAVADIKFSSAGWVSVTPNFKDRLHLRGYTPEGTVLTVRPPLLPYIVNIKGQRIKKSVAYKTKKPPSLMLPXPGRPLXK

SEQ ID NO: 753584 - protein, 636 aa, Homo sapiens
MLPARLPFRLLSLFLRGSAPTAARHGLREPLLERRCAAASSFQHSSSLGRELPYDPVDTEGFGEGGDMQERFLFPEYILDPEPQPTREKQLQELQQQQEEEERQRQQRREERRQQNLRARSREHPVVGHPDPALPPSGVNCSGCGAELHCQDAGVPGYLPREKFLRTAEADGGLARTVCQRCWLLSHHRRALRLQVSREQYLELVSAALRRPGPSLVLYMVDLLDLPDALLPDLPALVGPKQLIVLGNKVDLLPQDAPGYRQRLRERLWEDCARAGLLLAPGHQGPQRPVKDEPQDGENPNPPNWSRTVVRDVRLISAKTGYGVEELISALQRSWRYRGDVYLVGATNAGKSTLFNTLLESDYCTAKGSEAIDRATISPWPGTTLNLLKFPICNPTPYRMFKRHQRLKKDSTQAEEDLSEQEQNQLNVLKKHGYVVGRVGRTFLYSEEQKDNIPFEFDADSLAFDMENDPVMGTHKSTKQVELTAQDVKDAHWFYDTPGITKENCILNLLTEKEVNIVLPTQSIVPRTFVLKPGMVLFLGAIGRIDFLQGNQSAWFTVVASNILPVHITSLDRADALYQKHAGHTLLQIPMGGKERMAGFPPLVAEDIMLKEGLGASEAVADIKFSSAGNFMPSTF

SEQ ID NO: 753585 - protein, 659 aa, Homo sapiens
MLPARLPFRLLSLFLRGSAPTAARHGLREPLLERRCAAASSFQHSSSLGRELPYDPVDTEGFGEGGDMQERFLFPEYILDPEPQPTREKQLQELQQQQEEEERQRQQRREERRQQNLRARSREHPVVGHPDPALPPSGVNCSGCGAELHCQDAGVPGYLPREKFLRTAEADGGLARTVCQRCWLLSHHRRALRLQVSREQYLELVSAALRRPGPSLVLYMVDLLDLPDALLPDLPALVGPKQLIVLGNKVDLLPQDAPGYRQRLRERLWEDCARAGLLLAPGHQGPQRPVKDEPQDGENPNPPNWSRTVVRDVRLISAKTGYGVEELISALQRSWRYRGDVYLVGATNAGKSTLFNTLLESDYCTAKGSEAIDRATISPWPGTTLNLLKFPICNPTPYRMFKRHQRLKKDSTQAEEDLSEQEQNQLNVLKKHGYVVGRVGRTFLYSEEQKDNIPFEFDADSLAFDMENDPVMGTHKSTKQVELTAQDVKDAHWFYDTPGITKENCILNLLTEKEVNIVLPTQSIVPRTFVLKPGMVLFLGAIGRIDFLQIPMGGKERMAGFPPLVAEDIMLKEGLGASEAVADIKFSSAGWVSVTPNFKDRLHLRGYTPEGTVLTVRPPLLPYIVNIKGQRIKKSVAYKTKKPPSLMYNVRKKKGKINV

SEQ ID NO: 753586 - protein, 532 aa, Homo sapiens
MLPARLPFRLLSLFLRGSAPTAARHGLREPLLERRCAAASSFQHSSSLGRELPYDPVDTEGFGEGGDMQERFLFPEYILDPEPQPTREKQLQELQQQQEEEERQRQQRREERRQQNLRARSREHPVVGHPDPALPPSGVNCSGCGAELHCQDAGVPGYLPREKFLRTAEADGGLARTVCQRCWLLSHHRRALRLQVSREQYLELVSAALRRPGPSLVLYMVDLLDLPDALLPDLPALVGPKQLIVLGNKVDLLPQDAPGYRQRLRERLWEDCARAGLLLAPGHQGPQRPVKDEPQDGENPNPPNWSRTVVRDVRLISAKTGYGVEELISALQRSWRYRGDVYLVGATNAGKSTLFNTLLESDYCTAKGSEAIDRATISPWPGTTLNLLKFPICNPTPYRMFKRHQRLKKDSTQAEEDLSEQEQNQLNVLKKHGYVVGRVGRTFLYSEEQKDNIPFEFDADSLAFDMENDPVMGTHKSTKQVELTAQDVKDAHWFYDTPGITKENCISFLRQRVHMFAHVMFKLCLTDVCWEA

SEQ ID NO: 753587 - protein, 698 aa, Homo sapiens; identical to SEQ ID NO: 753582

SEQ ID NO: 753588 - protein, 659 aa, Homo sapiens; identical to SEQ ID NO: 753585

SEQ ID NO: 753589 - protein, 680 aa, Homo sapiens
MLPARLPFRLLSLFLRGSAPTAARHGLREPLLERRCAAASSFQHSSSLGRELPYDPVDTEGFGEGGDMQERFLFPEYILDPEPQPTREKQLQELQQQQEEEERQRQQRREERRQQNLRARSREHPVVGHPDPALPPSGVNCSGCGAELHCQDAGVPGYLPREKFLRTAEADGGLARTVCQRCWLLSHHRRALRLQVSREQYLELVSAALRRPGPSLVLYMVDLLDLPDALLPDLPALVGPKQLIVLGNKVDLLPQDAPGYRQRLRERLWEDCARAGLLLAPGHQGPQRPVKDEPQDGENPNPPNWSRTVVRDVRLISAKTGYGVEELISALQRSWRYRGDVYLVGATNAGKSTLFNTLLESDYCTAKGSEAIDRATISPWPGTTLNLLKFPICNPTPYRMFKRHQRLKKDSTQAEEDLSEQEQNQLNVLKKHGYVVGRVGRTFLYSEEQKDNIPFEFDADSLAFDMENDPVMGTHKSTKQVELTAQDVKDAHWFYDTPGITKENCILNLLTEKEVNIVLPTQSIVPRTFVLKPGMVLFLGAIGRIDFLQGNQSAWFTVVASNILPVHITSLDRADALYQKHAGHTLLQIPMGGKERMAGFPPLVAEDIMLSWVSVTPNFKDRLHLRGYTPEGTVLTVRPPLLPYIVNIKGQRIKKSVAYKTKKPPSLMYNVRKKKGKINV

SEQ ID NO: 753590 - protein, 479 aa, Homo sapiens
MVDLLDLPDALLPDLPALVGPKQLIVLGNKVDLLPQDAPGYRQRLRERLWEDCARAGLLLAPGHQGPQRPVKDEPQDGENPNPPNWSRTVVRDVRLISAKTGYGVEELISALQRSWRYRGDVYLVGATNAGKSTLFNTLLESDYCTAKGSEAIDRATISPWPGTTLNLLKFPICNPTPYRMFKRHQRLKKDSTQAEEDLSEQEQNQLNVLKKHGYVVGRVGRTFLYSEEQKDNIPFEFDADSLAFDMENDPVMGTHKSTKQVELTAQDVKDAHWFYDTPGITKENCILNLLTEKEVNIVLPTQSIVPRTFVLKPGMVLFLGAIGRIDFLQGNQSAWFTVVASNILPVHITSLDRADALYQKHAGHTLLQIPMGGKERMAGFPPLVAEDIMLKEGLGASEAVADIKFSSAGWVSVTPNFKDRLHLRGYTPEGTVLTVRPPLLPYIVNIKGQRIKKSVAYKTKKPPSLMYNVRKKKGKINV

SEQ ID NO: 753591 - protein, 452 aa, Homo sapiens
PGCTRAAEPLPPLRILPGGSAARNSGDAAPCSPEPHSKSAMGRGARVPSEAPGAGVERRWLGAALVALCLLPALVLLARLGAPAVPAWSAAQGDVAALGLSAVPPTRVPGPLAPRRRRYTLTPARLRWDHFNLTYRILSFPRNLLSPRETRRALAAAFRMWSDVSPFSFREVAPEQPSDLRIGGRPPPPGPALRARPLSPVLPPGFYPINHTDCLVSALHHCFDGPTGELAHAFFPPHGGIHFDDSEYWVLGPTRYSWKKGVWLTDLVHVAAHEIGHALGLMHSQHGRALMHLNATLRGWKALSQDELWGLHRLYGCLDRLFVCASWARRGFCDARRRLMKRLCPSSCDFCYEFPFPTVATTPPPPRTKTRLVPEGRNVTFRCGQKILHKKGKVYWYKDQEPLEFSYPGYLALGEAHLSIIANAVNEGTYTCVVRRQQRVLTTYSWRVRVRG

SEQ ID NO: 753592 - protein, 455 aa, Homo sapiens
PGCTRAAEPLPPLRILPGGSAARNSGDAAPCSPEPHSKSAMGRGARVPSEAPGAGVERRWLGAALVALCLLPALVLLARLGAPAVPAWSAAQGDVAALGLSAVPPTRVPGPLAPRRRRYTLTPARLRWDHFNLTYRILSFPRNLLSPRETRRALAAAFRMWSDVSPFSFREVAPEQPSDLRIGFYPINHTDCLVSALHHCFDGPTGELAHAFFPPHGGIHFDDSEYWVLGPTRYSWKKGVWLTDLVHVAAHEIGHALGLMHSQHGRALMHLNATLRGWKALSQDELWGLHRLYGESLCRAGGRGPGGPEPGVLPTLPTGCLDRLFVCASWARRGFCDARRRLMKRLCPSSCDFCYEFPFPTVATTPPPPRTKTRLVPEGRNVTFRCGQKILHKKGKVYWYKDQEPLEFSYPGYLALGEAHLSIIANAVNEGTYTCVVRRQQRVLTTYSWRVRVRG

SEQ ID NO: 753593 - protein, 214 aa, Homo sapiens
GELAHGRRGWARGSQALTPGARSVWLTDLVHVAAHEIGHALGLMHSQHGRALMHLNATLRGWKALSQDELWGLHRLYGCLDRLFVCASWARRGFCDARRRLMKRLCPSSCDFCYEFPFPTVATTPPPPRTKTRLVPEGRNVTFRCGQKILHKKGKVYWYKDQEPLEFSYPGYLALGEAHLSIIANAVNEGTYTCVVRRQQRVLTTYSWRVRVRG

SEQ ID NO: 753594 - protein, 127 aa, Homo sapiens
PQDQNQAGARGQERDLPLRPEDPPQERESVVSERPGRSSGWAARGRPWGRGAGQAAGGGCACRNAPPPCSWYKDQEPLEFSYPGYLALGEAHLSIIANAVNEGTYTCVVRRQQRVLTTYSWRVRVRG

SEQ ID NO: 753595 - protein, 430 aa, Homo sapiens
PGCTRAAEPLPPLRILPGGSAARNSGDAAPCSPEPHSKSAMGRGARVPSEAPGAGVERRWLGAALVALCLLPALVLLARLGAPAVPAWSAAQGDVAALGLSAVPPTRVPGPLAPRRRRYTLTPARLRWDHFNLTYRILSFPRNLLSPRETRRALAAAFRMWSDVSPFSFREVAPEQPSDLRIGFYPINHTDCLVSALHHCFDGPTGELAHAFFPPHGGIHFDDSEYWVLGPTRYSWKKGVWLTDLVHVAAHEIGHALGLMHSQHGRALMHLNATLRGWKALSQDELWGLHRLYGCLDRLFVCASWARRGFCDARRRLMKRLCPSSCDFCYEFPFPTVATTPPPPRTKTRLVPEGRNVTFRCGQKILHKKGKVYWYKDQEPLEFSYPGYLALGEAHLSIIANAVNEGTYTCVVRRQQRVLTTYSWRVRVRG

SEQ ID NO: 753596 - protein, 471 aa, Homo sapiens
PGCTRAAEPLPPLRILPGGSAARNSGDAAPCSPEPHSKSAMGRGARVPSEAPGAGVERRWLGAALVALCLLPALVLLARLGAPAVPAWSAAQGDVAALGLSAVPPTRVPGPLAPRRRRYTLTPARLRWDHFNLTYRILSFPRNLLSPRETRRALAAAFRMWSDVSPFSFREVAPEQPSDLRIGFYPINHTDCLVSALHHCFDGPTGELAHAFFPPHGGIHFDDSEYWVLGPTRYSWKKGDRPGSSWRPLLCSTVGCRGRALGQTAGGTFRGGGCHWSLAGVWLTDLVHVAAHEIGHALGLMHSQHGRALMHLNATLRGWKALSQDELWGLHRLYGCLDRLFVCASWARRGFCDARRRLMKRLCPSSCDFCYEFPFPTVATTPPPPRTKTRLVPEGRNVTFRCGQKILHKKGKVYWYKDQEPLEFSYPGYLALGEAHLSIIANAVNEGTYTCVVRRQQRVLTTYSWRVRVRG

SEQ ID NO: 753597 - protein, 391 aa, Homo sapiens
PGCTRAAEPLPPLRILPGGSAARNSGDAAPCSPEPHSKSAMGRGARVPSEAPGAGVERRWLGAALVALCLLPALVLLARLGAPAVPAWSAAQGDVAALGLSAVPPTRVPGPLAPRRRRYTLTPARLRWDHFNLTYRILSFPRNLLSPRETRRALAAAFRMWSDVSPFSFREVAPEQPSDLRIGGRPPPPRPGPARPASQPRAPPRLLPDQPHEIGHALGLMHSQHGRALMHLNATLRGWKALSQDELWGLHRLYGCLDRLFVCASWARRGFCDARRRLMKRLCPSSCDFCYEFPFPTVATTPPPPRTKTRLVPEGRNVTFRCGQKILHKKGKVYWYKDQEPLEFSYPGYLALGEAHLSIIANAVNEGTYTCVVRRQQRVLTTYSWRVRVRG

SEQ ID NO: 753598 - protein, 125 aa, Homo sapiens
LRSSSRRGSSPSWRNVIIRLGLGRQPSASPPRANRLRGPRGLLSSSQAAGPWRQAEAGPGPVPHPTSGSGPPTSPQGALPTTTFPVTQMTTFNTKWGGGRRPSSARGTCCELPGSPGCAHCSPVS

SEQ ID NO: 753599 - protein, 277 aa, Homo sapiens
MLNSTGELEFSNEEDPEIISQLTSLPLSGGKSSAGVPEKTGYPDSVYVMAANIFQGIRIEKSAQKVLIKYGNEPLRSLSESEDQSFQRLSYELAFSALKYQDILETILIDSCIFPSTTIPDHLSSLIIVMLYDFQDRKFQTRVLSDNEEPISEVQEVENLLNSFKIKLAAALARCRIKHDALSIYHILPETVRKQELRASTLPLYAWINTCKISPEEVYNNLKRRGYNKVKSVLHIDDKVFAVDQHCYDVLIFPSHLKNDLINIDLFKDYKLIFQVN

SEQ ID NO: 753600 - protein, 175 aa, Homo sapiens
MLNSTGELEFSNEEDPEIISQLTSLPLSGGKSSAGVPEKTGYPDSVYVMAANIFQGIRIEKSAQKVLIKYGNEPLRSLSESEDQSFQRLSYELAFSALKYQDILETILIDSCIFPSTTIPDHLSSLIIVMLYDFQDRKFQTRVLSDNEEPISEVQEVENLLNSISPHLLTCCLLS

SEQ ID NO: 753601 - protein, 191 aa, Homo sapiens
MLNSTGELEFSNEEDPEIISQLTSLPLSGGKSSAGVPEKTGYPDSVYVMAANIFQGIRIEKSAQKVLIKYGNEPLRSLSESEDQSFQRLSYELAFSALKYQDILETILIDSCIFPSTTIPDHLSSLIIVMLYDFQDRKFQTRVLSDNEEPISEVQEVENLLNSKKALTKCQHLDFGLLSLQNCEKINFCSL

SEQ ID NO: 753602 - protein, 345 aa, Homo sapiens
RRRPGGSRGGRCGARSREAAAAQGVPSVSAPGRGGGAARGGGGWRRSALVPGPGSEARSPPTEMSRQTATALPTGTSKCPPSQRVPALTGTTASNNDLASLFECPVCFDYVLPPILQCQSGHLVCSNCRPKLTCCPTCRGPLGSIRNLAMEKVANSVLFPCKYASSGCEITLPHTEKADHEELCEFRPYSCPCPGASCKWQGSLDAVMPHLMHQHKSITTLQGEDIVFLATDINLPGAVDWVMMQSCFGFHFMLVLEKQEKYDGHQQFFAIVQLIGTRKQAENFAYRLELNGHRRRLTWEATPRSIHEGIATAIMNSDCLVFDTSIAQLFAENGNLGINVTISMC

SEQ ID NO: 753603 - protein, 299 aa, Homo sapiens
MVIIIFLLPPYVFISEKMSRQTATALPTGTSKCPPSQRVPALTGTTASNNDLASLFECPVCFDYVLPPILQCQSGHLVCSNCRPKLTCCPTCRGPLGSIRNLAMEKVANSVLFPCKYASSGCEITLPHTEKADHEELCEFRPYSCPCPGASCKWQGSLDAVMPHLMHQHKSITTLQGEDIVFLATDINLPGAVDWVMMQSCFGFHFMLVLEKQEKYDGHQQFFAIVQLIGTRKQAENFAYRLELNGHRRRLTWEATPRSIHEGIATAIMNSDCLVFDTSIAQLFAENGNLGINVTISMC

SEQ ID NO: 753604 - protein, 299 aa, Homo sapiens; identical to SEQ ID NO: 753603

SEQ ID NO: 753605 - protein, 299 aa, Homo sapiens; identical to SEQ ID NO: 753603

SEQ ID NO: 753606 - protein, 299 aa, Homo sapiens; identical to SEQ ID NO: 753603

SEQ ID NO: 753607 - protein, 283 aa, Homo sapiens
MCEELLVTMYFSGTSKCPPSQRVPALTGTTASNNDLASLFECPVCFDYVLPPILQCQSGHLVCSNCRPKLTCCPTCRGPLGSIRNLAMEKVANSVLFPCKYASSGCEITLPHTEKADHEELCEFRPYSCPCPGASCKWQGSLDAVMPHLMHQHKSITTLQGEDIVFLATDINLPGAVDWVMMQSCFGFHFMLVLEKQEKYDGHQQFFAIVQLIGTRKQAENFAYRLELNGHRRRLTWEATPRSIHEGIATAIMNSDCLVFDTSIAQLFAENGNLGINVTISMC

SEQ ID NO: 753608 - protein, 299 aa, Homo sapiens; identical to SEQ ID NO: 753603

SEQ ID NO: 753609 - protein, 138 aa, Homo sapiens
MPHLMHQHKSITTLQGEDIVFLATDINLPGAVDWVMMQSCFGFHFMLVLEKQEKYDGHQQFFAIVQLIGTRKQAENFAYRLELNGHRRRLTWEATPRSIHEGIATAIMNSDCLVFDTSIAQLFAENGNLGINVTISMC

SEQ ID NO: 753610 - protein, 299 aa, Homo sapiens; identical to SEQ ID NO: 753603

SEQ ID NO: 753611 - protein, 299 aa, Homo sapiens; identical to SEQ ID NO: 753603

SEQ ID NO: 753612 - protein, 313 aa, Homo sapiens
MTGKATPPSLYSWRGVLFTCLPAARTRKRKEMSRQTATALPTGTSKCPPSQRVPALTGTTASNNDLASLFECPVCFDYVLPPILQCQSGHLVCSNCRPKLTCCPTCRGPLGSIRNLAMEKVANSVLFPCKYASSGCEITLPHTEKADHEELCEFRPYSCPCPGASCKWQGSLDAVMPHLMHQHKSITTLQGEDIVFLATDINLPGAVDWVMMQSCFGFHFMLVLEKQEKYDGHQQFFAIVQLIGTRKQAENFAYRLELNGHRRRLTWEATPRSIHEGIATAIMNSDCLVFDTSIAQLFAENGNLGINVTISMC

SEQ ID NO: 753613 - protein, 289 aa, Homo sapiens
  misc_feature (2)..(2): Xaa can be any naturally occurring amino acid
  misc_feature (7)..(7): Xaa can be any naturally occurring amino acid
TXTPRPXMSRQTATALPTGTSKCPPSQRVPALTGTTASNNDLASLFECPVCFDYVLPPILQCQSGHLVCSNCRPKLTCCPTCRGPLGSIRNLAMEKVANSVLFPCKYASSGCEITLPHTEKADHEELCEFRPYSCPCPGASCKWQGSLDAVMPHLMHQHKSITTLQGEDIVFLATDINLPGAVDWVMMQSCFGFHFMLVLEKQEKYDGHQQFFAIVQLIGTRKQAENFAYRLELNGHRRRLTWEATPRSIHEGIATAIMNSDCLVFDTSIAQLFAENGNLGINVTISMC

SEQ ID NO: 753614 - protein, 299 aa, Homo sapiens; identical to SEQ ID NO: 753603

SEQ ID NO: 753615 - protein, 299 aa, Homo sapiens; identical to SEQ ID NO: 753603

SEQ ID NO: 753616 - protein, 299 aa, Homo sapiens; identical to SEQ ID NO: 753603

SEQ ID NO: 753617 - protein, 299 aa, Homo sapiens; identical to SEQ ID NO: 753603

SEQ ID NO: 753618 - protein, 39 aa, Homo sapiens
MRQLRHRDPPEAIQGTCLTRVGLCTARPPLLAAAPSQLC

SEQ ID NO: 753619 - protein, 798 aa, Homo sapiens
MEAGEGKERVPKQRQVLIFFVLLGIAQASCQPRHYSVAEETESGSFVANLLKDLGLEIGELAVRGARVVSKGKKMHLQFDRQTGDLLLNEKLDREELCGPTEPCVLPFQVLLENPLQFFQAELRIRDVNDHSPVFLDKEILLKIPESITPGTTFLIERAQDLDVGTNSLQNYTISPNFHFHLNLQDSLDGIILPQLVLNRALDREEQPEIRLTLTALDGGSPPRSGTALVRIEVVDINDNVPEFAKLLYEVQIPEDSPVGSQVAIVSARDLDIGTNGEISYAFSQASEDIRKTFRLSAKSGELLLRQKLDFESIQTYTVNIQATDGGGLSGTCVVFVQVMDLNDNPPELTMSTLINQIPENLQDTLIAVFSVSDPDSGDNGRMVCSIQDDLPFFLKPSVENFYTLVISTALDRETRSEYNITITVTDFGTPRLKTEHNITVLVSDVNDNAPAFTQTSYTLFVRENNSPALHIGSVSATDRDSGTNAQVTYSLLPPQDPHLPLASLVSINADNGHLFALQSLDYEALQAFEFRVGAADRGSPALSSEALVRVLVLDANDNSPFVLYPLQNGSAPCTELVPRAAEPGYLVTKVVAVDGDSGQNAWLSYQLLKATEPGLFGVWAHNGEVRTARLLRERDAAKQRLVVLVKDNGEPPRSATATLHVLLVDGFSQPYLLLPEAAPAQAQADLLTVYLVVALASVSSLFLFSVLLFVAVRLCRRSRAASVGRCSVPEGPFPGQMVDVSGTGTLSQSYQYEVCLTGGSGTNEFKFLKPIIPNFVAQGAERVSEANPSFRKSFEFT

SEQ ID NO: 753620 - protein, 447 aa, Homo sapiens
MEAGEGKERVPKQRQVLIFFVLLGIAQASCQPRHYSVAEETESGSFVANLLKDLGLEIGELAVRGARVVSKGKKMHLQFDRQTGDLLLNEKLDREELCGPTEPCVLPFQVLLENPLQFFQAELRIRDVNDHSPVFLDKEILLKIPESITPGTTFLIERAQDLDVGTNSLQNYTISPNFHFHLNLQDSLDGIILPQLVLNRALDREEQPEIRLTLTALDGGSPPRSGTALVRIEVVDINDNVPEFAKLLYEVQIPEDSPVGSQVAIVSARDLDIGTNGEISYAFSQASEDIRKTFRLSAKSGELLLRQKLDFESIQTYTVNIQATDGGGLSGTCVVFVQVMDLNDNPPELTMSTLINQIPENLQDTLIAVFSVSDPDSGDNGRMVCSIQDDLPFFLKPSVENFYTLVISTALDRETRSEYNITITVTDRDPVPELPVRGVSDWRLRDK

SEQ ID NO: 753621 - protein, 471 aa, Homo sapiens
MEAGEGKERVPKQRQVLIFFVLLGIAQASCQPRHYSVAEETESGSFVANLLKDLGLEIGELAVRGARVVSKGKKMHLQFDRQTGDLLLNEKLDREELCGPTEPCVLPFQVLLENPLQFFQAELRIRDVNDHSPVFLDKEILLKIPESITPGTTFLIERAQDLDVGTNSLQNYTISPNFHFHLNLQDSLDGIILPQLVLNRALDREEQPEIRLTLTALDGGSPPRSGTALVRIEVVDINDNVPEFAKLLYEVQIPEDSPVGSQVAIVSARDLDIGTNGEISYAFSQASEDIRKTFRLSAKSGELLLRQKLDFESIQTYTVNIQATDGGGLSGTCVVFVQVMDLNDNPPELTMSTLINQIPENLQDTLIAVFSVSDPDSGDNGRMVCSIQDDLPFFLKPSVENFYTLVISTALDRETRSEYNITITVTDPRCLRSSSSRCSCSWRCGCAGGAGRPRWVAARCPRAPFQGRWWT

SEQ ID NO: 753622 - protein, 121 aa, Homo sapiens
TRSLSLSHCGGLGLSSLHVPAVIDDSQGQFHCPRAWSSCCSGVLFGVEEKHSSLRQKTTHTHTHTHTHTHIRTLHVGLVSPASQCPVSRPPSLWLNRRRWGCICSAPLSQRCRSLCPAQNR

SEQ ID NO: 753623 - protein, 283 aa, Homo sapiens
CWPLSPAAYIKAYLLENGICIAKKKTKVARKSLDPLYNQVLLFPESPQGKVLQVIVWGNYGRMERKQFMGVARVLLEELDLTTLAVGWYKLFPTSSMVDPATGPLLRQASQLSLESTVGPCGERSECWNGEGLPKMAWRPPSPDLGPQAQGHIEQEDGALPHSGEAERGDLPPLGPLLTPSLPPTPETSPLPTGLATLLTWPVLDLVDVAAVQRKERLRWQSRPLSLPKLSNFSPFLPPRKLAAQSHVQNPAGHLHGANYQQVSFLRHRVQAATPAPEMKGQL

SEQ ID NO: 753624 - protein, 105 aa, Homo sapiens
LLLSPYLPAPLAGPTTLLHTTRFLSFWGSSTGHQGSADSKQSADLQQLWGTSDRSYSPTMELNGWGLHSTYTHTHTHSYPKWSQTNNDSNSNSTTYWPSYLREVS

SEQ ID NO: 753625 - protein, 192 aa, Homo sapiens
NETVCTLWQEGRCFRQVCRFRHMEIDKKRSEIPCYWENQPTGCQKLNCAFHHNRGRYVDGLFLPPSKTVLPTVPESPEEEVKASQLSVQQNKLSVQSNPSPQLRSVMKVESSENVPSPTHPPVVINAADDDEDDDDQFSEEGDETKTPTLQPTPEVHNGLRVTSVRKPAVNIKQGECLNFGIKTLEEIKSKK

SEQ ID NO: 753626 - protein, 102 aa, Homo sapiens
LLIISNHTRVQSSCFGMETYGYLQRESCFQGPHKTTWQTSQCYRGSLLPELPTWWRVASKMAASLSFSDLGFLAPRIPRNGILGHAVNVIALLEDVGHGREP

SEQ ID NO: 753627 - protein, 769 aa, Homo sapiens
LLIISNHTRVQSSCFGMETYGYLQRESCFQGPHELYFKNLSKRNKQIMEKNGNNRKLRVCVATCNRADYSKLAPIMFGIKTEPEFFELDVVVLGSHLIDDYGNTYRMIEQDDFDINTRLHTIVRGEDEAAMVESVGLALVKLPDVLNRLKPDIMIVHGDRFDALALATSAALMNIRILHIEGGEVSGTIDDSIRHAITKLAHYHVCCTRSAEQHLISMCEDHDRILLAGCPSYDKLLSAKNKDYMSIIRMWLGDDVKSKDYIVALQHPVTTDIKHSIKMFELTLDALISFNKRTLVLFPNIDAGSKEMVRVMRKKGIEHHPNFRAVKHVPFDQFIQLVAHAGCMIGNSSCGVREVGAFGTPVINLGTRQIGRETGENVLHVRDADTQDKILQALHLQFGKQYPCSKIYGDGNAVPRILKFLKSIDLQEPLQKKFCFPPVKENISQDIDHILETLSALAVDLGGTNLRVAIVSMKGEIVKKYTQFNPKTYEERINLILQMCVEAAAEAVKLNCRILGVGISTGGRVNPREGIVLHSTKLIQEWNSVDLRTPLSDTLHLPVWVDNDGNCAALAERKFGQGKGLENFVTLITGTGIGGGIIHQHELIHGSSFCAAELGHLVVSLDGPDCSCGSHGCIEAYASGMALQREAKKLHDEDLLLVEGMSVPKDEAVGALHLIQAAKLGNAKAQSILRTAGTALGLGVVNILHTMNPSLVILSGVLASHYIHIVKDVIRQQALSSVQDVDVVVSDLVDPALLGAASMVLDYTTRRIY

SEQ ID NO: 753628 - protein, 769 aa, Homo sapiens; identical to SEQ ID NO: 753627

SEQ ID NO: 753629 - protein, 663 aa, Homo sapiens
MIEQDDFDINTRLHTIVRGEDEAAMVESVGLALVKLPDVLNRLKPDIMIVHGDRFDALALATSAALMNIRILHIEGGEVSGTIDDSIRHAITKLAHYHVCCTRSAEQHLISMCEDHDRILLAGCPSYDKLLSAKNKDYMSIIRMWLGDDVKSKDYIVALQHPVTTDIKHSIKMFELTLDALISFNKRTLVLFPNIDAGSKEMVRVMRKKGIEHHPNFRAVKHVPFDQFIQLVAHAGCMIGNSSCGVREVGAFGTPVINLGTRQIGRETGENVLHVRDADTQDKILQALHLQFGKQYPCSKIYGDGNAVPRILKFLKSIDLQEPLQKKFCFPPVKENISQDIDHILETLSALAVDLGGTNLRVAIVSMKGEIVKKYTQFNPKTYEERINLILQMCVEAAAEAVKLNCRILGVGISTGGRVNPREGIVLHSTKLIQEWNSVDLRTPLSDTLHLPVWVDNDGNCAALAERKFGQGKGLENFVTLITGTGIGGGIIHQHELIHGSSFCAAELGHLVVSLDGPDCSCGSHGCIEAYASGMALQREAKKLHDEDLLLVEGMSVPKDEAVGALHLIQAAKLGNAKAQSILRTAGTALGLGVVNILHTMNPSLVILSGVLASHYIHIVKDVIRQQALSSVQDVDVVVSDLVDPALLGAASMVLDYTTRRIY

SEQ ID NO: 753630 - protein, 402 aa, Homo sapiens
DLLFFSFFPLRSCHGLLTHLDKILQALHLQFGKQYPCSKIYGDGNAVPRILKFLKSIDLQEPLQKKFCFPPVKENISQDIDHILETLSALAVDLGGTNLRVAIVSMKGEIVKKYTQFNPKTYEERINLILQMCVEAAAEAVKLNCRILGVGISTGGRVNPREGIVLHSTKLIQEWNSVDLRTPLSDTLHLPVWVDNDGNCAALAERKFGQGKGLENFVTLITGTGIGGGIIHQHELIHGSSFCAAELGHLVVSLDGPDCSCGSHGCIEAYASGMALQREAKKLHDEDLLLVEGMSVPKDEAVGALHLIQAAKLGNAKAQSILRTAGTALGLGVVNILHTMNPSLVILSGVLASHYIHIVKDVIRQQALSSVQDVDVVVSDLVDPALLGAASMVLDYTTRRIY

SEQ ID NO: 753631 - protein, 95 aa, Homo sapiens
HRQDIYLDLEWEDSQEDFLEERAPQLAFESQTDRVWQPGSSTGEQTRLRHIHSCHLLNIAKPCSKHLERMISSVHVATLEAGPFTVHTWQRKELI

SEQ ID NO: 753632 - protein, 40 aa, Homo sapiens
MSMAPHQRPISHPGSSQIYVSFTINHLYSPAALSHHRAVA

SEQ ID NO: 753633 - protein, 76 aa, Homo sapiens
QSTGPKNQPEALTLSSLSTCPQQQQPRPSQQATEPPLALPVPVPAIKLHPTATLCRQAFPDTKASSCNSSANCKAF

SEQ ID NO: 753634 - protein, 135 aa, Homo sapiens
MSACRSFAVAICILEISILTAQYTTSYDPELTESSGSASHIDCRMSPWSEWSQCDPCLRQMFRSRSIEVFGQFNGKRCTDAVGDRRQCVPTEPCEDAEDDCGNDFQCSTGRCIKMRLRCNGDNDCGYFSDEDDCE

SEQ ID NO: 753635 - protein, 1066 aa, Homo sapiens
MTSYRERSADLARFYTVTEPQRHPRGYTVYKVTARVVSRRNPEDVQEIIVWKRYSDFKKLHKELWQIHKNLFRHSELFPPFAKGIVFGRFDETVIEERRQCAEDLLQFSANIPALYNSKQLEDFFKGGIINDSSELIGPAEAHSDSLIDTFPECSTEGFSSDSDLVSLTVDVDSLAELDDGMASNQNSPIRTFGLNLSSDSSALGAVASDSEQSKTEEERESRSLFPGSLKPKLGKRDYLEKAGELIKLALKKEEEDDYEAASDFYRKGVDLLLEGVQGESSPTRREAVKRRTAEYLMRAESISSLYGKPQLDDVSQPPGSLSSRPLWNLRSPAEELKAFRVLGVIDKVLLVMDTRTEQTFILKGLRKSSEYSRNRKTIIPRCVPNMVCLHKYIISEESVFLVLQHAEGGKLWSYISKFLNRSPEESFDIKEVKKPTLAKVHLQQPTSSPQDSSSFESRGSDGGSMLKALPLKSSLTPSSQDDSNQEDDGQDSSPKWPDSGSSSEEECTTSYLTLCNEYGQEKIEPGSLNEEPFMKTEGNGVDTKAIKSFPAHLAADSDSPSTQLRAHELKFFPNDDPEAVSSPRTSDSLSRSKNSPMEFFRIDSKDSASELLGLDFGEKLYSLKSEPLKPFFTLPDGDSASRSFNTSESKVEFKAQDTISRGSDDSVPVISFKDAAFDDVSGTDEGRPDLLVNLPGELESTREAAAMGPTKFTQTNIGIIENKLLEAPDVLCLRLSTEQCQAHEEKGIEELSDPSGPKSYSITEKHYAQEDPRMLFVAAVDHSSSGDMSLLPSSDPKFQGLGVVESAVTANNTEESLFRICSPLSGANEYIASTDTLKTEEVLLFTDQTDDLAKEEPTSLFQRDSETKGESGLVLEGDKEIHQIFEDLDKKLALASRFYIPEGCIQRWAAEMVVALDALHREGIVCRDLNPNNILLNDRGHIQLTYFSRWSEVEDSCDSDAIERMYCAPEVGAITEETEACDWWSLGAVLFELLTGKTLVECHPAGINTHTTLNMPECVSEEARSLIQQLLQFNPLERLGAGVAGVEDIKSHPFFTPVDWAELMR

SEQ ID NO: 753636 - protein, 1048 aa, Homo sapiens
MTSYRERSADLARFYTVTEPQRHPRGYTVYKVTARVVSRRNPEDVQEIIVWKRYSDFKKLHKELWQIHKKAICETVIEERRQCAEDLLQFSANIPALYNSKQLEDFFKGGIINDSSELIGPAEAHSDSLIDTFPECSTEGFSSDSDLVSLTVDVDSLAELDDGMASNQNSPIRTFGLNLSSDSSALGAVASDSEQSKTEEERESRSLFPGSLKPKLGKRDYLEKAGELIKLALKKEEEDDYEAASDFYRKGVDLLLEGVQGESSPTRREAVKRRTAEYLMRAESISSLYGKPQLDDVSQPPGSLSSRPLWNLRSPAEELKAFRVLGVIDKVLLVMDTRTEQTFILKGLRKSSEYSRNRKTIIPRCVPNMVCLHKYIISEESVFLVLQHAEGGKLWSYISKFLNRSPEESFDIKEVKKPTLAKVHLQQPTSSPQDSSSFESRGSDGGSMLKALPLKSSLTPSSQDDSNQEDDGQDSSPKWPDSGSSSEEECTTSYLTLCNEYGQEKIEPGSLNEEPFMKTEGNGVDTKAIKSFPAHLAADSDSPSTQLRAHELKFFPNDDPEAVSSPRTSDSLSRSKNSPMEFFRIDSKDSASELLGLDFGEKLYSLKSEPLKPFFTLPDGDSASRSFNTSESKVEFKAQDTISRGSDDSVPVISFKDAAFDDVSGTDEGRPDLLVNLPGELESTREAAAMGPTKFTQTNIGIIENKLLEAPDVLCLRLSTEQCQAHEEKGIEELSDPSGPKSYSITEKHYAQEDPRMLFVAAVDHSSSGDMSLLPSSDPKFQGLGVVESAVTANNTEESLFRICSPLSGANEYIASTDTLKTEEVLLFTDQTDDLAKEEPTSLFQRDSETKGESGLVLEGDKEIHQIFEDLDKKLALASRFYIPEGCIQRWAAEMVVALDALHREGIVCRDLNPNNILLNDRGHIQLTYFSRWSEVEDSCDSDAIERMYCAPEVGAITEETEACDWWSLGAVLFELLTGKTLVECHPAGINTHTTLNMPECVSEEARSLIQQLLQFNPLERLGAGVAGVEDIKSHPFFTPVDWAELMR

SEQ ID NO: 753637 - protein, 1066 aa, Homo sapiens; identical to SEQ ID NO: 753635

SEQ ID NO: 753638 - protein, 108 aa, Homo sapiens
LAGLTLLISTATQVGAITEETEACDWWSLGAVLFELLTGKTLVECHPAGINTHTTLNMPECVSEEARSLIQQLLQFNPLERLGAGVAGVEDIKSHPFFTPVDWAELMR

SEQ ID NO: 753639 - protein, 359 aa, Homo sapiens
MTSYRERSADLARFYTVTEPQRHPRGYTVYKVTARVVSRRNPEDVQEIIVWKRYSDFKKLHKELWQIHKKAICETVIEERRQCAEDLLQFSANIPALYNSKQLEDFFKGGIINDSSELIGPAEAHSDSLIDTFPECSTEGFSSDSDLVSLTVDVDSLAELDDGMASNQNSPIRTFGLNLSSDSSALGAVASDSEQSKTEEERESRSLFPGSLKPKLGKRDYLEKAGELIKLALKKEEEDDYEAASDFYRKGVDLLLEGVQGESSPTRREAVKRRTAEYLMRAESISSLYGKPQLDDVSQPPGSLSSRPLWNLRSPAEELKAFRVLGVIDKVILQCLFKSSVINRLHADILSLKLWILRI

SEQ ID NO: 753640 - protein, 227 aa, Homo sapiens
MLAKGKKAVMKFRNSIGNSQRMNSYQLPNINSYMMPIPPPLPPTGKITRENRSETWRRRRFRPTTAPNGLEPLLTKDSRRIHKTSLHSNAAITMIYLGKNVHLSSDNPDFRDEIKVYQQHCGGENLCVYKGKLLEKETFQFISKRHHGFPFSLTFFLNGMQVNRLSSCCEYKHRKGSRLGGKRGYFGFVCVERSSPCYKCIIAMGLDKKPSLPKSRKEKSTEKGEEL

SEQ ID NO: 753641 - protein, 404 aa, Homo sapiens
MSYSCGLPSLSCRTSCSSRPCVPPSCHGCTLPGACNIPANVSNCNWFCEGSFNGSEKETMQFLNDRLASYLEKVRQLERDNAELENLIRERSQQQEPLVCASYQSYFKTIEELQQKILCSKSENARLVVQIDNAKLASDDFRTKYETELSLRQLVESDINGLRRILDELTLCRSDLEAQVESLKEELLCLKQNHEQEVNTLRCQLGDRLNVEVDAAPTVDLNQVLNETRSQYEALVETNRREVEQWFATQTEELNKQVVSSSEQLQSYQAEIIELRRTVNALEIELQAQHNLRDSLENTLTESEARYSSQLSQVQRLITNVESQLAEIRSDLERQNQEYQVLLDVRARLECEINTYRSLLESEDCKLPSNPCATTNACDKSTGPCISNPCGLRARCGPCNTFGY

SEQ ID NO: 753642 - protein, 101 aa, Homo sapiens
RLESNGAILAHCSLRLPGLSDSHASASCVAGITDVRHHAQLIFVFLLETGFHHVSQADLELLASCDPSTLASQSAAIIGVSHRTQPEFLFISHSFFSDIRN

SEQ ID NO: 753643 - protein, 461 aa, Homo sapiens
MLELRHRGSCPGPREAVSPPHREGEAAGGDHETESTSDKETDIDDRYGDLDSRTDSDIPEIPPSSDRTPEILKKALSGLSSRWKNWWIRGILTLTMISLFFLIIYMGSFMLMLLVLGIQVKCFHEIITIGYRVYHSYDLPWFRTLSWYFLLCVNYFFYGETVADYFATFVQREEQLQFLIRYHRFISFALYLAGFCMFVLSLVKKHYRLQFYMFAWTHVTLLITVTQSHLVIQNLFEGMIWFLVPISSVICNDITAYLFGFFFGRTPLIKLSPKKTWEGFIGGFFSTVVFGFIAAYVLSKYQYFVCPVEYRSDVNSFVTECEPSELFQLQTYSLPPFLKAVLRQERVSLYPFQIHSIALSTFASLIGPFGGFFASGFKRAFKIKDFANTIPGHGGIMDRFDCQYLMATFVHVYITSFIRGPNPSKVLQQLLVLQPEQQLNIYKTLKTHLIEKGILQPTLKV

SEQ ID NO: 753644 - protein, 224 aa, Homo sapiens
MLELRHRGSCPGPREAVSPPHREGEAAGGDHETESTSDKETDIDDRYGDLDSRTDSDIPEIPPSSDRTPEILKKALSGLSSRWKNWWIRGILTLTMISLFFLIIYMGSFMLMLLVLGIQVKCFHEIITIGYRVYHSYDLPWFRTLSWYFLLCVNYFFYGETVADYFATFVQREEQLQFLIRYHRFISFALYLAGFCMFVLSLVKKHYRLQFYMVPCSNIKCYLQ

SEQ ID NO: 753645 - protein, 461 aa, Homo sapiens; identical to SEQ ID NO: 753643

SEQ ID NO: 753646 - protein, 366 aa, Homo sapiens [sequence omitted]

SEQ ID NO: 753647 - protein, 461 aa, Homo sapiens; identical to SEQ ID NO: 753643

SEQ ID NO: 753648 - protein, 66 aa, Homo sapiens
GRRAGHLQNGINERALEAACSERGSGGGPGQAPGARREQRRRRRGLRLPGARLHAEAQVGGGEGKD

SEQ ID NO: 753649 - protein, 461 aa, Homo sapiens; identical to SEQ ID NO: 753643

SEQ ID NO: 753650 - protein, 461 aa, Homo sapiens; identical to SEQ ID NO: 753643

SEQ ID NO: 753651 - protein, 398 aa, Homo sapiens
MTDMEIWIPEQILIFRKFHHPQIEPLRFSKKLYLVYLQVIIYMGSFMLMLLVLGIQVKCFHEIITIGYRVYHSYDLPWFRTLSWYFLLCVNYFFYGETVADYFATFVQREEQLQFLIRYHRFISFALYLAGFCMFVLSLVKKHYRLQFYMFAWTHVTLLITVTQSHLVIQNLFEGMIWFLVPISSVICNDITAYLFGFFFGRTPLIKLSPKKTWEGFIGGFFSTVVFGFIAAYVLSKYQYFVCPVEYRSDVNSFVTECEPSELFQLQTYSLPPFLKAVLRQERVSLYPFQIHSIALSTFASLIGPFGGFFASGFKRAFKIKDFANTIPGHGGIMDRFDCQYLMATFVHVYITSFIRGPNPSKVLQQLLVLQPEQQLNIYKTLKTHLIEKGILQPTLKV

SEQ ID NO: 753652 - protein, 461 aa, Homo sapiens; identical to SEQ ID NO: 753643

SEQ ID NO: 753653 - protein, 334 aa, Homo sapiens
IARYEAGLRQIQKKNRNKCQYCRFHKCLSVGMSHNAIRFGRMPRSEKAKLKAEILTCEHDIEDSETADLKSLAKRIYEAYLKNFNMNKVKARVILSGKASNNPPFVIHDMETLCMAEKTLVAKLVANGIQNKEAEVRIFHCCQCTSVETVTELTEFAKAIPGFANLDLNDQVTLLKYGVYEAIFAMLSSVMNKDGMLVAYGNGFITREFLKSLRKPFCDIMEPKFDFAMKFNALELDDSDISLFVAAIICCGDRPGLLNVGHIEKMQEGIVHVLRLHLQSNHPDDIFLFPKLLQKMADLRQLVTEHAQLVQIIKKTESDAALHPLLQEIYRDMY

SEQ ID NO: 753654 - protein, 468 aa, Homo sapiens
MVDTESPLCPLSPLEAGDLESPLSEEFLQEMGNIQEISQSIGEDSSGSFGFTEYQYLGSCPGSDGSVITDTLSPASSPSSVTYPVVPGSVDESPSGALNIECRICGDKASGYHYGVHACEGCKGFFRRTIRLKLVYDKCDRSCKIQKKNRNKCQYCRFHKCLSVGMSHNAIRFGRMPRSEKAKLKAEILTCEHDIEDSETADLKSLAKRIYEAYLKNFNMNKVKARVILSGKASNNPPFVIHDMETLCMAEKTLVAKLVANGIQNKEAEVRIFHCCQCTSVETVTELTEFAKAIPGFANLDLNDQVTLLKYGVYEAIFAMLSSVMNKDGMLVAYGNGFITREFLKSLRKPFCDIMEPKFDFAMKFNALELDDSDISLFVAAIICCGDRPGLLNVGHIEKMQEGIVHVLRLHLQSNHPDDIFLFPKLLQKMADLRQLVTEHAQLVQIIKKTESDAALHPLLQEIYRDMY

SEQ ID NO: 753655 - protein, 258 aa, Homo sapiens
MVDTESPLCPLSPLEAGDLESPLSEEFLQEMGNIQEISQSIGEDSSGSFGFTEYQYLGSCPGSDGSVITDTLSPASSPSSVTYPVVPGSVDESPSGALNIECRICGDKASGYHYGVHACEGCKGFFRRTIRLKLVYDKCDRSCKIQKKNRNKCQYCRFHKCLSVGMSHNAIRFGRMPRSEKAKLKAEILTCEHDIEDSETADLKSLAKRIYEAYLKNFNMNKVKARVILSGKASNNPVGVCGCSGFSWQHGTSVVEDD

SEQ ID NO: 753656 - protein, 74 aa, Homo sapiens
LSPRREGPRAGTSGLALSSAQRSWGVADSEGAFRDLQGSPRRGNPGPGQTDPGLKLRALSALWTQQFVARQAQN

SEQ ID NO: 753657 - protein, 468 aa, Homo sapiens; identical to SEQ ID NO: 753654

SEQ ID NO: 753658 - protein, 468 aa, Homo sapiens; identical to SEQ ID NO: 753654

SEQ ID NO: 753659 - protein, 105 aa, Homo sapiens
VVPSEGGPTGGDIGTCPFLGAAELGRRRLRRCFPRPPGISEARKPGPRTDRPWAEAQGPVCSVDSTVCGKTSSELRSCHHSPLAAACQAWRPLFSSLNCCFLIRK

SEQ ID NO: 753660 - protein, 225 aa, Homo sapiens
METLCMAEKTLVAKLVANGIQNKEAEVRIFHCCQCTSVETVTELTEFAKAIPGFANLDLNDQVTLLKYGVYEAIFAMLSSVMNKDGMLVAYGNGFITREFLKSLRKPFCDIMEPKFDFAMKFNALELDDSDISLFVAAIICCGDRPGLLNVGHIEKMQEGIVHVLRLHLQSNHPDDIFLFPKLLQKMADLRQLVTEHAQLVQIIKKTESDAALHPLLQEIYRDMY

SEQ ID NO: 753661 - protein, 132 aa, Homo sapiens
MNRVKKGSFTCIDNSYTMDCFRDIRAIQGPSVDLLRSPLRRAITMCSHKVHLLPARKDQILSCISHWSHPIPVPPCYHLQCPPLLGTDPVGPLAYSTLFPTREGKIPEGGALQSEVKMAASLRATSAWAWYS

SEQ ID NO: 753662 - protein, 151 aa, Homo sapiens
MVIKKRLDVSKNGLGVPPSVHEKVEFPLGGELQRRLADQAELGPHCVTQAGVQWCNHSSLQPRLRRLKHISHLSFPSIWDHRDMDEAGNHHPQQTNTGTENQTPHVLTRKWELNNENTWTQGGEHHTPGPVREWGARGGRALGQTPNAYGA

SEQ ID NO: 753663 - protein, 111 aa, Homo sapiens
MHLASASGAVNAVALVAMRSEWTRMVLPPRSLGLPALRCPAAETDLIPQGLAQLPLPPHIPKYTYPSPTQSSSPDCGSRMTGQSWTHLCLPGQLTVGAGPKRPLDLDQLPV

SEQ ID NO: 753664 - protein, 84 aa, Homo sapiens
PSHSPLRGLHLRSLPLVHSLDRAPCVHRALPEARKWGRRAASPGVVLAVGVERGKAQLPGREPGAAVDLILRSQRRDAESRGLF

SEQ ID NO: 753665 - protein, 245 aa, Homo sapiens [sequence omitted]

SEQ ID NO: 753666 - protein, 418 aa, Homo sapiens
MSGTEEAILGGRDSHPAAGGGSVLCFGQCQYTAEEYQAIQKALRQRLGPEYISSRMAGGGQKVCYIEGHRVINLANEMFGYNGWAHSITQQNVDFVDLNNGKFYVGVCAFVRVQLKDGSYHEDVGYGVSEGLKSKALSLEKARKEAVTDGLKRALRSFGNALGNCILDKDYLRSLNKLPRQLPLEVDLTKAKRQDLEPSVEEARYNSCRPNMALGHPQLQQVTSPSRPSHAVIPADQDCSSRSLSSSAVESEATHQRKLRQKQLQQQFRERMEKQQVRVSTPSAEKSEAAPPAPPVTHSTPVTVSEPLLEKDFLAGVTQELIKTLEDNSEKWAVTPDAGDGVVKPSSRADPAQTSDTLALNNQMVTQNRTPHSVCHQKPQAKSGSWDLQTYSADQRTTGNWESHRKSQDMKKRKYDPS

SEQ ID NO: 753667 - protein, 418 aa, Homo sapiens; identical to SEQ ID NO: 753666

SEQ ID NO: 753668 - protein, 418 aa, Homo sapiens; identical to SEQ ID NO: 753666

SEQ ID NO: 753669 - protein, 468 aa, Homo sapiens
MSGTEEAILGGRDSHPAAGGGSVLCFGQCQYTAEEYQAIQKALRQRLGPEYISSRMAGGGQKVCYIEGHRVINLANEMFGYNGWAHSITQQNVDFVDLNNGKFYVGVCAFVRVQLKDGSYHEDVGYGVSEGLKSKALSLEKARKEAVTDGLKRALRLPLLGVSGRILYSLFSVHSVMCAGGLPTPTASAQTAPSSPCSSAVLRYAQSFGNALGNCILDKDYLRSLNKLPRQLPLEVDLTKAKRQDLEPSVEEARYNSCRPNMALGHPQLQQVTSPSRPSHAVIPADQDCSSRSLSSSAVESEATHQRKLRQKQLQQQFRERMEKQQVRVSTPSAEKSEAAPPAPPVTHSTPVTVSEPLLEKDFLAGVTQELIKTLEDNSEKWAVTPDAGDGVVKPSSRADPAQTSDTLALNNQMVTQNRTPHSVCHQKPQAKSGSWDLQTYSADQRTTGNWESHRKSQDMKKRKYDPS

SEQ ID NO: 753670 - protein, 131 aa, Homo sapiens
LHSGLQSQPAVRVLPAAAAVAQEPVLAAALSCRSLSSSAVESEATHQRKLRQKQLQQQFRERMEKQQVRVSTPSAEKSEAAPPAPPVTHSTPVTVSEPLLEKDFLAGVTQELISKYLEMLRLLKTTLKSGL

SEQ ID NO: 753671 - protein, 147 aa, Homo sapiens
MEKQQVRVSTPSAEKSEAAPPAPPVTHSTPVTVSEPLLEKDFLAGVTQELIKTLEDNSEKWAVTPDAGDGVVKPSSRADPAQTSDTLALNNQMVTQNRTPHSVCHQKPQAKSGSWDLQTYSADQRTTGNWESHRKSQDMKKRKYDPS

SEQ ID NO: 753672 - protein, 98 aa, Homo sapiens
RGGRGPPGAFRGTRDRHALGSLQFLGLLSSPPSVLPTYDYQLLDDVLLPDQPFISWTSGYLPRKSHPLTIFHDLSHLTRDLPILLLPSSVVSEFLFLP

SEQ ID NO: 753673 - protein, 418 aa, Homo sapiens; identical to SEQ ID NO: 753666

SEQ ID NO: 753674 - protein, 139 aa, Homo sapiens
MSGTEEAILGGRDSHPAAGGGSVLCFGQCQYTAEEYQAIQKALRQRLGPEYISSRMAGGGQKVCYIEGHRVINLANEMFGYNGWAHSITQQNVDFVDLNNGKFYVGVCAFVRVQLKVRGWSRPAARKDQWVVGEGWFIS

SEQ ID NO: 753675 - protein, 207 aa, Homo sapiens
MALGHPQLQQVTSPSRPSHAVIPADQDCSSRSLSSSAVESEATHQRKLRQKQLQQQFRERMEKQQVRVSTPSAEKSEAAPPAPPVTHSTPVTVSEPLLEKDFLAGVTQELIKTLEDNSEKWAVTPDAGDGVVKPSSRADPAQTSDTLALNNQMVTQNRTPHSVCHQKPQAKSGSWDLQTYSADQRTTGNWESHRKSQDMKKRKYDPS

SEQ ID NO: 753676 - protein, 105 aa, Homo sapiens [sequence omitted]

SEQ ID NO: 753677 - protein, 237 aa, Homo sapiens
NALEKAVVLWGGGKSNCFPDLQLGWMLRCPVDMNSQGSDSNEEDYDPNCEEEEEEEEDDPGDIEDYYVGVASDVEQQGADAFDPEEYQFTCLTYKESEGALNEHMTSLASVLKVSHSVAKLILVNFHWQVSEILDRYKSNSAQLLVEARVQPNPSKHVPTSHPPHHCAVCMQFVRKENLLSLACQHQFCRSCWEQHCSVLVKDGVGVGVSCMAQDCPLRTPEDFVFPLLPNEELREK

SEQ ID NO: 753678 - protein, 116 aa, Homo sapiens
MLSCRLQCALAALSIVLALGCVTGAPSDPRLRQFLQKSLAAAAGKQELAKYFLAELLSEPNQTENDALEPEDLSQAAEQDEMRLELQRSANSNPAMAPRERKAGCKNFFWKTFTSC

SEQ ID NO: 753679 - protein, 116 aa, Homo sapiens; identical to SEQ ID NO: 753678

SEQ ID NO: 753680 - protein, 92 aa, Homo sapiens
QIFSIVLPTSLSLFFYPFCPIQELAKYFLAELLSEPNQTENDALEPEDLSQAAEQDEMRLELQRSANSNPAMAPRERKAGCKNFFWKTFTSC

SEQ ID NO: 753681 - protein, 86 aa, Homo sapiens
HHSPPPDLPSYTRPPSELAKYFLAELLSEPNQTENDALEPEDLSQAAEQDEMRLELQRSANSNPAMAPRERKAGCKNFFWKTFTSC

SEQ ID NO: 753682 - protein, 35 aa, Homo sapiens
MVKQFYFVARDVKIELNCWHTLYLTRTVFMCVCVC

SEQ ID NO: 753683 - protein, 72 aa, Homo sapiens
ATEIFQVPRAAEQGRNEGLSCRDLLTSNPAMAPRERKAGLELQRSANSNPAMAPRERKAGCKNFFWKTFTSC

SEQ ID NO: 753684 - protein, 49 aa, Homo sapiens
MNVTSDKAYVATWLLMVEKKREVNYHNVGIFSIIFAFSFLSEVHFSKGM

SEQ ID NO: 753685 - protein, 122 aa, Homo sapiens
KPQEIAWRGSADSGHGLNVKSVNFGLCTFSALSGEVCYVSDSVQEMGDMSLGFLHLAPLGPPTPAISSDHRPYPRLLHLTLLWCTFPTAAFARGQLFPGGCFQIFTTGCLWLLWAPEWDRVF

SEQ ID NO: 753686 - protein, 691 aa, Homo sapiens
MPDALSCVGTLGLLTLSPGDRPHRRPRPAAALPGVCPEAVGQRPEPGALGFHLHPPTHRQTPGPQLTPGPCPGCPRASSGLPGALPVPHTRAQSRRRPPRTPVCGCTGPGPRARVPGFPGFLPTEPSLDSCACSQGGREGPPGGAEVTRGQEVHDPQRLDTSLQRPAGLIVVHATSNGQEPSRLGGAEEERPGTPELAPAPMQSAAVAEPLPSPRAQPPGGTPADAGPGQGSSEEEPELVFAVNLPPAQLSSSDEETREELARIGLVPPPEEFANGVLLATPLAGPGPSPTTVPSPASGKPSSEPPPAPESAADSGVEEADTRSSSDPHLETTSTISTVSSMSTLSSESGELTDTHTSFADGHTFLLEKPPVPPKPKLKSPLGKGPVTFRDPLLKQSSDSELMAQQHHAASAGLASAAGPARPRYLFQRRSKLWGDPVESRGLPGPEDDKPTVISELSSRLQQLNKDTRSLGEEPVGGLGSLLDPAKKSPIAAARLFSSLGELSSISAQRSPGGPGGGASYSVRPSGRYPVARRAPSPVKPASLERVEGLGAGAGGAGRPFGLTPPTILKSSSLSIPHEPKEVRFVVRSVSARSRSPSPSPLPSPASGPGPGAPGPRRPFQQKPLQLWSKFDVGDWLESIHLGEHRDRFEDHEIEGAHLPALTKDDFVELGVTRVGHRMNIERALRQLDGS

SEQ ID NO: 753687 - protein, 611 aa, Homo sapiens
PGPDSPYANLGAFSASLFAPSKPQRRKSPLVKQLQVEDAQERAALAVGSPGPGGGSFAREPSPTHRGPRPGGLDYGAGDGPGLAFGGPGPAKDRRLEERRRSTVFLSVGAIEGSAPGADLPSLQPSRSIDERLLGTGPTAGRDLLLPSPVSALKPLVSGPSLGPSGSTFIHPLTGKPLDPSSPLALALAARERALASQAPSRSPTPVHSPDADRPGPLFVDVQARDPERGSLASPAFSPRSPAWIPVPARREAEKVPREERKSPEDKKSMILSVLDTSLQRPAGLIVVHATSNGQEPSRLGGAEEERPGTPELAPAPMQSAAVAEPLPSPRAQPPGGTPADAGPGQGSSEEEPELVFAVNLPPAQLSSSDEETREELARIGLVPPPEEFANGVLLATPLAGPGPSPTTVPSPASGKPSSEPPPAPESAADSGVEEADTRSSSDPHLETTSTISTVSSMSTLSSESGELTDTHTSFADGHTFLLEKPPVPPKPKLKSPLGKGPVTFRDPLLKQSSDSELMAQQHHAASAGLASAAGPARPRYLFQRRSKLWGDPVESRGLPGPEDDKPTVISELSSRLQQLNKDTRSLGEEPVGGLGSLLDPAKKSPIAAAR

SEQ ID NO: 753688 - protein, 807 aa, Homo sapiens
PGPDSPYANLGAFSASLFAPSKPQRRKSPLVKQLQVEDAQERAALAVGSPGPGGGSFAREPSPTHRGPRPGGLDYGAGDGPGLAFGGPGPAKDRRLEERRRSTVFLSVGAIEGSAPGADLPSLQPSRSIDERLLGTGPTAGRDLLLPSPVSALKPLVSGPSLGPSGSTFIHPLTGKPLDPSSPLALALAARERALASQAPSRSPTPVHSPDADRPGPLFVDVQARDPERGSLASPAFSPRSPAWIPVPARREAEKVPREERKSPEDKKSMILSVLDTSLQRPAGLIVVHATSNGQEPSRLGGAEEERPGTPELAPAPMQSAAVAEPLPSPRAQPPGGTPADAGPGQGSSEEEPELVFAVNLPPAQLSSSDEETREELARIGLVPPPEEFANGVLLATPLAGPGPSPTTVPSPASGKPSSEPPPAPESAADSGVEEADTRSSSDPHLETTSTISTVSSMSTLSSESGELTDTHTSFADGHTFLLEKPPVPPKPKLKSPLGKGPVTFRDPLLKQSSDSELMAQQHHAASAGLASAAGPARPRYLFQRRSKLWGDPVESRGLPGPEDDKPTVISELSSRLQQLNKDTRSLGEEPVGGLGSLLDPAKKSPIAAARLFSSLGELSSISAQRSPGGPGGGASYSVRPSGRYPVARRAPSPVKPASLERVEGLGAGAGGAGRPFGLTPPTILKSSSLSIPHEPKEVRFVVRSVSARSRSPSPSPLPSPASGPGPGAPGPRRPFQQKPLQLWSKFDVGDWLESIHLGEHRDRFEDHEIEGAHLPALTKDDFVELGVTRVGHRMNIERALRQLDGS

SEQ ID NO: 753689 - protein, 611 aa, Homo sapiens; identical to SEQ ID NO: 753687

SEQ ID NO: 753690 - protein, 202 aa, Homo sapiens
MCTGGCARCLGGTLIPLAFFGFLANILLFFPGGKVIDDNDHLSQEIWFFGGILGSGVLMIFPALVFLGLKNNDCCGCCGNEGCGKRFAMFTSTIFAVVGFLGAGYSFIISAISINKGPKCLMANSTWGYPFHDGDYLNDEALWNKCREPLNVVPWNLTLFSILLVVGGIQMVLCAIQVVNGLLGTLCGDCQCCGCCGGDGPV

SEQ ID NO: 753691 - protein, 202 aa, Homo sapiens; identical to SEQ ID NO: 753690

SEQ ID NO: 753692 - protein, 72 aa, Homo sapiens
AWRGHTLMFEALWNKCREPLNVVPWNLTLFSILLVVGGIQMVLCAIQVVNGLLGTLCGDCQCCGCCGGDGPV

SEQ ID NO: 753693 - protein, 73 aa, Homo sapiens
  misc_feature (1)..(1): Xaa can be any naturally occurring amino acid
  misc_feature (8)..(9): Xaa can be any naturally occurring amino acid
XCPGLHPXXIRALWNKCREPLNVVPWNLTLFSILLVVGGIQMVLCAIQVVNGLLGTLCGDCQCCGCCGGDGPV

SEQ ID NO: 753694 - protein, 69 aa, Homo sapiens
RVIAHAVALWNKCREPLNVVPWNLTLFSILLVVGGIQMVLCAIQVVNGLLGTLCGDCQCCGCCGGDGPV

SEQ ID NO: 753695 - protein, 88 aa, Homo sapiens
AWRGHTLMFEALWNKCREPLNVVPWNLTLFSILLVVGGIQMVLCAIQVVNGLLGTLCGDCQCCGCCGFIKLLLFLELLIPICFLADKA

SEQ ID NO: 753696 - protein, 202 aa, Homo sapiens; identical to SEQ ID NO: 753690

SEQ ID NO: 753697 - protein, 202 aa, Homo sapiens; identical to SEQ ID NO: 753690

SEQ ID NO: 753698 - protein, 74 aa, Homo sapiens
VLLLGNPLPESEALWNKCREPLNVVPWNLTLFSILLVVGGIQMVLCAIQVVNGLLGTLCGDCQCCGCCGGDGPV

SEQ ID NO: 753699 - protein, 202 aa, Homo sapiens; identical to SEQ ID NO: 753690

SEQ ID NO: 753700 - protein, 202 aa, Homo sapiens; identical to SEQ ID NO: 753690

SEQ ID NO: 753701 - protein, 102 aa, Homo sapiens
TDSKKIWLFPKFPDDNNIQVALGSNWSRKGMWRGEEMKPEVWLFLRSTKEHSQSFRYIEMRWESEEDLRCKMCTTRKLFNTSSLSREFKSSLLVSESTCLIL

SEQ ID NO: 753702 - protein, 153 aa, Homo sapiens
MGLLTFRDVAIEFSLEEWQCLDTAQRNLYKNVILENYRNLVFLGIAVSKQDLITCLEQEKEPLTVKRHEMVNEPPVMCSHFAQEFWPEQNIKDSFEKVTLRRYEKCGNDNFQLKGCKSVDECKVHKGGYNGLNQCLPTMQSKMFQCDKYVKVS

SEQ ID NO: 753703 - protein, 108 aa, Homo sapiens
MGLLTFRDVAIEFSLEEWQCLDTAQRNLYKNVILENYRNLVFLGIAVSKQDLITCLEQEKEPLTVKRHEMVNEPPESRPVVQPEVQWYNLCLLQPPPPRFKDSPVSPS

SEQ ID NO: 753704 - protein, 102 aa, Homo sapiens
MGLLTFRDVAIEFSLEEWQCLDTAQRNLYKNVILENYRNLVFLGIAVSKQDLITCLEQEKEPLTVKRHEMVNEPPDLWEQTQQVVPHVRSNEMHHDGTLKNE

SEQ ID NO: 753705 - protein, 34 aa, Homo sapiens
QWTLLEFPASRMEFWAFLKASCCITTSSQNCPDQ

SEQ ID NO: 753706 - protein, 83 aa, Homo sapiens
HGAKSSGSLAGKTKVHAAQQMIVEHLSEPKSLGECGDFLEGGCRLPESPPNGRAEKGEGGGGCSQEGAREEQGLGASRNMPAV

SEQ ID NO: 753707 - protein, 178 aa, Homo sapiens
MHSLKKLTFEDVAIDFTQEEWAMMDTSKRKLYRDVMLENISHLVSLGYQISKAYIILQLEQGKELWREGRVFLQDQNPNRESALKKTHMISMHPITRKDASTSMTMENSLILEDPFECNDSGEDCTRSSTITQCLLTHSGKKPYVSKQCGKSLRNLLSTEPHKQIHTKGNPTSNWMSG

SEQ ID NO: 753708 - protein, 178 aa, Homo sapiens; identical to SEQ ID NO: 753707

SEQ ID NO: 753709 - protein, 330 aa, Homo sapiens
MHSLKKLTFEDVAIDFTQEEWAMMDTSKRKLYRDVMLENISHLVSLGYQISKAYIILQLEQGKELWREGRVFLQDQNPNRESALKKTHMISMHPITRKDASTSMTMENSLILEDPFECNDSGEDCTRSSTITQCLLTHSGKKPYVSKQCGKSLRNLLSTEPHKQIHTKGNPLPTGCLDELLKAAECPAAGHFQSSGRPSRRDDGGRVLTYYVKLLFGVGHECMCPCATTGILTTTQMNPLKCWQVEQSPRTVCNLYRYRNTPSSRIFTPGFRPTPATTPGTNLIFYYFADISSANTRQIETMTFHRTQITSYCRKEDPVRKLVHKWNVNP

SEQ ID NO: 753710 - protein, 178 aa, Homo sapiens; identical to SEQ ID NO: 753707

SEQ ID NO: 753711 - protein, 178 aa, Homo sapiens; identical to SEQ ID NO: 753707

SEQ ID NO: 753712 - protein, 156 aa, Homo sapiens [sequence omitted]

SEQ ID NO: 753713 - protein, 140 aa, Homo sapiens
  misc_feature (126)..(126): Xaa can be any naturally occurring amino acid
MAVTITLKTLQQQVIQRAEEDAASTLVTGSEYETMLTEIMSMGYERERVVAALRASYNNPHRAVEYLLTGIPGSPEPEHGSVQESQVSEQPATEAAGENPLEFLPALLQQPWAQENPQLLQQISRXQEQFIQMLNEPPGK

SEQ ID NO: 753714 - protein, 201 aa, Homo sapiens
GTPILTTRLGLCCGGAEAPPADLLLTWAGASSQPICTAGLRSPPQGPLALICHCRRDACPCSPHLRHVPSPTCRQRGQEPIRGIRPTTSPESVSGSVPSSGSSGREEDAASTLVTGSEYETMLTEIMSMGYERERVVAALRASYNNPHRAVEYLLTGIPGSPEPEHGSVQESQVSEQPATEAGENPWSSCGTSPSSRTCGR

SEQ ID NO: 753715 - protein, 115 aa, Homo sapiens
MQAQAPVVVVTQPGVGPGPAPQNSNWQTGMCDCFSDCGVCLCGTFCFPCLGCQVAADMNECCLCGTSVAMRTLYRTRYGIPGSICDDYMATLCCPHCTLCQIKRDINRRRAMRTF

SEQ ID NO: 753716 - protein, 115 aa, Homo sapiens; identical to SEQ ID NO: 753715

SEQ ID NO: 753717 - protein, 182 aa, Homo sapiens
MYYEAKRRDTNCKRNEINQTTEQPDRHIKNKTHEMKQNNPYARTTKREANKHTPQPRERDTLQRTTHTEKEKPTKRKQTQHRRDNEEEQKATRHKRRRQEKKKRNERTTRAKQRKYYTQGRTKKTSRASVQPKTNQKQTKLQPTHDTTSAPPTPQPSNPTAPAHSPTTLTQPHHTQRHTADP

SEQ ID NO: 753718 - protein, 115 aa, Homo sapiens; identical to SEQ ID NO: 753715

SEQ ID NO: 753719 - protein, 115 aa, Homo sapiens; identical to SEQ ID NO: 753715

SEQ ID NO: 753720 - protein, 115 aa, Homo sapiens; identical to SEQ ID NO: 753715

SEQ ID NO: 753721 - protein, 231 aa, Homo sapiens
QLPAAGAAERKARPLRVRFGPAPPAPPAPATGTWYGRAVGVLCGSCQGRAFQIFPLKEWRRPGQFALEMEGPSLRGPALRLAGLPTQQDCNIQEKIDLEIRMREGIWKLLSLSTQKDQVLHAVKNLMVCNARLMAYTSELQKLEEQIANQTGRCDVKFESKERTACKGKIAISDIRIPLMWKDSDHFSNKERSRRYAIFCLFKMGANVFDTDVVNVDKTITDICFENVTIL

SEQ ID NO: 753722 - protein, 157 aa, Homo sapiens
QLPAAGAAERKARPLRVRFGPAPPAPPAPATGTWYGRAVGVLCGSCQGRAFQIFPLKEWRRPGQFALEMEGPSLRGPALRLAGLPTQQDCNIQEKIDLEIRMREGIWKLLSLSTQKDQVLHAVKNLMVCNARLMAYTSELQKLEEQIANQTGRWLVT

SEQ ID NO: 753723 - protein, 189 aa, Homo sapiens
SPHAPRLPERKYLLSLSTQKDQVLHAVKNLMVCNARLMAYTSELQKLEEQIANQTGRCDVKFESKERTACKGKIAISDIRIPLMWKDSDHFSNKERSRRYAIFCLFKMGANVFDTDVVNVDKTITDICFENVTIFNEAGPDFQIKVEVYSCCTEESSITNTPKKLAKKLKTSISKATGKKHKFSASRRG

SEQ ID NO: 753724 - protein, 90 aa, Homo sapiens
RKMTLGLSSHFPCCHLPVLWKPSLDVHCLAGTFLFSSPVTTQVFDSLPPARGPASSLPEDQASEELHMGGNTNRLTSSETTSNPAHHHAS

SEQ ID NO: 753725 - protein, 105 aa, Homo sapiens
LSLKEQKPKKSEKLTTKRRSVFSSPPWISWVGARSSQGPCKRKARGQSRAEEAKVRGEERLLTLKMEERPEPRGAADPRNGKRDTDPPLAPPGGVEPSQHLDRSF

SEQ ID NO: 753726 - protein, 261 aa, Homo sapiens
PTTTPDPTTTPHPTTPDPSSTPVITTVSLPTSLGTELSSPTLAPTVKPSLHPQLTFTAPAPHTSTSQIPTLEPSPALESSPSRSSTATSMDPLSTEDFKPPRSQSPNLTPPPTHTPHSASDLTVSPDPLLSPTAHPLDHPPLDPLTLGPTPGQSPGPHGPCVAPTPPVRVMACEPPALVELVAAVRDVGGQLQRLTQVVEQERQERQALLLGLTQLVEAARGLGQLGEAVKRLAEMAWTTSMPAPTTTTPEEEERPLRGDV

SEQ ID NO: 753727 - protein, 536 aa, Homo sapiens
MGPLQFRDVAIEFSLEEWHCLDTAQRNLYRNVMLENYSNLVFLGIVVSKPDLIAHLEQGKKPLTMKRHEMVANPSVICSHFAQDLWPEQNIKDSFQKVILRRYEKRGHGNLQLIKRCESVDECKVHTGGYNGLNQCSTTTQSKVFQCDKYGKVFHKFSNSNRHNIRHTEKKPFKCIECGKAFNQFSTLITHKKIHTGEKPYICEECGKAFKYSSALNTHKRIHTGEKPYKCDKCDKAFIASSTLSKHEIIHTGKKPYKCEECGKAFNQSSTLTKHKKIHTGEKPYKCEECGKAFNQSSTLTKHKKIHTGEKPYVCEECGKAFKYSRILTTHKRIHTEEKPYKCNKCGKAFIASSTLSRHEFIHMGKKHYKCEECGKAFIWSSVLTRHKRVHTGEKPYKCEECGKAFKYSSTLSSHKRSHTGEKPYKCEECGKAFVASSTLSKHEIIHTGKKPYKCEECGKAFNQSSSLTKHKKIHTGEKPYKCEECGKAFNQSSSLTKHKKIHSGEKPYECDKCGKAFISPSSLSRHEIIHTGEKP

SEQ ID NO: 753728 - protein, 123 aa, Homo sapiens
MGPLQFRDVAIEFSLEEWHCLDTAQRNLYRNVMLENYSNLVFLGIVVSKPDLIAHLEQGKKPLTMKRHEMVANPSGARLLSQHFGRPRWVDPEVRRSRPSGQHGEIPSLLKYKKLARHGGPCL

SEQ ID NO: 753729 - protein, 106 aa, Homo sapiens
MMTLVPRARTRAGQDHYSHPCPRFSQVLLTEGIMTYCLTKNLSDVNILHRLLKNGNVRNTLLQSKVGLLTYYVKLYPGEVTLLTRPSIQMRLCCITGSVSKPRSQK

SEQ ID NO: 753730 - protein, 321 aa, Homo sapiens
MFELLFTSSRFMQKFASSRNIIDVVSTPWTAELGGDQLRTMTYTIVLNSPLTGKCTAATEKQTLYKESREARFYLVDSEVLTHDVPYHDYFYTVNRYCIIRSSKQKCRLRVSTDLKYRKQPWGLVKSLIEKNSWSSLEDYFKQLESDLLIEESVLNQAIEDPGKLTGLRRRRRTFNRTAETVPKLSSQHSSGDVGLGAKGDITGKKKEMENYNVTLIVVMSIFVLLLVLLNVTLFLKLSKIEHAAQSFYRLRLQEEKSLNLASDMVSRAETIQKNKDQAHRLKGVLRDSIVMLEQLKSSLIMLQKTFDLLNKNKTGMAVES

SEQ ID NO: 753731 - protein, 359 aa, Homo sapiens
GRVGKSSTSDSVDEENVPEKDLHGRLFINRIFHISADRMFELLFTSSRFMQKFASSRNIIDVVSTPWTAELGGDQLRTMTYTIVLNSPLTGKCTAATEKQTLYKESREARFYLVDSEVLTHDVPYHDYFYTVNRYCIIRSSKQKCRLRVSTDLKYRKQPWGLVKSLIEKNSWSSLEDYFKQLESDLLIEESVLNQAIEDPGKLTGLRRRRRTFNRTAETVPKLSSQHSSGDVGLGAKGDITGKKKEMENYNVTLIVVMSIFVLLLVLLNVTLFLKLSKIEHAAQSFYRLRLQEEKSLNLASDMVSRAETIQKNKDQAHRLKGVLRDSIVMLEQLKSSLIMLQKTFDLLNKNKTGMAVES

SEQ ID NO: 753732 - protein, 321 aa, Homo sapiens; identical to SEQ ID NO: 753730

SEQ ID NO: 753733 - protein, 37 aa, Homo sapiens
MIAGTGMLSRVALRTGALSHQILDRASSDRGAGYDYM

SEQ ID NO: 753734 - protein, 102 aa, Homo sapiens
MTGGCLSKRLPGVITEVVTEPPRPEPVTPEGWCTFTMPSVEGPHLPCLRVSFCSVRFSIEAIGGRRLLCLICPKSLLAISPMQQALVPTTISPGKRFEGLEL

SEQ ID NO: 753735 - protein, 94 aa, Homo sapiens
VSAGTTPAQGALCPADPLPEAGELGEAALCHPPRALTGRPSSLSGTVSAAVRFGAGRLWLALAHRGWSCRFCCGHAGFPRQTRRWDRDPFLEAE

SEQ ID NO: 753736 - protein, 146 aa, Homo sapiens
SCRVRTLAFLFRLWTKCLFIMPEPAKSAPAPKKGSKKAVTKAQKKDGKKRKRSRKESYSVYVYKVLKQVHPDTGISSKAMGIMNSFVNDIFERIAGEASRLAHYNKRSTITSREIQTAVRLLLPGELAKHAVSEGTKAVTKYTSSK

SEQ ID NO: 753737 - protein, 155 aa, Homo sapiens
ICFFSVQSLLSVDDDTDNPDDSVFYQVQSLFGHLMESKLQYYVPENFWKIFKMWNKELYVREQQDAYEFFTSLIDQMDEYLKKMGRDQIFKNTFQGIYSDQKICKDCPHRYEREEAFMALNLGVTSCQSLEISLDQFVRGEVLEGSNAYYCEKCK

SEQ ID NO: 753738 - protein, 79 aa, Homo sapiens
SSPVSSDSNTVTHSVIPASVCGVVLLVSFLPGLPSLTSEKCKNPMGVTPSVPLQLAPSPAPPTLLTFSHLDNLSCILNG

SEQ ID NO: 753739 - protein, 38 aa, Homo sapiens
LPGSSLLAHNWVGPVTNDKHELDPGDIQSPHNKAPVGA

SEQ ID NO: 753740 - protein, 109 aa, Homo sapiens
MAKLVLRPRQSGPNAHAGNCWGSQSSVPLSPQNWNLTNSLPLGRASPAPTGLPHLHLDWHIWTGPSHSPQNSPDKCTGACEYIYACARICVRLCARVGGCLLSRSNRQP

SEQ ID NO: 753741 - protein, 109 aa, Homo sapiens; identical to SEQ ID NO: 753740

SEQ ID NO: 753742 - protein, 162 aa, Homo sapiens
GRRRSGTPGQATAVHSSALRLWEIRAQCRSFRAWVALGPPAAFPGGVPTLLRSWFRDACRGGHSPQPATVLRPSLLGVSFWGFLGAARVDSSRLPNSAPLATGSLQPCTLGALIVDYSWSPGATGPCLAWQESADWTQGSEPREPSSRSGRTHRGSQQLRTV

SEQ ID NO: 753743 - protein, 116 aa, Homo sapiens
MGAVDKLAPVPQIDPTIQSFERLRCILVLKIKILKQHPHRVREKNKRLEKKAPHLLKAGPGAPPSPAMLRLAKGPGQLQVPGPLVGRGQAQPFCFNSRQQQGTHTPTPSWRRAPSG

SEQ ID NO: 753744 - protein, 198 aa, Homo sapiens
THITIRKQKERGANLHRLSYLPPLHAMVMDEKVKRSFVLDTASAICNYNAHYKNHPKYWCRGYFRDYCNIIAFSPNSTNHVALRDTGNQLIVTMSCLTKEDTGWYWCGIQRDFARDDMDFTELIVTDDKGTLANDFWSGKDLSGNKTRSCKAPKVVRKADRSRTSILIICILITGLGIISVISHLTKRRRSQRNRRGK

SEQ ID NO: 753745 - protein, 205 aa, Homo sapiens
MSRKNIFQESSPLQNFFSLLNIRNIGVSHRARQPQALQGPPSSNDAMVMDEKVKRSFVLDTASAICNYNAHYKNHPKYWCRGYFRDYCNIIAFSPNSTNHVALRDTGNQLIVTMSCLTKEDTGWYWCGIQRDFARDDMDFTELIVTDDKGTLANDFWSGKGLSSHKPEAAGFHRLGIILYQPLPKGENQRIESMRPFEALLRVRI

SEQ ID NO: 753746 - protein, 193 aa, Homo sapiens [sequence omitted]

SEQ ID NO: 753747 - protein, 183 aa, Homo sapiens
SGVGPMEGSPAGPIEQKEARWESSWEEQPDWTLGCLSPESHTNHVALRDTGNQLIVTMSCLTKEDTGWYWCGIQRDFARDDMDFTELIVTDDKGTLANDFWSGKDLSGNKTRSCKAPKVVRKADRSRTSILIICILITGLGIISVISHLTKRRRSQRNRRVGNTLKPFSRVLTPKEMAPTEQM

SEQ ID NO: 753748 - protein, 239 aa, Homo sapiens
MSRKNIFQESSPLQNFFSLLNIRNIGVSHRARQPQALQGPPSSNDAMVMDEKVKRSFVLDTASAICNYNAHYKNHPKYWCRGYFRDYCNIIAFSPNSTNHVALRDTGNQLIVTMSCLTKEDTGWYWCGIQRDFARDDMDFTELIVTDDKGTLANDFWSGKDLSGNKTRSCKAPKVVRKADRSRTSILIICILITGLGIISVISHLTKRRRSQRNRRVGNTLKPFSRVLTPKEMAPTEQM

SEQ ID NO: 753749 - protein, 218 aa, Homo sapiens
MSRKNIFQESSPLQNFFSLLNIRNIGVSHRARQPQALQGPPSSNDAMVMDEKVKRSFVLDTASAICNYNAHYKNHPKYWCRGYFRDYCNIIAFSPNSTNHVALRDTGNQLIVTMSCLTKEDTGWYWCGIQRDFARDDMDFTELIVTDDKGTLANDFWSGKDLSGNKTRSCKAPKVVRKADRSRTSILIICILITGLGIISVISHLTKRRRSQRNRRGK

SEQ ID NO: 753750 - protein, 239 aa, Homo sapiens; identical to SEQ ID NO: 753748

SEQ ID NO: 753751 - protein, 271 aa, Homo sapiens
SGVGPMEGSPAGPIEQKEARWESSWEEQPDWTLGCLSPESQFRIPGLPGCILSFQLKVCFLPVMWLFILLSLALISDAMVMDEKVKRSFVLDTASAICNYNAHYKNHPKYWCRGYFRDYCNIIAFSPNSTNHVALRDTGNQLIVTMSCLTKEDTGWYWCGIQRDFARDDMDFTELIVTDDKGTLANDFWSGKDLSGNKTRSCKAPKVVRKADRSRTSILIICILITGLGIISVISHLTKRRRSQRNRRVGNTLKPFSRVLTPKEMAPTEQM

SEQ ID NO: 753752 - protein, 219 aa, Homo sapiens
THITIRKQKERGANLHRLSYLPPLHAMVMDEKVKRSFVLDTASAICNYNAHYKNHPKYWCRGYFRDYCNIIAFSPNSTNHVALRDTGNQLIVTMSCLTKEDTGWYWCGIQRDFARDDMDFTELIVTDDKGTLANDFWSGKDLSGNKTRSCKAPKVVRKADRSRTSILIICILITGLGIISVISHLTKRRRSQRNRRVGNTLKPFSRVLTPKEMAPTEQM

SEQ ID NO: 753753 - protein, 239 aa, Homo sapiens; identical to SEQ ID NO: 753748

SEQ ID NO: 753754 - protein, 81 aa, Homo sapiens
MSCLTKEDTGWYWCGIQRDFARDDMDFTELIVTDDKGTLANDFWSGKDLSGNKTRAARLQVSQLTSGRPSHHSILITVPHS

SEQ ID NO: 753755 - protein, 257 aa, Homo sapiens
MAQRMTTQLLLLLVWVAVVGEAQTRIAWARTELLNVCMNAKHHKEKPGPEDKLHEQCRPWRKNACCSTNTSQEAHKDVSYLYRFNWNHCGEMAPACKRHFIQDTCLYECSPNLGPWIQQVDQSWRKERVLNVPLCKEDCEQWWEDCRTSYTCKSNWHKGWNWTSGFNKCAVGAACQPFHFYFPTPTVLCNEIWTHSYKVSNYSRGSGRCIQMWFDPAQGNPNEEVARFYAAAMSGAGPWAAWPFLLSLALMLLWLLS

SEQ ID NO: 753756 - protein, 257 aa, Homo sapiens; identical to SEQ ID NO: 753755

SEQ ID NO: 753757 - protein, 257 aa, Homo sapiens; identical to SEQ ID NO: 753755

SEQ ID NO: 753758 - protein, 212 aa, Homo sapiens
MSELRSSRTEQCRPWRKNACCSTNTSQEAHKDVSYLYRFNWNHCGEMAPACKRHFIQDTCLYECSPNLGPWIQQVDQSWRKERVLNVPLCKEDCEQWWEDCRTSYTCKSNWHKGWNWTSGFNKCAVGAACQPFHFYFPTPTVLCNEIWTHSYKVSNYSRGSGRCIQMWFDPAQGNPNEEVARFYAAAMSGAGPWAAWPFLLSLALMLLWLLS

SEQ ID NO: 753759 - protein, 257 aa, Homo sapiens; identical to SEQ ID NO: 753755

SEQ ID NO: 753760 - protein, 257 aa, Homo sapiens; identical to SEQ ID NO: 753755

SEQ ID NO: 753761 - protein, 99 aa, Homo sapiens
SLLMTLTYKENIMKSSRIHHDQPVKPLDRAVFWIEFVMRHKGAKHLRVAAHDLTWFQYHSLDVIGFLLACVATVLFIITKCCLFCFWKFARKGKKGKRD

SEQ ID NO: 753762 - protein, 134 aa, Homo sapiens
KDTHIHIPYESCGHHDTSILNIYTLVFLSFFETESHSVTHAGVQWYDLGSLKPPPPGFKRFSCLSLLSSWNECLLLRTFSYIAPVPSPHLRKLKIILYYPISRPYSNFPSCPKIVVDSVFQTGIHSRSSCCPVC

SEQ ID NO: 753763 - protein, 83 aa, Homo sapiens
  misc_feature (18)..(18): Xaa can be any naturally occurring amino acid
YFFQISHCTLPDYSPGGXDSCSKTQDVSEEPAGTKAGRHQLYSCSSYASSLCCSYQKHKALAQTEKCDLTPRLDNFQTVSMTL

SEQ ID NO: 753764 - protein, 74 aa, Homo sapiens
MPLKTFPAAIRGVIQSELNYSVILQWVVTMDPEPVLSWTFSGVPCGMGEKLFIRRLSCEQLGTYMCIATNSKKQ

SEQ ID NO: 753765 - protein, 74 aa, Homo sapiens; identical to SEQ ID NO: 753764

SEQ ID NO: 753766 - protein, 668 aa, Homo sapiens
MDTRSGSQCSVTPEAILNNEKLVLPPRISRVNGWSLPLHYFQVVTWAVFVGLSSATFGIFIPFLPHAWKYIAYVVTGGIFSFHLVVHLIASCIDPADSNVRLMKNYSQPMPLFDRSKHAHVIQNQFCHLCKVTVNKKTKHCISCNKCVSGFDHHCKWINNCVGSRNYWFFFSTVASATAGMLCLIAILLYVLVQYLVNPGVLRTDPRYEDVKNMNTWLLFLPLFPVQVQTLIVVIIGMLVLLLDFLGLVHLGQLLIFHIYLKAKKMTTFEYLINNRKEESSKHQAVRKDPYVQMDKGVLQQGAGALGSSAQGVKAKSSLLIHKHLCHFCTSVNQDGDSTAREGDEDPCPSALGAKARNSRLICRRLCQFSTRVHPDGGSMAQEADDAPSISTLGLQQETTEPMKTDSAESEDWRFRSSGAPVIQVFYPETPPSIKVLPVESTLQSLLLLPMLQARNQSPSSQRPLDVLRRNQDPQSPASISVIIFITPKEEPALQEGLHLQEDGLPATAEDAATCLTVLSSQPASCRASCCLRADGPGMLAHTCEHSTGKWEHSTRKWEHSTGKWEHSTGKWGLTALQNGSTVLGNGSTVLGSGSTVLRSGSTVLRNGSTLLRNGSTVLGNGHTVLGNGHTVLRNGSTQYWEMGAHSTGKWEFTVLGKGSSQYSEMGA

SEQ ID NO: 753767 - protein, 360 aa, Homo sapiens
MDTRSGSQCSVTPEAILNNEKLVLPPRISRVNGWSLPLHYFQVVTWAVFVGLSSATFGIFIPFLPHAWKYIAYVVTGGIFSFHLVVHLIASCIDPADSNVRLMKNYSQPMPLFDRSKHAHVIQNQFCHLCKVTVNKKTKHCISCNKCVSGFDHHCKWINNCVGSRNYWFFFSTVASATAGMLCLIAILLYVLVQYLVNPGVLRTDPRYEDVKNMNTWLLFLPLFPVQVQTLIVVIIGMLVLLLDFLGLVHLGQLLIFHIYLKAKKMTTFEYLINNRKEESSKHQAVRKDPYVQMDKGVLQQGAGALGSSAQGVKAKSSLLIHKHLCHFCTSVNQDGDSTARGHLTTLPQDFREQAPVTWK

SEQ ID NO: 753768 - protein, 220 aa, Homo sapiens
MLQARNQSPSSQRPLDVLRRNQDPQSPASISVIIFITPKEEPALQEGLHLQEDGLPATAEDAATCLTVLSSQPASCRASCCLRADGPGMLAHTCEHSTGKWEHSTRKWEHSTGKWEHSTGKWGLTALQNGSTVLGNGSTVLGSGSTVLRSGSTVLRNGSTLLRNGSTVLGNGHTVLRNGSTQYWEMGAHSTGKWEFTVLGNGSTVLGNGSIVLGNPRPGF

SEQ ID NO: 753769 - protein, 360 aa, Homo sapiens; identical to SEQ ID NO: 753767

SEQ ID NO: 753770 - protein, 102 aa, Homo sapiens
MPVAFFSPSSKSPSPAASMLSGLSLWGMPGESERAEVAKMACAAFSPGTCCFHRAVPVSPCEFIDCGLSEFLGLLFQMILQGFKTSKALSKAAPSSHGLNSS

SEQ ID NO: 753771 - protein, 360 aa, Homo sapiens; identical to SEQ ID NO: 753767

SEQ ID NO: 753772 - protein, 76 aa, Homo sapiens
AAPVSRNSHKTSALTVLVFRERSMESLAPPWKLVAEIGAEPILLTFVKTALLDKRVYQVLLCFPGLLCCLQDRPGG

SEQ ID NO: 753773 - protein, 444 aa, Homo sapiens
PEARRNYNMYHPRELYPSLGAGYRLGPAQPGADSSFPPALAEGYRYPELDTPKLDCFLSGMEAAPRTLAAHPPLPLLPPAMGTEPAPSAPEALHSLPGVSLSLENRELWKEFSSVGTEMIITKAGRRMFPACRVSVTGLDPEARYLFLLDVIPVDGARYRWQGRRWEPSGKAEPRLPDRVYIHPDSPATGAHWMRQPVSFHRVKLTNSTLDPHGHLILHSMHKYQPRIHLVRAAQLCSQHWGGMASFRFPETTFISVTAYQNPQITQLKIAANPFAKGFRENGRNCKRERDARVKRKLRGPEPAATEAYGSGDTPGGPCDSTLGGDIRESDPEQAPAPGEATAAPAPLCGGPSAEAYLLHPAAFHGAPSHLPTRSPSFPEAPDSGRSAPYSAAFLDVPHGSGGSGYPAAPPAVPFAPHFLQGGPFPLPYTAPGGYLDVGSKPMY

SEQ ID NO: 753774 - protein, 229 aa, Homo sapiens
TQLHSPILKSQRPQARGEPPPPERGDQSLEAKLRDSSDSELLRDILQKTVRHPVCVKHPPSVKYAWCFLSELIKKSSGGSVTLSKSTAIISHGTTGLVTWDAALYLAEWAIENPAAFINRTVLELGSGAGLTGLAICKMCRPRAYIFSDPHSRILEQLRGNVLLNGLSLEADITGNLDSPRVTVAQLGLGREAMVHQLSAFQPDVVIAADVLYCPEAIVSLVGVCRGWC

SEQ ID NO: 753775 - protein, 101 aa, Homo sapiens
  misc_feature (94)..(94): Xaa can be any naturally occurring amino acid
  misc_feature (100)..(100): Xaa can be any naturally occurring amino acid
PEENAGTELLLQGFERRFLAVRTLRSFPWQSLEAKLRDSSDSELLRDILQKVFACLMTDGSTQTCQPLPRPHPEVAQLCMRTISNIPVIVPPTXQQQEPXA

SEQ ID NO: 753776 - protein, 510 aa, Homo sapiens
MRVLTQLVATYPQGFKVWMGPISPLLSLCHPDIIRSVINASAAIAPKDKFFYSFLEPWLGDGLLLSAGDKWSRHRRMLTPAFHFNILKPYMKIFNESVNIMHAKWQLLASEGSACLDMFEHISLMTLDSLQKCVFSFDSHCQEKPSEYIAAILELSALVSKRHHEILLHIDFLYYLTPDGQRFRRACRLVHDFTDAVIQERRRTLPSQGVDDFLQAKAKSKTLDFIDVLLLSKDEDGKKLSDEDIRAEADTFMFEGEGPSVGLERGPGSLPSRNRVGRPPQPSHPPSPILPEALNAMGAVYLRVLKQPRDPSLPCCPPGHDTTASGLSWVLYHLAKHPEYQERCRQEVQELLKDREPKEIEWDDLAHLPFLTMCMKESLRLHPPVPVISRHVTQDIVLPDGRVIPKGIICLISVFGTHHNPAVWPDPEVYDPFRFDPENIKERSPLAFIPFSAGPRNCIGQTFAMAEMKVVLALTLLRFRVLPDHTEPRRKPELVLRAEGGLWLRVEPLS

SEQ ID NO: 753777 - protein, 401 aa, Homo sapiens
MRVLTQLVATYPQGFKVWMGPISPLLSLCHPDIIRSVINASAAIAPKDKFFYSFLEPWLGDGLLLSAGDKWSRHRRMLTPAFHFNILKPYMKIFNESVNIMHAKWQLLASEGSACLDMFEHISLMTLDSLQKCVFSFDSHCQEKPSEYIAAILELSALVSKRHHEILLHIDFLYYLTPDGQRFRRACRLVHDFTDAVIQERRRTLPSQGVDDFLQAKAKSKTLDFIDVLLLSKDEDGKKLSDEDIRAEADTFMFEGEGPSVGLERGPGSLPSRNRVGRPPQPSHPPSPILPEALNAMGAVYLRVLKQPRDPSLPCCPPGHDTTASGLSWVLYHLAKHPEYQERCRQEVQELLKDREPKEIEWSTTPFALTQRTSRRGHLWLLFPSRQGPGTASGRRSRWRR

SEQ ID NO: 753778 - protein, 491 aa, Homo sapiens
MRVLTQLVATYPQGFKVWMGPISPLLSLCHPDIIRSVINASAAIAPKDKFFYSFLEPWLGDGLLLSAGDKWSRHRRMLTPAFHFNILKPYMKIFNESVNIMHAKWQLLASEGSACLDMFEHISLMTLDSLQKCVFSFDSHCQEKPSEYIAAILELSALVSKRHHEILLHIDFLYYLTPDGQRFRRACRLVHDFTDAVIQERRRTLPSQGVDDFLQAKAKSKTLDFIDVLLLSKDEDGKKLSDEDIRAEADTFMFEGEGPSVGLERGPGSLPSRNRVGRPPQPSHPPSPILPEALNAMGAVYLRVLKQPRDPSLPCCPPGHDTTASGLSWVLYHLAKHPEYQERCRQEVQELLKDREPKEIEWDDLAHLPFLTMCMKESLRLHPPVPVISRHVTQDIVLPDGRVIPKGIICLISVFGTHHNPAVWPDPESEFPPPSPRNCIGQTFAMAEMKVVLALTLLRFRVLPDHTEPRRKPELVLRAEGGLWLRVEPLS

SEQ ID NO: 753779 - protein, 538 aa, Homo sapiens
HQQTERGGCLGQTAPDRRMSQLSLSWLGLWPVAASPWLLLLLVGASWLLAHVLAWTYAFYDNCRRLRCFPQPPRRNWFWGHQGMVNPTEEGMRVLTQLVATYPQGFKVWMGPISPLLSLCHPDIIRSVINASAAIAPKDKFFYSFLEPWLGDGLLLSAGDKWSRHRRMLTPAFHFNILKPYMKIFNESVNIMHAKWQLLASEGSACLDMFEHISLMTLDSLQKCVFSFDSHCQEKPSEYIAAILELSALVSKRHHEILLHIDFLYYLTPDGQRFRRACRLVHDFTDAVIQERRRTLPSQGVDDFLQAKAKSKTLDFIDVLLLSKDEDGKKLSDEDIRAEADTFMFEGHDTTASGLSWVLYHLAKHPEYQERCRQEVQELLKDREPKEIEWDDLAHLPFLTMCMKESLRLHPPVPVISRHVTQDIVLPDGRVIPKGIICLISVFGTHHNPAVWPDPEVYDPFRFDPENIKERSPLAFIPFSAGPRNCIGQTFAMAEMKVVLALTLLRFRVLPDHTEPRRKPELVLRAEGGLWLRVEPLS

SEQ ID NO: 753780 - protein, 343 aa, Homo sapiens
AVRPGILGCACLDMFEHISLMTLDSLQKCVFSFDSHCQEKPSEYIAAILELSALVSKRHHEILLHIDFLYYLTPDGQRFRRACRLVHDFTDAVIQERRRTLPSQGVDDFLQAKAKSKTLDFIDVLLLSKDEDGKKLSDEDIRAEADTFMFEGHDTTASGLSWVLYHLAKHPEYQERCRQEVQELLKDREPKEIEWDDLAHLPFLTMCMKESLRLHPPVPVISRHVTQDIVLPDGRVIPKGIICLISVFGTHHNPAVWPDPEVYDPFRFDPENIKERSPLAFIPFSAGPRNCIGQTFAMAEMKVVLALTLLRFRVLPDHTEPRRKPELVLRAEGGLWLRVEPLS

SEQ ID NO: 753781 - protein, 214 aa, Homo sapiens
MGAVYLRVLKQPRDPSLPCCPPGHDTTASGLSWVLYHLAKHPEYQERCRQEVQELLKDREPKEIEWDDLAHLPFLTMCMKESLRLHPPVPVISRHVTQDIVLPDGRVIPKGIICLISVFGTHHNPAVWPDPEVYDPFRFDPENIKERSPLAFIPFSAGPRNCIGQTFAMAEMKVVLALTLLRFRVLPDHTEPRRKPELVLRAEGGLWLRVEPLS

SEQ ID NO: 753782 - protein, 103 aa, Homo sapiens
VTLSATRSPLPLVQKSELSKPASIWLQPSNPGDQTPWGAINGPATGINSNPRTLSTAPTIRRAVQMAGTKDPPWQLKRAVTVGRGDQNTPSSLRSLPVPSLCS

SEQ ID NO: 753783 - protein, 110 aa, Homo sapiens
MTRHKKQGSNMLVSLPFPKLFEDSLGKTSPSAWHLVHDVGSYILARVISLPTFTCNPCIIFLWLQSFIYETHRNPSNSQRVESNSFLPKPIHGPLALDNISQASPLTHKV

SEQ ID NO: 753784 - protein, 172 aa, Homo sapiens
MFYHISLEHEILLHPRYFGPNLLNTVKQKLFTEVEGTCTGKYGFVIAVTTIDNIGAGVIQPGRGFVLYPVKYKAIVFRPFKGEVVDAVVTQVNKVGLFTEIGPMSCFISRHSIPSEMEFDPNSNPPCYKTMDEDIVIQQDDEIRLKIVGTRVDKNDIFAIGSLMDDYLGLVS

SEQ ID NO: 753785 - protein, 172 aa, Homo sapiens; identical to SEQ ID NO: 753784

SEQ ID NO: 753786 - protein, 87 aa, Homo sapiens
QPLLHQEWTDYRLSWDPAEHDGIDSLRITAESVWLPDVVLLNNNDGNFDVALDISVVVSSDGSVRWQPPGIYRSSCSIQVSGLHIGS

SEQ ID NO: 753787 - protein, 298 aa, Homo sapiens
MTPGALLMLLGALGAPLAPGVRGSEAEGRLREKLFSGYDSSVRPAREVGDRVRVSVGLILAQLISLNEKDEEMSTKVYLDLEWTDYRLSWDPAEHDGIDSLRITAESVWLPDVVLLNNNDGNFDVALDISVVVSSDGSVRWQPPGIYRSSCSIQVTYFPFDWQNCTMVFSSYSYDSSEVSLQTGLGPDGQGHQEIHIHEGTFIENGQWEIIHKPSRLIQPPGDPRGGREGQRQEVIFYLIIRRKPLFYLVNVIAPCILITLLAIFVFYLPPDAERRWGSQIFVQLTQSSTSTIPRDPQ

SEQ ID NO: 753788 - protein, 429 aa, Homo sapiens
MSTKVYLDLEWTDYRLSWDPAEHDGIDSLRITAESVWLPDVVLLNNNDGNFDVALDISVVVSSDGSVRWQPPGIYRSSCSIQVTYFPFDWQNCTMVFSSYSYDSSEVSLQTGLGPDGQGHQEIHIHEGTFIENGQWEIIHKPSRLIQPPGDPRGGREGQRQEVIFYLIIRRKPLFYLVNVIAPCILITLLAIFVFYLPPDAGEKMGLSIFALLTLTVFLLLLADKVPETSLSVPIIIKYLMFTMVLVTFSVILSVVVLNLHHRSPHTHQMPLWVRQIFIHKLPLYLRLKRPKPERDLMPEPPHCSSPGSGWGRGTDEYFIRKPPSDFLFPKPNRFQPELSAPDLRRFIDGPNRAVALLPELREVVSSISYIARQLQEQEDHDALKEDWQFVAMVVDRLFLWTFIIFTSVGTLVIFLDATYHLPPPDPFP

SEQ ID NO: 753789 - protein, 501 aa, Homo sapiens
MTPGALLMLLGALGAPLAPGVRGSEAEGRLREKLFSGYDSSVRPAREVGDRVRVSVGLILAQLISLNEKDEEMSTKVYLDLEWTDYRLSWDPAEHDGIDSLRITAESVWLPDVVLLNNNDGNFDVALDISVVVSSDGSVRWQPPGIYRSSCSIQVTYFPFDWQNCTMVFSSYSYDSSEVSLQTGLGPDGQGHQEIHIHEGTFIENGQWEIIHKPSRLIQPPGDPRGGREGQRQEVIFYLIIRRKPLFYLVNVIAPCILITLLAIFVFYLPPDAGEKMGLSIFALLTLTVFLLLLADKVPETSLSVPIIIKYLMFTMVLVTFSVILSVVVLNLHHRSPHTHQMPLWVRQIFIHKLPLYLRLKRPKPERDLMPEPPHCSSPGSGWGRGTDEYFIRKPPSDFLFPKPNRFQPELSAPDLRRFIDGPNRAVALLPELREVVSSISYIARQLQEQEDHDALKEDWQFVAMVVDRLFLWTFIIFTSVGTLVIFLDATYHLPPPDPFP

SEQ ID NO: 753790 - protein, 77 aa, Homo sapiens
LTGSLAALVTLSSIQVTYFPFDWQNCTMVFSSYSYDSSEVSLQTGLGPDGQGHQEIHIHEGTFIENGQWEIITSLSG

SEQ ID NO: 753791 - protein, 359 aa, Homo sapiens
MSTKVYLDLEWTDYRLSWDPAEHDGIDSLRITAESVWLPDVVLLNNNDGNFDVALDISVVVSSDGSVRWQPPGIYRSSCSIQVTYFPFDWQNCTMVFSSYSYDSSEVSLQTGLGPDGQGHQEIHIHEGTFIGEKMGLSIFALLTLTVFLLLLADKVPETSLSVPIIIKYLMFTMVLVTFSVILSVVVLNLHHRSPHTHQMPLWVRQIFIHKLPLYLRLKRPKPERDLMPEPPHCSSPGSGWGRGTDEYFIRKPPSDFLFPKPNRFQPELSAPDLRRFIDGPNRAVALLPELREVVSSISYIARQLQEQEDHDALKEDWQFVAMVVDRLFLWTFIIFTSVGTLVIFLDATYHLPPPDPFP

SEQ ID NO: 753792 - protein, 106 aa, Homo sapiens
RATGVSQEHLQPCPPCPDCGEHRARSTVHGRGWKFSPAIPTPGTGLPGAHTQPPQTDVDLGSQASFLPDPRAARNKPSRNLPFTGTNKSTKRANPFSFWRPNVSDT

SEQ ID NO: 753793 - protein, 464 aa, Homo sapiens [sequence omitted]

SEQ ID NO: 753794 - protein, 341 aa, Homo sapiens
MGFARFFSEESLQRSDAGNLQEPGFCRNHIVQRLCESKEDGQYGEVVSQIPNLDLNENISTGLKPCECSICGKVFVRHSLLNRHILAHSGYKPYGEKQYKCEQCGKFFVSVPGVRRHMIMHSGNPAYKCTICGKAFYFLNSVERHQRTHTGEKPYKCKQCGKAFTVSGSCLIHERTHTGEKPYECKECGKTFRFSCSFKTHERTHTGERPYKCTKCDKAFSCSTSLRYHGSIHTGERPYECKQCGKAFSRLSSLCNHRSTHTGEKPYECKQCDQAFSRLSSLHLHERIHTGEKPYECKKCGKAYTRSSHLTRHERSHDIEAGCSDSAYNPSTLGGQGVWIA

SEQ ID NO: 753795 - protein, 378 aa, Homo sapiens
MDSVAFEDVAVNFTQEEWALLDSSQKNLYREVMQETCRNLASVGSQWKDQNIEDHFEKPGKDIRNHIVQRLCESKEDGQYGEVVSQIPNLDLNENISTGLKPCECSICGKVFVRHSLLNRHILAHSGYKPYGEKQYKCEQCGKFFVSVPGVRRHMIMHSGNPAYKCTICGKAFYFLNSVERHQRTHTGEKPYKCKQCGKAFTVSGSCLIHERTHTGEKPYECKECGKTFRFSCSFKTHERTHTGERPYKCTKCDKAFSCSTSLRYHGSIHTGERPYECKQCGKAFSRLSSLCNHRSTHTGEKPYECKQCDQAFSRLSSLHLHERIHTGEKPYECKKCGKAYTRSSHLTRHERSHDIEAGCSDSAYNPSTLGGQGVWIA

SEQ ID NO: 753796 - protein, 411 aa, Homo sapiens
AEAEEQVSRGAMAAGGLSRSERKAAERVRRLREEQQRERLRQVSRILRKAAAERSAEEGRLLAESADLVTELQGRSRRREGLKRRQEEVCDDPEELRGKVRELASAVRNAKYLVVYTGAGISTAASIPDYRGPNGVWTLLQKGRSVSAADLSEAEPTLTHMSITRLHEQKLVQHVVSQNCDGLHLRSGLPRTAISELHGNMYIEVCTSCVPNREYVRVFDVTERTALHRHQTGRTCHKCGTQLRDTIVHFGERGTLGQPLNWEAATEAASRADTILCLGSSLKVLKKYPRLWCMTKPPSRRPKLYIVNLQWTPKDDWAALKLHGKCDDVMRLLMAELGLEIPAYSRWQDPIFSLATPLRAGEEGSHSRKSLCRSREEAPPGDRGAPLSSAPILGGWFGRGCTKRTKRKKVT

SEQ ID NO: 753797 - protein, 194 aa, Homo sapiens
AEAEEQVSRGAMAAGGLSRSERKAAERVRRLREEQQRERLRQVSRILRKAAAERSAEEGRLLAESADLVTELQGRSRRREGLKRRQEEVCDDPEELRGKVRELASAVRNAKYLVVYTGAGISTAASIPDYRGPNGVWTLLQKGRSVSAADLSEAEPTLTHMSITRLHEQKLVRALGGWYTCQGPGRAPWCPVGN

SEQ ID NO: 753798 - protein, 113 aa, Homo sapiens
GRAGVSFIVDLQWTPKDDWAALKLHGKCDDVMRLLMAELGLEIPAYSRWQDPIFSLATPLRAGEEGSHSRKSLCRSREEAPPGDRGAPLSSAPILGGWFGRGCTKRTKRKKVT

SEQ ID NO: 753799 - protein, 368 aa, Homo sapiens
AEAEEQVSRGAMAAGGLSRSERKAAERVRRLREEQQRERLRQVSRILRKAAAERSAEEGRLLAESADLVTELQGRSRRREGLKRRQEEVCDDPEELRGKVRELASAVRNAKYLVVYTGAGISTAASIPDYRGPNGVWTLLQKGRSVSAADLSEAEPTLTHMSITRLHEQKLVQHVVSQNCDGLHLRSGLPRTAISELHGNMYIEVCTSCVPNREYVRVFDVTERTALHRHQTGRTCHKCGTQLRDTIVHFGERGTLGQPLNWEAATEAASRADTILCLGSSLKVLKKYPRLWCMTKPPSRRPKLYIVNLQWTPKDDWAALKLHGKCDDVMRLPCVLVKKAATVGSRCAEAERRPRLGTGVHRLARPPS

SEQ ID NO: 753800 - protein, 356 aa, Homo sapiens
RARAGAPGFGSSWGDGRSRVGRPGAVTTLASWQVCDDPEELRGKVRELASAVRNAKYLVVYTGAGISTAASIPDYRGPNGVWTLLQKGRSVSAADLSEAEPTLTHMSITRLHEQKLVQHVVSQNCDGLHLRSGLPRTAISELHGNMYIEVCTSCVPNREYVRVFDVTERTALHRHQTGRTCHKCGTQLRDTIVHFGERGTLGQPLNWEAATEAASRADTILCLGSSLKVLKKYPRLWCMTKPPSRRPKLYIVNLQWTPKDDWAALKLHGKCDDVMRLLMAELGLEIPAYSRWQDPIFSLATPLRAGEEGSHSRKSLCRSREEAPPGDRGAPLSSAPILGGWFGRGCTKRTKRKKVT

SEQ ID NO: 753801 - protein, 290 aa, Homo sapiens
MQAASIPDYRGPNGVWTLLQKGRSVSAADLSEAEPTLTHMSITRLHEQKLVQHVVSQNCDGLHLRSGLPRTAISELHGNMYIEVCTSCVPNREYVRVFDVTERTALHRHQTGRTCHKCGTQLRDTIVHFGERGTLGQPLNWEAATEAASRADTILCLGSSLKVLKKYPRLWCMTKPPSRRPKLYIVNLQWTPKDDWAALKLHGKCDDVMRLLMAELGLEIPAYSRWQDPIFSLATPLRAGEEGSHSRKSLCRSREEAPPGDRGAPLSSAPILGGWFGRGCTKRTKRKKVT

SEQ ID NO: 753802 - protein, 290 aa, Homo sapiens; identical to SEQ ID NO: 753801

SEQ ID NO: 753803 - protein, 411 aa, Homo sapiens; identical to SEQ ID NO: 753796

SEQ ID NO: 753804 - protein, 310 aa, Homo sapiens
MLPVLERQILVSSTHVLLGISTAASIPDYRGPNGVWTLLQKGRSVSAADLSEAEPTLTHMSITRLHEQKLVQHVVSQNCDGLHLRSGLPRTAISELHGNMYIEVCTSCVPNREYVRVFDVTERTALHRHQTGRTCHKCGTQLRDTIVHFGERGTLGQPLNWEAATEAASRADTILCLGSSLKVLKKYPRLWCMTKPPSRRPKLYIVNLQWTPKDDWAALKLHGKCDDVMRLLMAELGLEIPAYSRWQDPIFSLATPLRAGEEGSHSRKSLCRSREEAPPGDRGAPLSSAPILGGWFGRGCTKRTKRKKVT

SEQ ID NO: 753805 - protein, 309 aa, Homo sapiens
MTQESMDLGQSGPCQTPSHFPTLPGRCNLLPSQPLQVHQGWRKDSPSPPQALLTPGGWTCCVFYFLRLSGGTELPLVLGAIGGAQNSLAVAVVLTSPPPLAAIPPLATRSAFVQHVVSQNCDGLHLRSGLPRTAISELHGNMYIEVCTSCVPNREYVRVFDVTERTALHRHQTGRTCHKCGTQLRDTIVHFGERGTLGQPLNWEAATEAASRADTILCLGSSLKVLKKYPRLWCMTKPPSRRPKLYIVNLQWTPKDDWAALKLHGKCDDVMRLPCVLVKKAATVGSRCAEAERRPRLGTGVHRLARPPS

SEQ ID NO: 753806 - protein, 322 aa, Homo sapiens
AEAEEQVSRGAMAAGGLSRSERKAAERVRRLREEQQRERLRQVSRILRKAAAERSAEEGRLLAESADLVTELQGRSRRREGLKRRQEEVCDDPEELRGKVRELASAVRNAKYLVVYTGAGISTAASIPDYRGPNGVWTLLQKGRSVSAADLSEAEPTLTHMSITRLHEQKLVQHVVSQNCDGLHLRSGLPRTAISELHGNMYIEVSSPAGTQGLHGQAGPTHCALLPLGLYLLRSQQGVRAGVRCDGAHCPPQTPDRPDLPQVWDPAAGHHCALWGEGDVGAASELGSGDRGCQQSRHHPVSRVQPEGSKEVPTPLVHDQAP

SEQ ID NO: 753807 - protein, 160 aa, Homo sapiens
LFQRIPDSAVQHVVSQNCDGLHLRSGLPRTAISELHGNMYIEVSSPAGTQGLHGQAGPTHCALLPLGLYLLRSQQGVRAGVRCDGAHCPPQTPDRPDLPQVWDPAAGHHCALWGEGDVGAASELGSGDRGCQQSRHHPVSRVQPEGSKEVPTPLVHDQAP

SEQ ID NO: 753808 - protein, 440 aa, Homo sapiens
RARAGAPGFGSSWGDGRSRVGRPGAVTTLASWQVCDDPEELRGKVRELASAVRNAKYLVVYTGAGISTVGREAEAYPRTEYELQYREKLAFKAALRFFLLKKRNDQNLPKAASIPDYRGPNGVWTLLQKGRSVSAADLSEAEPTLTHMSITRLHEQKLVQHVVSQNCDGLHLRSGLPRTAISELHGNMYIEVCTSCVPNREYVRVFDVTERTALHRHQTGRTCHKCGTQLRDTIVHFGERGTLGQPLNWEAATEAASRADTILCLGSSLKVRADDTMSEPSPCLPEGVQLCGPALYRLVPCVCAVSVCLLPQVLKKYPRLWCMTKPPSRRPKLYIVNLQWTPKDDWAALKLHGKCDDVMRLLMAELGLEIPAYSRWQDPIFSLATPLRAGEEGSHSRKSLCRSREEAPPGDRGAPLSSAPILGGWFGRGCTKRTKRKKVT

SEQ ID NO: 753809 - protein, 451 aa, Homo sapiens
AEAEEQVSRGAMAAGGLSRSERKAAERVRRLREEQQRERLRQVSRILRKAAAERSAEEGRLLAESADLVTELQGRSRRREGLKRRQEEVCDDPEELRGKVRELASAVRNAKYLVVYTGAGISTAASIPDYRGPNGVWTLLQKGRSVSAADLSEAEPTLTHMSITRLHEQKLVQHVVSQNCDGLHLRSGLPRTAISELHGNMYIEVCTSCVPNREYVRVFDVTERTALHRHQTGRTCHKCGTQLRDTIVHFGERGTLGQPLNWEAATEAASRADTILCLGSSLKVLKKYPRLWCMTKPPSRRPKLYIVNLQWTPKDDWAALKLHGKCDDVMRLLMAELGLEIPAYSRWQDPIFSLATPLRAGEEGSHSRKSLCRSREELRGKVRELASAVRNAKYLVVYTGAGISTAASIPDYRGPNGVWTLLQKGRSVSAAEPRLYADLFISIKRFCTGKK

SEQ ID NO: 753810 - protein, 79 aa, Homo sapiens
GSQARLMPLSLFGRWQDPIFSLATPLRAGEEGSHSRKSLCRSREEAPPGDRGAPLSSAPILGGWFGRGCTKRTKRKKVT

SEQ ID NO: 753811 - protein, 388 aa, Homo sapiens
AEAEEQVSRGAMAAGGLSRSERKAAERVRRLREEQQRERLRQVSRILRKAAAERSAEEGRLLAESADLVTELQGRSRRREGLKRRQEEVCDDPEELRGKVRELASAVRNAKYLVVYTGAGISTAASIPDYRGPNGVWTLLQKGRSVSAADLSEAEPTLTHMSITRLHEQKLVQHVVSQNCDGLHLRSGLPRTAISELHGNMYIEVCTSCVPNREYVRVFDVTERTALHRHQTGRTCHKCGTQLRDTIVHFGERGTLGQPLNWEAATEAASRADTILCLGSSLKVRADDTMSEPSPCLPEGVQLCGPALYRLVPCVCAVSVCLLPQVLKKYPRLWCMTKPPSRRPKLYIVNLQWTPKDDWAALKLHGKCDDVMRLLMAELGLEIPAYSR

SEQ ID NO: 753812 - protein, 313 aa, Homo sapiens
PGGGVLNRTRGNTCVVYTVLLGISTAASIPDYRGPNGVWTLLQKGRSVSAADLSEAEPTLTHMSITRLHEQKLVQHVVSQNCDGLHLRSGLPRTAISELHGNMYIEVCTSCVPNREYVRVFDVTERTALHRHQTGRTCHKCGTQLRDTIVHFGERGTLGQPLNWEAATEAASRADTILCLGSSLKVLKKYPRLWCMTKPPSRRPKLYIVNLQWTPKDDWAALKLHGKCDDVMRLLMAELGLEIPAYSRWQDPIFSLATPLRAGEEGSHSRKSLCRSREEAPPGDRGAPLSSAPILGGWFGRGCTKRTKRKKVT

SEQ ID NO: 753813 - protein, 309 aa, Homo sapiens; identical to SEQ ID NO: 753805

SEQ ID NO: 753814 - protein, 415 aa, Homo sapiens
AEAEEQVSRGAMAAGGLSRSERKAAERVRRLREEQQRERLRQVSRILRKAAAERSAEEGRLLAESADLVTELQGRSRRREGLKRRQEEVCDDPEELRGKVRELASAVRNAKYLVVYTGAGISTAASIPDYRGPNGVWTLLQKGRSVSAADLSEAEPTLTHMSITRLHEQKLVQHVVSQNCDGLHLRSGLPRTAISELHGNMYIEVCTSCVPNREYVRVFDVTERTALHRHQTGRTCHKCGTQLRDTIVHFGERGTLGQPLNWEAATEAASRADTILCLGSSLKVLKKYPRLWCMTKPPSRRPKLYIVNLQWTPKDDWAALKLHGKCDDVMRLLMAELGLEIPAYSRWQDPIFSLATPLRAGEEGSHSRKSLCRSREEAPPGDRGAPLSSAPILGGWFGRGCTKRTKRKKFLAICP

SEQ ID NO: 753815 - protein, 442 aa, Homo sapiens
AEAEEQVSRGAMAAGGLSRSERKAAERVRRLREEQQRERLRQVSRILRKAAAERSAEEGRLLAESADLVTELQGRSRRREGLKRRQEEVCDDPEELRGKVRELASAVRNAKYLVVYTGAGISTAASIPDYRGPNGVWTLLQKGRSVSAADLSEAEPTLTHMSITRLHEQKLVQHVVSQNCDGLHLRSGLPRTAISELHGNMYIEVCTSCVPNREYVRVFDVTERTALHRHQTGRTCHKCGTQLRDTIVHFGERGTLGQPLNWEAATEAASRADTILCLGSSLKVLKKYPRLWCMTKPPSRRPKLYIVNLQWTPKDDWAALKLHGKCDDVMRLLMAELGLEIPAYSRWQDPIFSLATPLRAGEEGSHSRKSLCRSREEAPPGDRGAPLSSAPILGGWFGRGCTKRTKRKKPLALLRLYPDTAWPSRTPAHPASVSRGGSRTFL

SEQ ID NO: 753816 - protein, 346 aa, Homo sapiens
AEAEEQVSRGAMAAGGLSRSERKAAERVRRLREEQQRERLRQVSRILRKAAAERSAEEGRLLAESADLVTELQGRSRRREGLKRRQEEVCDDPEELRGKVRELASAVRNAKYLVVYTGAGISTAASIPDYRGPNGVWTLLQKGRSVSAADLSEAEPTLTHMSITRLHEQKLVQHVVSQNCDGLHLRSGLPRTAISELHGNMYIEVCTSCVPNREYVRVFDVTERTALHRHQTGRTCHKCGTQLRDTIVHFGERGTLGQPLNWEAATEAASRADTILCLGSSLKVLKKYPRLWCMTKPPSRRPKLYIVNLQWTPKDDWAALKLHGKCDDVMRLLMAELGLEIPAYSR

SEQ ID NO: 753817 - protein, 130 aa, Homo sapiens
VGAKADRPPGRVGLLLLSLGFPCPQWTPKDDWAALKLHGKCDDVMRLLMAELGLEIPAYSRWQDPIFSLATPLRAGEEGSHSRKSLCRSREEAPPGDRGAPLSSAPILGGWFGRGCTKRTKRKKFLAICP

SEQ ID NO: 753818 - protein, 299 aa, Homo sapiens
MHSLATAAPVPTTLAQVDREKIYQWINELSSPETRENALLELSKKRESVPDLAPMLWHSFGTIAALLQEIVNIYPSINPPTLTAHQSNRVCNALALLQCVASHPETRSAFLAAHIPLFLYPFLHTVSKTRPFEYLRLTSLGVIGALVKTDEQEVINFLLTTEIIPLCLRIMESGSELSKTVATFILQKILLDDTGLAYICQTYERFSHVAMILGKMVLQLSKEPSARLLKHVVRCYLRLSDNPRAREALRQCLPDQLKDTTFAQVLKDDTTTKRWLAQLVKNLQEGQVTDPRGIPLPPQ

SEQ ID NO: 753819 - protein, 299 aa, Homo sapiens; identical to SEQ ID NO: 753818

SEQ ID NO: 753820 - protein, 258 aa, Homo sapiens
MHSLATAAPVPTTLAQVDREKIYQWINELSSPETRENALLELSKKRESVPDLAPMLWHSFGTIAALLQEIVNIYPSINPPTLTAHQSNRVCNALALLQCVASHPETRSAFLAAHIPLFLYPFLHTVSKTRPFEYLRLTSLGVIGALVKTDEQEVINFLLTTEIIPLCLRIMESGSELSKTVATFILQKILLDDTGLAYICQTYERFSHVAMILGKMVLQLSKEPSARLLKHVVRCYLRLSDNPRFSDLTFCWSSFQRK

SEQ ID NO: 753821 - protein, 244 aa, Homo sapiens
MHSLATAAPVPTTLAQVDREKIYQWINELSSPETRENALLELSKKRESVPDLAPMLWHSFGTIAALLQEIVNIYPSINPPTLTAHQSNRVCNALALLQCVASHPETRSAFLAAHIPLFLYPFLHTVSKTRPFEYLRLTSLGVIGALVKTDEQEVINFLLTTEIIPLCLRIMESGSELSKTVATFILQKILLDDTGLAYICQTYERFSHVAMILGKMVLQLSKEPSARLLKHVVRCYLRLSDNPR

SEQ ID NO: 753822 - protein, 246 aa, Homo sapiens
MTGGGRWKVEYKDHKEIVNIYPSINPPTLTAHQSNRVCNALALLQCVASHPETRSAFLAAHIPLFLYPFLHTVSKTRPFEYLRLTSLGVIGALVKTDEQEVINFLLTTEIIPLCLRIMESGSELSKTVATFILQKILLDDTGLAYICQTYERFSHVAMILGKMVLQLSKEPSARLLKHVVRCYLRLSDNPRAREALRQCLPDQLKDTTFAQVLKDDTTTKRWLAQLVKNLQEGQVTDPRGIPLPPQ

SEQ ID NO: 753823 - protein, 217 aa, Homo sapiens
AWRRLRLCLLHWHYCRCVASHPETRSAFLAAHIPLFLYPFLHTVSKTRPFEYLRLTSLGVIGALVKTDEQEVINFLLTTEIIPLCLRIMESGSELSKTVATFILQKILLDDTGLAYICQTYERFSHVAMILGKMVLQLSKEPSARLLKHVVRCYLRLSDNPRAREALRQCLPDQLKDTTFAQVLKDDTTTKRWLAQLVKNLQEGQVTDPRGIPLPPQ

SEQ ID NO: 753824 - protein, 160 aa, Homo sapiens
MHSLATAAPVPTTLAQVDREKIYQWINELSSPETRENALLELSKKRESVPDLAPMLWHSFGTIAALLQEIVNIYPSINPPTLTAHQSNRVCNALALLQCVASHPETRSAFLAAHIPLFLYPFLHTVSKTRPFEYLRLTSLGVIGKLLELFCKPEILTVVV

SEQ ID NO: 753825 - protein, 87 aa, Homo sapiens
MHSLATAAPVPTTLAQVDREKIYQWINELSSPETRENALLELSKKRESVPDLAPMLWHSFGTIAALLQEIVNIYPSINPPVDAAANL

SEQ ID NO: 753826 - protein, 102 aa, Homo sapiens
MHSLATAAVSGWAPRLGTRILSQTHVSAFSPNSRCRVPSLIFFCPQSPRPRFPSSARFGCGGAGPYFLAGRLSRPSARPIAFFAGAGAWSHARSRPFIDLLR

SEQ ID NO: 753827 - protein, 316 aa, Homo sapiens
MRAHAGHKRSECGGEWRETPRKQKQHGKASISPSSGARRTVTPTRKRPYECKVCGKAFNSPNLFQIHQRTHTGKRSYKCREIVRAFTVSSFFRKHGKMHTGEKRYECKYCGKPIDYPSLFQIHVRTHTGEKPYKCKQCGKAFISAGYLRTHEIRSHALEKSHQCQECGKKLSCSSSLHRHERTHSGGKLYECQKCAKVFRCPTSLQAHERAHTGERPYECNKCGKTFNYPSCFRRHKKTHSGEKPYECTRCGKAFGWCSSLRRHEMTHTGEKPFDCKQCGKVFTFSNYLRLHERTHLAGRSQCFGRRQGDHLSPGV

SEQ ID NO: 753828 - protein, 316 aa, Homo sapiens; identical to SEQ ID NO: 753827

SEQ ID NO: 753829 - protein, 118 aa, Homo sapiens [sequence omitted]

SEQ ID NO: 753830 - protein, 193 aa, Homo sapiens [sequence omitted]

SEQ ID NO: 753831 - protein, 346 aa, Homo sapiens
MARKSNLPVLLVPFLLCQALVRCSSPLPLVVNTWPFKNATEAAWRALASGGSALDAVESGCAMCEREQCDGSVGFGGSPDELGETTLDAMIMDGTTMDVGAVGDLRRIKNAIGVARKVLEHTTHTLLVGESATTFAQSMGFINEDLSTSASQALHSDWLARNCQPNYWRNVIPDPSKYCGPYKPPGILKQDIPIHKETEDDRGHDTIGMVVIHKTGHIAAGTSTNGIKFKIHGRVGDSPIPGAGAYADDTAGAAAATGNGDILMRFLPSYQAVEYMRRGEDPTIACQKVISRIQKHFPEFFGAVICANVTGSYGAACNKLSTFTQFSFMVYNSEKNQPTEEKVDCI

SEQ ID NO: 753832 - protein, 209 aa, Homo sapiens [sequence omitted]

SEQ ID NO: 753833 - protein, 219 aa, Homo sapiens
MARKSNLPVLLVPFLLCQALVRCSSPLPLVVNTWPFKNATEAAWRALASGGSALDAVESGCAMCEREQCDGSVGFGGSPDELGETTLDAMIMDGTTMDVGAVGDLRRIKNAIGVARKVLEHTTHTLLVGESATTFAQSMGFINEDLSTSASQALHSDWLARNCQPNYWRNVIPDPSKYCGPYKPPGILKQDIPIHKETKAEKAAHSHHLVFLMCSKVFL

SEQ ID NO: 753834 - protein, 346 aa, Homo sapiens; identical to SEQ ID NO: 753831

SEQ ID NO: 753835 - protein, 227 aa, Homo sapiens
MARKSNLPVLLVPFLLCQALVRCSSPLPLVVNTWPFKNATEAAWRALASGGSALDAVESGCAMCEREQCDGSVGFGGSPDELGETTLDAMIMDGTTMDVGAVGDLRRIKNAIGVARKVLEHTTHTLLVGESATTFAQSMGFINEDLSTSASQALHSDWLARNCQPNYWRNVIPDPSKYCGPYKPPGILKQDIPIHKETEDDRGHDTIGMVVIHKTGHIAAGTSTNAV

SEQ ID NO: 753836 - protein, 209 aa, Homo sapiens [sequence omitted]

SEQ ID NO: 753837 - protein, 126 aa, Homo sapiens
TSSGDQKRLRPSTSVDEEDEESERERDRDMADTPCELAKRDPKGVGVRRRPARPLELDSGGEEDEKESLSASSSSSASSSSGSSTTSPSSSASDKEEEQESTEEEEEAEEEEEEEVPRSQLSSSST

SEQ ID NO: 753838 - protein, 117 aa, Homo sapiens
PSPALTPSLPAESERERDRDMADTPCELAKRDPKGVGVRRRPARPLELDSGGEEDEKESLSASSSSSASSSSGSSTTSPSSSASDKEEEQESTEEEEEAEEEEEEEVPRSQLSSSST

SEQ ID NO: 753839 - protein, 115 aa, Homo sapiens
MGALYLSIHVEKKTHPIASKSTTSLFKGTTQRNQTPFALFLKHLKKTSDGLTRCHPWSHRRDTLCKQSIRGSSLSVGAQCSENRGEVLPWKLARPQNMSFTHAAFFFSFSKRTKK

SEQ ID NO: 753840 - protein, 75 aa, Homo sapiens
ILRPRSVREWIWGHHCPRAPAPVGSSLGPPHGNLSSPELYSWPGVSGPHCRHDVGLDSFFTTPIGQSLVSPLLAK

SEQ ID NO: 753841 - protein, 104 aa, Homo sapiens
MKSCQKMEGKPENESEPKHEEEPKPEEKPEEEEKLEEEAKAKGTFRERLIQSLQEFKEDIHNRHLSNEDMFREVDEIDEIRRVRNKLIVMRWKVNRNHPYPYLM

SEQ ID NO: 753842 - protein, 104 aa, Homo sapiens; identical to SEQ ID NO: 753841

SEQ ID NO: 753843 - protein, 104 aa, Homo sapiens; identical to SEQ ID NO: 753841

SEQ ID NO: 753844 - protein, 104 aa, Homo sapiens; identical to SEQ ID NO: 753841

SEQ ID NO: 753845 - protein, 104 aa, Homo sapiens; identical to SEQ ID NO: 753841

SEQ ID NO: 753846 - protein, 153 aa, Homo sapiens
MCVNFRNIENTNKQKEEEETDPISARSHCIQRRISKKEKKEGREVDRYKMKSCQKMEGKPENESEPKHEEEPKPEEKPEEEEKLEEEAKAKGTFRERLIQSLQEFKEDIHNRHLSNEDMFREVDEIDEIRRVRNKLIVMRWKVNRNHPYPYLM

SEQ ID NO: 753847 - protein, 161 aa, Homo sapiens
ESRWTLCKRSRPTGAIPPASPPVEAQARFAAFSLCLITMSTNENANTPAARLHRFKNKGQDSTEMRRRENESEPKHEEEPKPEEKPEEEEKLEEEAKAKGTFRERLIQSLQEFKEDIHNRHLSNEDMFREVDEIDEIRRVRNKLIVMRWKVNRNHPYPYLM

SEQ ID NO: 753848 - protein, 104 aa, Homo sapiens; identical to SEQ ID NO: 753841

SEQ ID NO: 753849 - protein, 104 aa, Homo sapiens; identical to SEQ ID NO: 753841

SEQ ID NO: 753850 - protein, 178 aa, Homo sapiens
LEDPGVPFVSSISSTSLNISSLLKFYLQGCCFQQDPKLEKEEEETDPISARSHCIQRRISKKEKKEGREVDRYKMKSCQKMEGKPENESEPKHEEEPKPEEKPEEEEKLEEEAKAKGTFRERLIQSLQEFKEDIHNRHLSNEDMFREVDEIDEIRRVRNKLIVMRWKVNRNHPYPYLM

SEQ ID NO: 753851 - protein, 142 aa, Homo sapiens
LWIPGLQDSISDCAKSHCIQRRISKKEKKEGREVDRYKMKSCQKMEGKPENESEPKHEEEPKPEEKPEEEEKLEEEAKAKGTFRERLIQSLQEFKEDIHNRHLSNEDMFREVDEIDEIRRVRNKLIVMRWKVNRNHPYPYLM

SEQ ID NO: 753852 - protein, 1016 aa, Homo sapiens
MEVAVEKAVAAAAAASAAASGGPSAAPSGENEAESRQGPDSERGGEAARLNLLDTCAVCHQNIQSRAPKLLPCLHSFCQRCLPAPQRYLMLPAPMLGSAETPPPVPAPGSPVSGSSPFATQVGVIRCPVCSQECAERHIIDNFFVKDTTEVPSSTVEKSNQVCTSCEDNAEANGFCVECVEWLCKTCIRAHQRVKFTKDHTVRQKEEVSPEAVGVTSQRPVFCPFHKKEQLKLYCETCDKLTCRDCQLLEHKEHRYQFIEEAFQNQKVIIDTLITKLMEKTKYIKFTGNQIQNRIIEVNQNQKQVEQDIKVAIFTLMVEINKKGKALLHQLESLAKDHRMKLMQQQQEVAGLSKQLEHVMHFSKWAVSSGSSTALLYSKRLITYRLRHLLRARCDASPVTNNTIQFHCDPSFWAQNIINLGSLVIEDKESQPQMPKQNPVVEQNSQPPSGLSSNQLSKFPTQISLAQLRLQHMQQQQPPPRLINFQNHSPKPNGPVLPPHPQQLRYPPNQNIPRQAIKPNPLQMAFLAQQAIKQWQISSGQGTPSTTNSTSSTPSSPTITSAAGYDGKAFGSPMIDLSSPVGGSYNLPSLPDIDCSSTIMLDNIVRKDTNIDHGQPRPPSNRTVQSPNSSVPSPGLAGPVTMTSVHPPIRSPSASSVGSRGSSGSSSKPAGADSTHKVPVVMLEPIRIKQENSGPPENYDFPVVIVKQESDEESRPQNANYPRSILTSLLLNSSQSSTSEETVLRSDAPDSTGDQPGLHQDNSSNGKSEWLDPSQKSPLHVGETRKEDDPNEDWCAVCQNGGELLCCEKCPKVFHLSCHVPTLTNFPSGEWICTFCRDLSKPEVEYDCDAPSHNSEKKKTEGLVKLTPIDKRKCERLLLFLYCHEMSLAFQDPVPLTVPDYYKIIKNPMDLSTIKKRLQEDYSMYSKPEDFVADFRLIFQNCAEFNEPDSEVANAGIKLENYFEELLKNLYPEKRFPKPEFRNESEDNKFSDDSDDDFVQPRKKRLKSIEERQLLK

SEQ ID NO: 753853 - protein, 653 aa, Homo sapiens
WPSLVSRDRQPDVVANDMITYRLRHLLRARCDASPVTNNTIQFHCDPSFWAQNIINLGSLVIEDKESQPQMPKQNPVVEQNSQPPSGLSSNQLSKFPTQISLAQLRLQHMQQQQPPPRLINFQNHSPKPNGPVLPPHPQQLRYPPNQNIPRQAIKPNPLQMAFLAQQAIKQWQISSGQGTPSTTNSTSSTPSSPTITSAAGYDGKAFGSPMIDLSSPVGGSYNLPSLPDIDCSSTIMLDNIVRKDTNIDHGQPRPPSNRTVQSPNSSVPSPGLAGPVTMTSVHPPIRSPSASSVGSRGSSGSSSKPAGADSTHKVPVVMLEPIRIKQENSGPPENYDFPVVIVKQESDEESRPQNANYPRSILTSLLLNSSQSSTSEETVLRSDAPDSTGDQPGLHQDNSSNGKSEWLDPSQKSPLHVGETRKEDDPNEDWCAVCQNGGELLCCEKCPKVFHLSCHVPTLTNFPSGEWICTFCRDLSKPEVEYDCDAPSHNSEKKKTEGLVKLTPIDKRKCERLLLFLYCHEMSLAFQDPVPLTVPDYYKIIKNPMDLSTIKKRLQEDYSMYSKPEDFVADFRLIFQNCAEFNEPDSEVANAGIKLENYFEELLKNLYPEKRFPKPEFRNESEDNKFSDDSDDDFVQPRKKRLKSIEERQLLK

SEQ ID NO: 753854 - protein, 94 aa, Homo sapiens
YPLVTLATSPRLATSPRLATSEFNEPDSEVANAGIKLENYFEELLKNLYPEKRFPKPEFRNESEDNKFSDDSDDDFVQPRKKRLKSIEERQLLK

SEQ ID NO: 753855 - protein, 1016 aa, Homo sapiens; identical to SEQ ID NO: 753852

SEQ ID NO: 753856 - protein, 953 aa, Homo sapiens
AQAGLKLLASSNPPASASQNVGITVGVIRCPVCSQECAERHIIDNFFVKDTTEVPSSTVEKSNQVCTSCEDNAEANGFCVECVEWLCKTCIRAHQRVKFTKDHTVRQKEEVSPEAVGVTSQRPVFCPFHKKEQLKLYCETCDKLTCRDCQLLEHKEHRYQFIEEAFQNQKVIIDTLITKLMEKTKYIKFTGNQIQNRIIEVNQNQKQVEQDIKVAIFTLMVEINKKGKALLHQLESLAKDHRMKLMQQQQEVAGLSKQLEHVMHFSKWAVSSGSSTALLYSKRLITYRLRHLLRARCDASPVTNNTIQFHCDPSFWAQNIINLGSLVIEDKESQPQMPKQNPVVEQNSQPPSGLSSNQLSKFPTQISLAQLRLQHMQQQVMAQRQQVQRRPAPVGLPNPRMQGPIQQPSISHQQPPPRLINFQNHSPKPNGPVLPPHPQQLRYPPNQNIPRQAIKPNPLQMAFLAQQAIKQWQISSGQGTPSTTNSTSSTPSSPTITSAAGYDGKAFGSPMIDLSSPVGGSYNLPSLPDIDCSSTIMLDNIVRKDTNIDHGQPRPPSNRTVQSPNSSVPSPGLAGPVTMTSVHPPIRSPSASSVGSRGSSGSSSKPAGADSTHKVPVVMLEPIRIKQENSGPPENYDFPVVIVKQESDEESRPQNANYPRSILTSLLLNSSQSSTSEETVLRSDAPDSTGDQPGLHQDNSSNGKSEWLDPSQKSPLHVGETRKEDDPNEDWCAVCQNGGELLCCEKCPKVFHLSCHVPTLTNFPSGEWICTFCRDLSKPEVEYDCDAPSHNSEKKKTEGLVKLTPIDKRKCERLLLFLYCHEMSLAFQDPVPLTVPDYYKIIKNPMDLSTIKKRLQEDYSMYSKPEDFVADFRLIFQNCAEFNEPDSEVANAGIKLENYFEELLKNLYPEKRFPKPEFRNESEDNKFSDDSDDDFVQPRKKRLKSIEERQLLK

SEQ ID NO: 753857 - protein, 475 aa, Homo sapiens
RFRPERAGRVEAPAFPGLLQLPPLYCKTDGRKNMSDSAGGRAGLRRYPKLPVWVVEDHQEVLPFIYRAIGSKHLPASNVSFLHFDSHPDLLIPVNMPADTVFDKETLFGELSIENWIMPAVYAGHFSHVIWFHPTWAQQIREGRHHFLVGKDTSTTTIRVTSTDHYFLSDGLYVPEDQLENQKPLQLDVIMVKPYKLCNNQEENDAVSSAKKPKLALEDSENTASTNCDSSSEGLEKDTATQRSDQTCLEPSCSCSSENQECQTAASTGEILEILKKGKAFVLDIDLDFFSVKNPFKEMFTQEEYKILQELYQFKKPGTNLTEEDLVDIVDTRIHQLEDLEATFADLCDGDDEETVQRWASNPGMESLVPLVQSLKKRMEVPDYEMVHQAGLTCDYSELPHHISTEQEIECLIQSVHYLLKNLPNPTLVTIARSSLDDYCPSDQVDTIQEKVLNMLRALYGNLDLQVYAAESPPS

SEQ ID NO: 753858 - protein, 475 aa, Homo sapiens; identical to SEQ ID NO: 753857

SEQ ID NO: 753859 - protein, 401 aa, Homo sapiens
RFRPERAGRVEAPAFPGLLQLPPLYCKTDGRKNMSDSAGGRAGLRRYPKLPVWVVEDHQEVLPFIYRAIGSKHLPASNVSFLHFDSHPDLLIPVNMPADTVFDKETLFGELSIENWIMPAVYAGHFSHVIWFHPTWAQQIREGRHHFLVGKDTSTTTIRGLEKDTATQRSDQTCLEPSCSCSSENQECQTAASTGEILEILKKGKAFVLDIDLDFFSVKNPFKEMFTQEEYKILQELYQFKKPGTNLTEEDLVDIVDTRIHQLEDLEATFADLCDGDDEETVQRWASNPGMESLVPLVQSLKKRMEVPDYEMVHQAGLTCDYSELPHHISTEQEIECLIQSVHYLLKNLPNPTLVTIARSSLDDYCPSDQVDTIQEKVLNMLRALYGNLDLQVYAAESPPS

SEQ ID NO: 753860 - protein, 475 aa, Homo sapiens; identical to SEQ ID NO: 753857

SEQ ID NO: 753861 - protein, 95 aa, Homo sapiens
PRHIVEPNADPGLKTRWRDTASSPACLRLPKCWDYRCKSLPQPETNILKSYYQKNPTNLPIHESIIGSLPFQGIWHCGPALAKCSPALLVSRWSG

SEQ ID NO: 753862 - protein, 596 aa, Homo sapiens
MAAHLSYGRVNLNVLREAVRRELREFLDKCAGSKAIVWDEYLTGPFGLIAQYSLLKEHEVEKMFTLKGNRLPAADVKNIIFFVRPRLELMDIIAENVLSEDRRGPTRDFHILFVPRRSLLCEQRLKDLGVLGSFIHREEYSLDLIPFDGDLLSMESEGAFKECYLEGDQTSLYHAAKGLMTLQALYGTIPQIFGKGECARQVANMMIRMKREFTGSQNSIFPVFDNLLLLDRNVDLLTPLATQLTYGGLIDEIYGIQNSYVKLPPEKFAPKKQGDGGKDLPTEAKKLQLNSAEELYAEIRDKNFNAVGSVLSKKAKIISAAFEERHNAKTVGEIKQFVSQLPHMQAARGSLANHTSIAELIKDVTTSEDFFDKLTVEQEFMSGIDTDKVNNYIEDCIAQKHSLIKVLRLVCLQSVCNSGLKQKVLDYYKREILQTYGYEHILTLHNLEKAGLLKPQTGGRNNYPTIRKTLRLWMDDVNEQNPTDISYVYSGYAPLSVRLAQLLSRPGWRSIEEVLRILPGPHFEERQPLPTGLQKKRQPGENRVTLIFFLGGVTFAEIAALRFLSQLEDGGTEYVIATTKLMNGTSWIEALMEKPF

SEQ ID NO: 753863 - protein, 589 aa, Homo sapiens
MAAHLSYGRVNLNVLREAVRRELREFLDKCAGSKAIVWDEYLTGPFGLIAQYSLLKEHEVEKMFTLKGNRLPAADVKNIIFFVRPRLELMDIIAENVLSEDRRGPTRDFHILFVPRRSLLCEQRLKDLGVLGSFIHREEYSLDLLSMESEGAFKECYLEGDQTSLYHAAKGLMTLQALYGTIPQIFGKGECARQVANMMIRMKREFTGSQNSIFPVFDNLLLLDRNVDLLTPLATQLTYGGLIDEIYGIQNSYVKLPPEKFAPKKQGDGGKDLPTEAKKLQLNSAEELYAEIRDKNFNAVGSVLSKKAKIISAAFEERHNAKTVGEIKQFVSQLPHMQAARGSLANHTSIAELIKDVTTSEDFFDKLTVEQEFMSGIDTDKVNNYIEDCIAQKHSLIKVLRLVCLQSVCNSGLKQKVLDYYKREILQTYGYEHILTLHNLEKAGLLKPQTGGRNNYPTIRKTLRLWMDDVNEQNPTDISYVYSGYAPLSVRLAQLLSRPGWRSIEEVLRILPGPHFEERQPLPTGLQKKRQPGENRVTLIFFLGGVTFAEIAALRFLSQLEDGGTEYVIATTKLMNGTSWIEALMEKPF

SEQ ID NO: 753864 - protein, 443 aa, Homo sapiens
MESEGAFKECYLEGDQTSLYHAAKGLMTLQALYGTIPQIFGKGECARQVANMMIRMKREFTGSQNSIFPVFDNLLLLDRNVDLLTPLATQLTYGGLIDEIYGIQNSYVKLPPEKFAPKKQGDGGKDLPTEAKKLQLNSAEELYAEIRDKNFNAVGSVLSKKAKIISAAFEERHNAKTVGEIKQFVSQLPHMQAARGSLANHTSIAELIKDVTTSEDFFDKLTVEQEFMSGIDTDKVNNYIEDCIAQKHSLIKVLRLVCLQSVCNSGLKQKVLDYYKREILQTYGYEHILTLHNLEKAGLLKPQTGGRNNYPTIRKTLRLWMDDVNEQNPTDISYVYSGYAPLSVRLAQLLSRPGWRSIEEVLRILPGPHFEERQPLPTGLQKKRQPGENRVTLIFFLGGVTFAEIAALRFLSQLEDGGTEYVIATTKLMNGTSWIEALMEKPF

SEQ ID NO: 753865 - protein, 596 aa, Homo sapiens; identical to SEQ ID NO: 753862

SEQ ID NO: 753866 - protein, 494 aa, Homo sapiens
MAAHLSYGRVNLNVLREAVRRELREFLDKCAGSKAIVWDEYLTGPFGLIAQYSLLKEHEVEKMFTLKGNRLPAADVKNIIFFVRPRLELMDIIAENVLSEDRRGPTRDFHILFVPRRSLLCEQRLKDLGVLGSFIHREEYSLDLIPFDGDLLSMESEGAFKECYLEGDQTSLYHAAKGLMTLQALYGTIPQIFGKGECARQVANMMIRMKREFTGSQNSIFPVFDNLLLLDRNVDLLTPLATQLTYGGLIDEIYGIQNSYVKLPPEKFAPKKQGDGGKDLPTEAKKLQLNSAEELYAEIRDKNFNAVGSVLSKKAKIISAAFEERHNAKTVGEIKQFVSQLPHMQAARGSLANHTSIAELIKDVTTSEDFFDKLTVEQEFMSGIDTDKVNNYIEDCIAQKHSLIKVLRLVCLQSVCNSGLKQKVLDYYKREILQTYGYEHILTLHNLEKAGLLKPQTGGRNNYPTIRKTLRLWMDDVNEQVSHTSPPRLSLGTG

SEQ ID NO: 753867 - protein, 168 aa, Homo sapiens
MAAHLSYGRVNLNVLREAVRRELREFLDKCAGSKAIVWDEYLTGPFGLIAQYSLLKEHEVEKMFTLKGNRLPAADVKNIIFFVRPRLELMDIIAENVLSEDRRGPTRDFHILFVPRRSLLCEQRLKDLGVLGSFIHREEYSLDLIPFDGDLLSMESEGAFKIVLFESS

SEQ ID NO: 753868 - protein, 596 aa, Homo sapiens; identical to SEQ ID NO: 753862

SEQ ID NO: 753869 - protein, 596 aa, Homo sapiens; identical to SEQ ID NO: 753862

SEQ ID NO: 753870 - protein, 86 aa, Homo sapiens
MKGGALGVQPGAGVAPRLFCESRVSHCDSPAADELVYVRCFLRCLPRHRTGERSKNVDGPVSIHYRDHTCTLEALLKHLHLATCCS

SEQ ID NO: 753871 - protein, 408 aa, Homo sapiens
SDSPASAFRVAGITGMHQHAQCLTAEEIFSLHGFSNATQITSSKFSVICPAVLQQLNFHPCEDRPKHKTRPSHSEVWGYGFLSVTIINLASLLGLILTPLIKKSYFPKILTFFVGLAIGTLFSNAIFQLIPEAFGFDPKVDSYVEKAVAVFGGFYLLFFFERMLKMLLKTYGQNGHTHFGNDNFGPQEKTHQPKALPAINGVTCYANPAVTEANGHIHFDNVSVVSLQDGKKEPSSCTCLKGPKLSEIGTIAWMITLCDALHNFIDGLAIGASCTLSLLQGLSTSIAILCEEFPHELGDFVILLNAGMSTRQALLFNFLSACSCYVGLAFGILVGNNFAPNIIFALAGGMFLYISLADMFPEMNDMLREKVTGRKTDFTFFMIQNAGMLTGFTAILLITLYAGEIELE

SEQ ID NO: 753872 - protein, 460 aa, Homo sapiens
MAPGRAVAGLLLLAAAGLGGVAEGPGLAFSEDVLSVFGANLSLSAAQLQHLLEQMGAASRVGVPEPGQLHFNQCLTAEEIFSLHGFSNATQITSSKFSVICPAVLQQLNFHPCEDRPKHKTRPSHSEVWGYGFLSVTIINLASLLGLILTPLIKKSYFPKILTFFVGLAIGTLFSNAIFQLIPEAFGFDPKVDSYVEKAVAVFGGFYLLFFFERMLKMLLKTYGQNGHTHFGNDNFGPQEKTHQPKALPAINGVTCYANPAVTEANGHIHFDNVSVVSLQDGKKEPSSCTCLKGPKLSEIGTIAWMITLCDALHNFIDGLAIGASCTLSLLQGLSTSIAILCEEFPHELGDFVILLNAGMSTRQALLFNFLSACSCYVGLAFGILVGNNFAPNIIFALAGGMFLYISLADMFPEMNDMLREKVTGRKTDFTFFMIQNAGMLTGFTAILLITLYAGEIELE

SEQ ID NO: 753873 - protein, 460 aa, Homo sapiens; identical to SEQ ID NO: 753872

SEQ ID NO: 753874 - protein, 243 aa, Homo sapiens [sequence omitted]

SEQ ID NO: 753875 - protein, 243 aa, Homo sapiens [sequence omitted]

SEQ ID NO: 753876 - protein, 240 aa, Homo sapiens
MAPGRAVAGLLLLAAAGLGGVAEGPGLAFSEDVLSVFGANLSLSAAQLQHLLEQMGAASRVGVPEPGQLHFNQCLTAEEIFSLHGFSNATQITSSKFSVICPAVLQQLNFHPCEDRPKHKTRPSHSEVWGYGFLSVTIINLASLLGLILTPLIKKSYFPKILTFFVGLAIGTLFSNAIFQLIPEAFGFDPKVDSYVEKAVAVFGGFYLLFFFERMLKMLLKTYGQNGHTHFRLVTPSCLN

SEQ ID NO: 753877 - protein, 58 aa, Homo sapiens
MLTWRCSGGSRLKSDATVIIDLALGSAQDRQSARARSPVRHPVPEVKGAEKRSMWTGS

SEQ ID NO: 753878 - protein, 460 aa, Homo sapiens; identical to SEQ ID NO: 753872

SEQ ID NO: 753879 - protein, 366 aa, Homo sapiens
RGVSPRTCQRYRGCGGGRQKEREIQRPSLTLTRREKDAETDKQTDRRGSPGGRGAHSAYRSPRLRCHFNAPQVASCCSFEGVGEPGASRATSDSEQRRALTLPPLGKDASAPARVPLRSSSTCWSRWEPPPAWASRSLASCTSTSWELKVPTAIGAVLNSKDEQRATCEHKQKLAGLPYEYLCSKMQNCKYLDEGDDSMNDKLGRLSGLHLNGPRLTHTLGHTEHEDRRKDSKTVFLQGTPRRPIPLTDYRPTPAERRTMTPALPSRHVRYTRPCLGKNPSPVGTLSGQGRAPVNSSTPRRQSRPTQRTKTPPHGATHEPPFAHPHPDPPPTPGRALAHPRGTPTDARAPPPARPNPRPSPAYPHT

SEQ ID NO: 753880 - protein, 460 aa, Homo sapiens; identical to SEQ ID NO: 753872

SEQ ID NO: 753881 - protein, 243 aa, Homo sapiens [sequence omitted]

SEQ ID NO: 753882 - protein, 460 aa, Homo sapiens; identical to SEQ ID NO: 753872

SEQ ID NO: 753883 - protein, 103 aa, Homo sapiens
CLSGEILEPVSKPPRLFKDPTTGLYSRPLVSTYLPSYTMPLPSPPTLTHPLPPNPHSLRLALYHPPTLLSVEAGTFLRDTSLAVLFLRLWGLRRADETLKYFI

SEQ ID NO: 753884 - protein, 103 aa, Homo sapiens; identical to SEQ ID NO: 753883

SEQ ID NO: 753885 - protein, 496 aa, Homo sapiens
TWSGAGHMEPGLEHALRRTPSWSSLGGSEHQEMSFLEQENSSSWPSPAVTSSSERIRGKRRAKALRWTRQKSVEEGEPPGQGEGPRSRPAAESTGLEATFPKTTPLAQADPAGVGTPPTGWDCLPSDCTASAAGSSTDDVELATEFPATEAWECELEGLLEERPALCLSPQAPFPKLGWDDELRKPGAQIYMRFMQEHTCYDAMATSSKLVIFDTMLEIKKAFFALVANGVRAAPLWDSKKQSFVGMLTITDFILVLHRYYRSPLVQIYEIEQHKIETWREIYLQGCFKPLVSISPNDSLFEAVYTLIKNRIHRLPVLDPVSGNVLHILTHKRLLKFLHIFGSLLPRPSFLYRTIQDLGIGTFRDLAVVLETAPILTALDIFVDRRVSALPVVNECGQVVGLYSRFDVIHLAAQQTYNHLDMSVGEALRKRTLCLEGVLSCQPHESLGEVIDRIAREQVHRLVLVDETQHLLGVVSLSDILQALVLSPAGIDALGA

SEQ ID NO: 753886 - protein, 111 aa, Homo sapiens
EYGKELDERCRRVSEAPSLPVVFIDGHYLGGAEKILSMNESGELQDILTKIERVQHPHECPSCGGFGFLPCSVCHGSKMSMFRNCFTDSFKALKCTACNENGLQRCKNCAG

SEQ ID NO: 753887 - protein, 111 aa, Homo sapiens; identical to SEQ ID NO: 753886

SEQ ID NO: 753888 - protein, 129 aa, Homo sapiens
MEILSSPWKESLFFPSSCTSPQVESHWPAGPMPIPEQYCNWSPAVTCPVTAGRWGWASYPKESPGAVPRRENGCGAEQTVDVYLTQPDKTACKNQAYGPAPLCRPTLYTPEMPFLSLANPHSPFQSQLI

SEQ ID NO: 753889 - protein, 72 aa, Homo sapiens
PSGAPTLPFAPDECSLTPGSPPHPLNKQKHHPPHPSQTQKDLVPRSPQLEKSRIRLRRTLRNLGGGRGQRGQ

SEQ ID NO: 753890 - protein, 49 aa, Homo sapiens [sequence omitted]

SEQ ID NO: 753891 - protein, 156 aa, Homo sapiens
RVRGCDAPPCCRNPGPWRLPADGKGVLRAWSPERGQLLTPFPGKGPGREHMGAASAGKRGQKGSWQQTPGSEWANLDYPGPGLTYKTAKDSFRWATGEHQAFTSFAFGQPDNHGFGNCVELQASAAFNWNDQRCKTRNRYICQFAQEHISRWGPGS

SEQ ID NO: 753892 - protein, 85 aa, Homo sapiens
SDFETRNFWIGLTYKTAKDSFRWATGEHQAFTSFAFGQPDNHGFGNCVELQASAAFNWNDQRCKTRNRYICQFAQEHISRWGPGS

SEQ ID NO: 753893 - protein, 123 aa, Homo sapiens
QPFGNKNRCYCSSLENVASGDGTLEIRVNVLERGSRVNKAQPKDAVEPFSLEIFGSEVGFSHSHPCPCGYHYPISLDRVGRGGVWRRNELACGPQAPSVLAQVWVPFFTLVCSLTHTSHTLLV

SEQ ID NO: 753894 - protein, 237 aa, Homo sapiens
MEDGGQREERKRNAKCGQPPRVKIEGSVMQVLDRRRQVGRAPQPPPQKRPPPGLSDPWGAGSASPRPHVAPAPMVPVPWMETASSGGQMWCSGIQSHFLPGHACPAASLAAFSPYLPGDPGWGTRAPGGRAQRDQGKPLAWRVWGTLPQGRTQQEEAQELGPAAQELGPATQAGLGTWQGLGILALDLGDLGGTGRGEMGGPAPAQCRPHPCTEAPPCHTPRRLPELKPRPQQREHP

SEQ ID NO: 753895 - protein, 110 aa, Homo sapiens
MEGEGGPEGAGRETRASIHPPLRTDRHHSEREARAPLGGAARPSEGPQHLSHVLLQESTSARGQCQRRSTGRGGHRQAGPGPGGDEGEPAGAAGQVLQLVGDHKEGHGKF

SEQ ID NO: 753896 - protein, 198 aa, Homo sapiens
LADVTALLRAPATPGRLVAGARGGWGYVQSCRGAGAAAVKALGSAETAVPTARLGCRRFSRSRCCRRRGRGSLLSFSAAKVRSCLGSARGGAPGAARDGGGHLDSEQEAPRPMPNIPGDLESREAMVAFFNSAGASAQEEQRVCCQPLAHPVASSQKKPEVAAPAPESGGESVFGETHRALQGAMEKLQRLYGRRRWT

SEQ ID NO: 753897 - protein, 237 aa, Homo sapiens; identical to SEQ ID NO: 753894

SEQ ID NO: 753898 - protein, 237 aa, Homo sapiens; identical to SEQ ID NO: 753894

SEQ ID NO: 753899 - protein, 76 aa, Homo sapiens
KDTGAGLIQDSFLEEAGFKLVNEAPRNPSGCEVQSSARCWSLKKEPHEGNNHERTVVLCEEEMKLIHDNGDENPSS

SEQ ID NO: 753900 - protein, 69 aa, Homo sapiens
PFPVQDPHLRSWEPRCTPGVPFQPPQCECGRALTFGGSLPRLTGSLCGSPARCPGSDVAAPRRGAPAET

SEQ ID NO: 753901 - protein, 69 aa, Homo sapiens; identical to SEQ ID NO: 753900

SEQ ID NO: 753902 - protein, 392 aa, Homo sapiens [sequence omitted]

SEQ ID NO: 753903 - protein, 620 aa, Homo sapiens [sequence omitted]

SEQ ID NO: 753904 - protein, 748 aa, Homo sapiens
MAPDSDPFPEGPLLKLLPLDARDRGTQRCRLGPAALHALGARLGSAVKISLPDGGSCLCTAWPRRDGADGFVQLDPLCASPGAAVGASRSRRSLSLNRLLLVPCPPLRRVAVWPVLRERAGAPGARNTAAVLEAAQELLRNRPISLGHVVVAPPGAPGLVAALHIVGGTPSPDPAGLVTPRTRVSLGGEPPSEAQPQPEVPLGGLSEAADSLRELLRLPLRYPRALTALGLAVPRGVLLAGPPGVGKTQLVQAVAREAGAELLAVSAPALQGSRPGETEENVRRVFQRARELASRGPSLLFLDEMDALCPQRGSRAPESRVVAQVLTLLDGASGDREVVVVGATNRPDALDPALRRPGRFDREVVIGTPTLKQRKEILQVITSKMPISSHVDLGLLAEMTVGYVGADLTALCREAAMHALLHSEKFQFDHKHLSLRWTSQLLSSQGGAHCYFRRGLLRCSYQQVMAEFRNNPGEVEGRKAKSMKGQTTGKNQDNPVIDEIDFLEAFKNIQPSSFRSVIGLMDIKPVDWEEIGGLEDVKLKLKQIFRQARASTPAILFLDEIDSILGARSASKTGCDVQERVLSVLLNELDGVGLKTIERRGSKSSQQEFQEVFNRSVMIIAATNRPDVLDTALLRPGRLDKIIYIPPPDHKGRLSILKVCTKTMPIGPDVSLENLAAETCFFSGADLRNLCTEAALLALQENGLDATTVKQEHFLKSLKTVKPSLSCKDLALYENLFKKEGFSNVEGI

SEQ ID NO: 753905 - protein, 753 aa, Homo sapiens
MAPDSDPFPEGPLLKLLPLDARDRGTQRCRLGPAALHALGARLGSAVKISLPDGGSCLCTAWPRRDGADGFVQLDPLCASPGAAVGASRSRRSLSLNRLLLVPCPPLRRVAVWPVLRERAGAPGARNTAAVLEAAQELLRNRPISLGHVVVAPPGAPGLVAALHIVGGTPSPDPAGLVTPRTRVSLGGEPPSEAQPQPEVPLGGLSEAADSLRELLRLPLRYPRALTALGLAVPRGVLLAGPPGVGKTQLVQAVAREAGAELLAVSAPALQGSRPGETEENVRRVFQRARELASRGPSLLFLDEMDALCPQRGSRAPESRVVAQVLTLLDGASGDREVVVVGATNRPDALDPALRRPGRFDREVVIGTPTLKQRKEILQVITSKMPISSHVDLGLLAEMTVGYVGADLTALCREAAMHALLHSEKNQDNPVIDEIDFLEAFKNIQPSSFRSVIGLMDIKPVDWEEIGGLEDVKLKLKQSIEWPLKFPWEFVRMGLTQPKGVLLYGPPGCAKTTLVRALATSCHCSFVSVSGADLFSPFVGDSEKVLSQIFRQARASTPAILFLDEIDSILGARSASKTGCDVQERVLSVLLNELDGVGLKTIERRGSKSSQQEFQEVFNRSVMIIAATNRPDVLDTALLRPGRLDKIIYIPPPDHKGRLSILKVCTKTMPIGPDVSLENLAAETCFFSGADLRNLCTEAALLALQENGLDATTVKQEHFLKSLKTVKPSLSCKDLALYENLFKKEGFSNVEGI

SEQ ID NO: 753906 - protein, 620 aa, Homo sapiens [sequence omitted]

SEQ ID NO: 753907 - protein, 818 aa, Homo sapiens
MAPDSDPFPEGPLLKLLPLDARDRGTQRCRLGPAALHALGARLGSAVKISLPDGGSCLCTAWPRRDGADGFVQLDPLCASPGAAVGASRSRRSLSLNRLLLVPCPPLRRVAVWPVLRERAGAPGARNTAAVLEAAQELLRNRPISLGHVVVAPPGAPGLVAALHIVGGTPSPDPAGLVTPRTRVSLGGEPPSEAQPQPEVPLGGLSEAADSLRELLRLPLRYPRALTALGLAVPRGVLLAGPPGVGKTQLVQAVAREAGAELLAVSAPALQGSRPGETEENVRRVFQRARELASRGPSLLFLDEMDALCPQRGSRAPESRVVAQVLTLLDGASGDREVVVVGATNRPDALDPALRRPGRFDREVVIGTPTLKQRKEILQVITSKMPISSHVDLGLLAEMTVGYVGADLTALCREAAMHALLHSEKFQFDHKHLSLRWTSQLLSSQGGAHCYFRRGLLRCSYQQVMAEFRNNPGEVEGRKAKSMKGQTTGKNQDNPVIDEIDFLEAFKNIQPSSFRSVIGLMDIKPVDWEEIGGLEDVKLKLKQSIEWPLKFPWEFVRMGLTQPKGVLLYGPPGCAKTTLVRALATSCHCSFVSVSGADLFSPFVGDSEKVLSQIFRQARASTPAILFLDEIDSILGARSASKTGCDVQERVLSVLLNELDGVGLKTIERRGSKSSQQEFQEVFNRSVMIIAATNRPDVLDTALLRPGRLDKIIYIPPPDHKGRLSILKVCTKTMPIGPDVSLENLAAETCFFSGADLRNLCTEAALLALQENGLDATTVKQEHFLKSLKTVKPSLSCKDLALYENLFKKEGFSNVEGI

SEQ ID NO: 753908 - protein, 53 aa, Homo sapiens
PAVARRCPKLTQDTELEVFGLLPNSVGCNAGVVASTGQVCLEDLQEDSVWGDV

SEQ ID NO: 753909 - protein, 110 aa, Homo sapiens
KVEVDLDQTQRERKMQNALGRGKVVPLWHPAHLQTLPVTPNKQKTDGRGTKPEASSHQGTPKQTTAQGAPKTSFIAAKGTQVVKISVHMGRVSLKQEPRKSHSPSSDTSK

SEQ ID NO: 753910 - protein, 207 aa, Homo sapiens
EPGFCAPLSRCEVLTRPSPCSPRRLGPHALGSKTHSEAPDPFLLSCDPLCETPKEAKDHSRCFIKMVTVSPRLGCWYLNIPLQRDPAPPNPIPQAAKTDLMPSFSGRIWRDIEGHGWRPRLAGFVVRKTEPRESPAPFCSQNLRGLVTGPGPRGIWRQRFLDVWGLTARLGATGFPGLRTLRFRGRALSSPLLDLRPNPSNFQHSSP

SEQ ID NO: 753911 - protein, 148 aa, Homo sapiens
MNFNPCCVSPNSLQTLFALGFCFSHSPHPRIPYPRLQSTDLMPSFSGRIWRDIEGHGWRPRLAGFVVRKTEPRESPAPFCSQNLRGLVTGPGPRGIWRQRFLDVWGLTARLGATGFPGLRTLRFRGRALSSPLLDLRPNPSNFQHSSP

SEQ ID NO: 753912 - protein, 269 aa, Homo sapiens
MEPWPLLLLFSLCSAGLVLGSEHETRLVAKLFKDYSSVVRPVEDHRQVVEVTVGLQLIQLINVDEVNQIVTTNVRLKQQWVDYNLKWNPDDYGGVKKIHIPSEKIWRPDLVLYNNADGDFAIVKFTKVLLQYTGHITWTPPAIFKSYCEIIVTHFPFDEQNCSMKLGTWTYDGSVVAINPESDQPDLSNFMESGEWVIKESRGWKHSVTYSCCPDTPYLDITYHFVMQRLPLYFIVNVIIPCLLFSFLTGLVFYLPTDSGGCGCHDCCC

SEQ ID NO: 753913 - protein, 457 aa, Homo sapiens
MEPWPLLLLFSLCSAGLVLGSEHETRLVAKLFKDYSSVVRPVEDHRQVVEVTVGLQLIQLINVDEVNQIVTTNVRLKQQWVDYNLKWNPDDYGGVKKIHIPSEKIWRPDLVLYNNADGDFAIVKFTKVLLQYTGHITWTPPAIFKSYCEIIVTHFPFDEQNCSMKLGTWTYDGSVVAINPESDQPDLSNFMESGEWVIKESRGWKHSVTYSCCPDTPYLDITYHFVMQRLPLYFIVNVIIPCLLFSFLTGLVFYLPTDSGEKMTLSISVLLSLTVFLLVIVELIPSTSSAVPLIGKYMLFTMVFVIASIIITVIVINTHHRSPSTHVMPNWVRKVFIDTIPNIMFFSTMKRPSREKQDKKIFTEDIDISDISGKPGPPPMGFHSPLIKHPEVKSAIEGIKYIAETMKSDQESNNAAAEWKYVAMVMDHILLGVFMLVCIIGTLAVFAGRLIELNQQG

SEQ ID NO: 753914 - protein, 457 aa, Homo sapiens; identical to SEQ ID NO: 753913

SEQ ID NO: 753915 - protein, 457 aa, Homo sapiens; identical to SEQ ID NO: 753913

SEQ ID NO: 753916 - protein, 482 aa, Homo sapiens
MEPWPLLLLFSLCSAGLVLGSEHETRLVAKLFKDYSSVVRPVEDHRQVVEVTVGLQLIQLINVDEVNQIVTTNVRLKQGDMVDLPRPSCVTLGVPLFSHLQNEQWVDYNLKWNPDDYGGVKKIHIPSEKIWRPDLVLYNNADGDFAIVKFTKVLLQYTGHITWTPPAIFKSYCEIIVTHFPFDEQNCSMKLGTWTYDGSVVAINPESDQPDLSNFMESGEWVIKESRGWKHSVTYSCCPDTPYLDITYHFVMQRLPLYFIVNVIIPCLLFSFLTGLVFYLPTDSGEKMTLSISVLLSLTVFLLVIVELIPSTSSAVPLIGKYMLFTMVFVIASIIITVIVINTHHRSPSTHVMPNWVRKVFIDTIPNIMFFSTMKRPSREKQDKKIFTEDIDISDISGKPGPPPMGFHSPLIKHPEVKSAIEGIKYIAETMKSDQESNNAAAEWKYVAMVMDHILLGVFMLVCIIGTLAVFAGRLIELNQQG

SEQ ID NO: 753917 - protein, 191 aa, Homo sapiens
QFCIDKVNISQNTMSLQFSNGSRHVCLRSGAGSVRPLNGGAGFAGSSACGGSVAGSEFSCALGGGLGSVPGGSHAGGALGNAACIGFAGSEGGLLSGNEKVTMQNLNDRLASYLDNVRALEEANAELERKIKGWYEKYGPGSCRGLDHDYSRYHLTIEDLKNKIISSTTTNANVILQIDNARLAADDFRLK

SEQ ID NO: 753918 - protein, 146 aa, Homo sapiens
HGGYTGSGPGFGEPRDSGAEVPSGSGRATGCERGGVRGARQGRAPGSSIWRKEPRMVCTRKTKTLVSTCVILSGMTNIICLLYVGWVTNYIASVYVRGQEPAPDKKLEEDKGDTLKIIERLDHLENVIKQHIQGYRRNFSLLNVSN

SEQ ID NO: 753919 - protein, 267 aa, Homo sapiens
VIVAQSGPALGEALPHVVPTLRACLQPSQDPQMRLKLFSILSTALLRATDTINSQGQFPSYLETVTKDILAPNLQWHAGRTAAAIRTAAVSCLWALTSSEVLSAEQIRDVQETLMPQVLTTLEEDSKMTRLISCRIINTFLKTSGGMTDPEKLIKIYPELLKRLDDVSNDVRMAAASTLVTWLQCVKGANAKSYYQSSVQYLYRELLVHLDDPERAIQDAILEVLKEGSGLFPDLLVRETEAVIHKHRSATYCEQLLQHVQAVPATQ

SEQ ID NO: 753920 - protein, 692 aa, Homo sapiens
GCRDAPQRMVAPGAALSDLSPAPSGSGRQHKAVAMAEAAAAAGGTGLGAGASYGSAADRDRDPDPDRAGRRLRVLSGHLLGRPREALSTNECKARRAASAATAAPTATPAAQESGTIPKKRQEVMKWNGWGYNDSKFIFNKKGQIELTGKRYPLSGMGLPTFKEWIQNTLGVNVEHKTTSKASLNPSDTPPSVVNEDFLHDLKETNISYSQEADDRVFRAHGHCLHEIFLLREGMFERIPDIVLWPTCHDDVVKIVNLACKYNLCIIPIGGGTSVSYGLMCPADETRTIISLDTSQMNRILWVDENNLTAHVEAGITGQELERQLKESGYCTGHEPDSLEFSTVGGWVSTRASGMKKNIYGNIEDLVVHIKMVTPRGIIEKSCQGPRMSTGPDIHHFIMGSEGTLGVITEATIKIRPVPEYQKYGSVAFPNFEQGVACLREIAKQRCAPASIRLMDNKQFQFGHALKPQVSSIFTSFLDGLKKFYITKFKGFDPNQLSVATLLFEGDREKVLQHEKQVYDIAAKFGGLAAGEDNGQRGYLLTYVIAYIRDLALEYYVLGESFETSAPWDRVVDLCRNVKERITRECKEKGVQFAPFSTCRVTQTYDAGACIYFYFAFNYRGISDPLTVFEQTEAAAREEILANGGSLSHHHGVGKLRKQWLKESISDVGFGMLKSVKEYVDPNNIFGNRNLL

SEQ ID NO: 753921 - protein, 692 aa, Homo sapiens; identical to SEQ ID NO: 753920

SEQ ID NO: 753922 - protein, 692 aa, Homo sapiens; identical to SEQ ID NO: 753920

SEQ ID NO: 753923 - protein, 91 aa, Homo sapiens
LVDLIDEVGSMTICCLRRHRFLSKRTNLPLESGVSDFKPGQSECTDPWPLGCTAFECKPAGIPDFSDHREVRDALQTTAHASGPVQEATVR

SEQ ID NO: 753924 - protein, 114 aa, Homo sapiens
CTFKKRRLNQSTCTNYDTPLWLNTGKPPARKDDPLHDPTKDKTNLIVYIICGVVAVMVLVGIFTKLGLEKAHRPQREHMSRLYDNLLFTEAQISFQEDEPAPGEWSVGLQTWTV

SEQ ID NO: 753925 - protein, 103 aa, Homo sapiens
KSADHLNGLLREVEATSAVLMEQIKLLKSEIRRLERNQEQEVSAANVEHLKNVLLQFIFLKPGSERERLLPVINTMLQLSLEEKGKLAAVAQGLQETSIPKKK

SEQ ID NO: 753926 - protein, 303 aa, Homo sapiens
AGWYRPGVRDRGLGARRRSVSPSGRLLSPMADFAGPSSAGRKAGAPRCSRKAAGTKQTSTLKQEDASKRKAELEAAVRKKIEFERKALHIVEQLLEENITEEFLMECGRFITPAHYSDVVDERSIVKLCGYPLCQKKLGIVPKQKYKISTKTNKVYDITERKSFCSNFCYQASKFFEAQIPKTPVWVREEERHPDFQLLKEEQHDSTFPLIDSSSQNQIRKRIVLEKLSKVLPGLLVPLQITLGDIYTQLKNLVRTFRLTNRNIIHKPAEWTLIAMVLLSLLTQFWITNILRNVWCSRSRTPS

SEQ ID NO: 753927 - protein, 504 aa, Homo sapiens
AGWYRPGVRDRGLGARRRSVSPSGRLLSPMADFAGPSSAGRKAGAPRCSRKAAGTKQTSTLKQEDASKRKAELEAAVRKKIEFERKALHIVEQLLEENITEEFLMECGRFITPAHYSDVVDERSIVKLCGYPLCQKKLGIVPKQKYKISTKTNKVYDITERKSFCSNFCYQASKFFEAQIPKTPVWVREEERHPDFQLLKEEQSGHSGEEVQLCSKAIKTSDIDNPSHFEKQYESSSSSTHSDSSSDNEQDFVSSILPGNRPNSTNIRPQLHQKSIMKKKAGHKANSKHKDKEQTVVDVTEQLGDCKLDSQEKDATCELPLQKVNTQSSSNSTLPERLKASENSESEYSRSEITLVGISKKSAEHFKRKFAKSNQVSRSVSSSVQVCPEVGKRNLLKVLKETLIEWKTEETLRFLYGQNYASVCLKPEASLVKEELDEDDIISDPDSHFPAWRESQNSLDESLPFRGSGTAIKPLPSYENLKKETEKLNLRIREFYRGRYVLGD

SEQ ID NO: 753928 - protein, 215 aa, Homo sapiens
  misc_feature (8)..(8): Xaa can be any naturally occurring amino acid
AVCTPGSXDIDEDDIISDPDSHFPAWRESQNSLDESLPFRGSGTAIKPLPSYENLKKETEKLNLRIREFYRGRYVLGEETTKSQDSEEHDSTFPLIDSSSQNQIRKRIVLEKLSKVLPGLLVPLQITLGDIYTQLKNLVRTFRLTNRNIIHKPAEWTLIAMVLLSLLTPILGIQKHSQEGMVFTRFLDTLLEELHLKNEDLESLTIIFRTSCLPE

SEQ ID NO: 753929 - protein, 574 aa, Homo sapiens
AGWYRPGVRDRGLGARRRSVSPSGRLLSPMADFAGPSSAGRKAGAPRCSRKAAGTKQTSTLKQEDASKRKAELEAAVRKKIEFERKALHIVEQLLEENITEEFLMECGRFITPAHYSDVVDERSIVKLCGYPLCQKKLGIVPKQKYKISTKTNKVYDITERKSFCSNFCYQASKFFEAQIPKTPVWVREEERHPDFQLLKEEQSGHSGEEVQLCSKAIKTSDIDNPSHFEKQYESSSSSTHSDSSSDNEQDFVSSILPGNRPNSTNIRPQLHQKSIMKKKAGHKANSKHKDKEQTVVDVTEQLGDCKLDSQEKDATCELPLQKVNTQSSSNSTLPERLKASENSESEYSRSEITLVGISKKSAEHFKRKFAKSNQVSRSVSSSVQVCPEVGKRNLLKVLKETLIEWKTEETLRFLYGQNYASVCLKPEASLVKEELDEDDIISDPDSHFPAWRESQNSLDESLPFRGSGTAIKPLPSYENLKKETEKLNLRIREFYRGRYVLGEETTKSQDSEEVCLTDIEFFQIVNIWKTHHSKSWSRKDIEELIVKFSNSFFSHSAFWFTVPSPLLALLFYK

SEQ ID NO: 753930 - protein, 641 aa, Homo sapiens
AGWYRPGVRDRGLGARRRSVSPSGRLLSPMADFAGPSSAGRKAGAPRCSRKAAGTKQTSTLKQEDASKRKAELEAAVRKKIEFERKALHIVEQLLEENITEEFLMECGRFITPAHYSDVVDERSIVKLCGYPLCQKKLGIVPKQKYKISTKTNKVYDITERKSFCSNFCYQASKFFEAQIPKTPVWVREEERHPDFQLLKEEQSGHSGEEVQLCSKAIKTSDIDNPSHFEKQYESSSSSTHSDSSSDNEQDFVSSILPGNRPNSTNIRPQLHQKSIMKKKAGHKANSKHKDKEQTVVDVTEQLGDCKLDSQEKDATCELPLQKVNTQSSSNSTLPERLKASENSESEYSRSEITLVGISKKSAEHFKRKFAKSNQVSRSVSSSVQVCPEVGKRNLLKVLKETLIEWKTEETLRFLYGQNYASVCLKPEASLVKEELDEDDIISDPDSHFPAWRESQNSLDESLPFRGSGTAIKPLPSYENLKKETEKLNLRIREFYRGRYVLGEETTKSQDSEEHDSTFPLIDSSSQNQIRKRIVLEKLSKVLPGLLVPLQITLGDIYTQLKNLVRTFRLTNRNIIHKPAEWTLIAMVLLSLLTPILGIQKHSQEGMVFTRFLDTLLEELHLKNEDLESLTIIFRTSCLPE

SEQ ID NO: 753931 - protein, 595 aa, Homo sapiens
AGWYRPGVRDRGLGARRRSVSPSGRLLSPMADFAGPSSAGRKAGAPRCSRKAAGTKQTSTLKQEDASKRKAELEAAVRKKIEFERKALHIVEQLLEENITEEFLMECGRFITPAHYSDVVDERSIVKLCGYPLCQKKLGIVPKQKYKISTKTNKVYDITERKSFCSNFCYQASKFFEAQIPKTPVWVREEERHPDFQLLKEEQSGHSGEEVQLCSKAIKTSDIDNPSHFEKQYESSSSSTHSDSSSDNEQDFVSSILPGNRPNSTNIRPQLHQKSIMKKKAGHKANSKHKDKEQTVVDVTEQLGDCKLDSQEKDATCELPLQKVNTQSSSNSTLPERLKASENSESEYSRSEITLVGISKKSAEHFKRKFAKSNQVSRSVSSSVQVCPEVGKRNLLKVLKETLIEWKTEETLRFLYGQNYASVCLKPEASLVKEELDEDDIISDPDSHFPAWRESQNSLDESLPFRGSGTAIKPLPSYENLKKETEKLNLRIREFYRGRYVLGEETTKSQDSEEHDSTFPLIDSSSQNQIRKRIVLEKLSKVLPGLLVPLQITLGDIYTQLKNLVRTFRLTNRNIIHKPAEWTLIAMVLLSLYIP

SEQ ID NO: 753932 - protein, 249 aa, Homo sapiens
DSRGPRRVSALIEWKTEETLRFLYGQNYASVCLKPEASLVKEELDEDDIISDPDSHFPAWRESQNSLDESLPFRGSGTAIKPLPSYENLKKETEKLNLRIREFYRGRYVLGEETTKSQDSEEHDSTFPLIDSSSQNQIRKRIVLEKLSKVLPGLLVPLQITLGDIYTQLKNLVRTFRLTNRNIIHKPAEWTLIAMVLLSLLTPILGIQKHSQEGMVFTRFLDTLLEELHLKNEDLESLTIIFRTSCLPE

SEQ ID NO: 753933 - protein, 104 aa, Homo sapiens
MRLFLSLPVLVVVLSIVLEAQAPAQGTPDVSSALDKLKEFGNTLEDKARELISRIKQSELSAKMREWFSETFQKVKEKLKIDYEDLKGDIQEGPLKFPTPQRLC

SEQ ID NO: 753934 - protein, 104 aa, Homo sapiens
MGKGSFKYAWVLDKLKAERERGITIDISLWKFETSKYYVTIIDAPGHRDFIKNMITGTSQADCAVLIVAAGVGEFEAGISKNGQTREHALLAYTLGVKQPNCRC

SEQ ID NO: 753935 - protein, 130 aa, Homo sapiens
MVVTFAPVNVTTEVKSVEMHHEALSEALPGDNVGFNVKNVSVKDVRRGNVAGDSKNDPPMEAAGFTAQKGDCFMPVISDLGNKRYAVGCHGSDTWTEISVKGGNRWIGYDTWTHRKENRKNGLPLLRSNW

SEQ ID NO: 753936 - protein, 114 aa, Homo sapiens
MSTKLVWVLFLLAEWRLLVLKPGMVSTWFSHVTGSTTANAMKLSEALRARAPMQEWLQEFAWTCGTQRPTGQGSRRDRNRKNDRVPGIHGNKAKKQNRGSQTHLEDSADDHKHK

SEQ ID NO: 753937 - protein, 104 aa, Homo sapiens; identical to SEQ ID NO: 753934

SEQ ID NO: 753938 - protein, 104 aa, Homo sapiens; identical to SEQ ID NO: 753934

SEQ ID NO: 753939 - protein, 187 aa, Homo sapiens
MVVTFAPVNVTTEVKSVEMHHEALSEALPGDNVGFNVKNVSVKDVRRGNVAGDSKNDPPMEAAGFTAQVIILNHPGQISAGYAPVLDCHTAHIACKFAELKEKIDRRSGKKLEDGPKFLKSGDAAIVDMVPGKPMCVESFSDYPPLGRFAVRDMRQTVAVGVIKAVDKKAAGAGKVTKSAQKAQKAK

SEQ ID NO: 753940 - protein, 187 aa, Homo sapiens; identical to SEQ ID NO: 753939

SEQ ID NO: 753941 - protein, 187 aa, Homo sapiens; identical to SEQ ID NO: 753939

SEQ ID NO: 753942 - protein, 187 aa, Homo sapiens; identical to SEQ ID NO: 753939

SEQ ID NO: 753943 - protein, 187 aa, Homo sapiens; identical to SEQ ID NO: 753939

SEQ ID NO: 753944 - protein, 187 aa, Homo sapiens; identical to SEQ ID NO: 753939

SEQ ID NO: 753945 - protein, 187 aa, Homo sapiens; identical to SEQ ID NO: 753939

SEQ ID NO: 753946 - protein, 187 aa, Homo sapiens; identical to SEQ ID NO: 753939

SEQ ID NO: 753947 - protein, 187 aa, Homo sapiens; identical to SEQ ID NO: 753939

SEQ ID NO: 753948 - protein, 187 aa, Homo sapiens; identical to SEQ ID NO: 753939

SEQ ID NO: 753949 - protein, 187 aa, Homo sapiens; identical to SEQ ID NO: 753939

SEQ ID NO: 753950 - protein, 187 aa, Homo sapiens; identical to SEQ ID NO: 753939

SEQ ID NO: 753951 - protein, 104 aa, Homo sapiens; identical to SEQ ID NO: 753934

SEQ ID NO: 753952 - protein, 104 aa, Homo sapiens; identical to SEQ ID NO: 753934

SEQ ID NO: 753953 - protein, 104 aa, Homo sapiens; identical to SEQ ID NO: 753934

SEQ ID NO: 753954 - protein, 104 aa, Homo sapiens; identical to SEQ ID NO: 753934

SEQ ID NO: 753955 - protein, 104 aa, Homo sapiens; identical to SEQ ID NO: 753934

SEQ ID NO: 753956 - protein, 104 aa, Homo sapiens; identical to SEQ ID NO: 753934

SEQ ID NO: 753957 - protein, 104 aa, Homo sapiens; identical to SEQ ID NO: 753934

SEQ ID NO: 753958 - protein, 104 aa, Homo sapiens; identical to SEQ ID NO: 753934

SEQ ID NO: 753959 - protein, 117 aa, Homo sapiens
MGNKSTPLRGLGKWPSWGTNSLPFDRALGPGILTTKLRPERTVRSDEGGRNCVEENMRGVRFDVHDVTLHADAIHRGGGQIIPTARGCLYASVLTAQTRLMEPIYLVEIQCPEPGGP

SEQ ID NO: 753960 - protein, 104 aa, Homo sapiens; identical to SEQ ID NO: 753934

SEQ ID NO: 753961 - protein, 187 aa, Homo sapiens; identical to SEQ ID NO: 753939

SEQ ID NO: 753962 - protein, 187 aa, Homo sapiens; identical to SEQ ID NO: 753939

SEQ ID NO: 753963 - protein, 187 aa, Homo sapiens; identical to SEQ ID NO: 753939

SEQ ID NO: 753964 - protein, 187 aa, Homo sapiens; identical to SEQ ID NO: 753939

SEQ ID NO: 753965 - protein, 187 aa, Homo sapiens; identical to SEQ ID NO: 753939

SEQ ID NO: 753966 - protein, 187 aa, Homo sapiens; identical to SEQ ID NO: 753939

SEQ ID NO: 753967 - protein, 187 aa, Homo sapiens; identical to SEQ ID NO: 753939

SEQ ID NO: 753968 - protein, 187 aa, Homo sapiens; identical to SEQ ID NO: 753939

SEQ ID NO: 753969 - protein, 187 aa, Homo sapiens; identical to SEQ ID NO: 753939

SEQ ID NO: 753970 - protein, 187 aa, Homo sapiens; identical to SEQ ID NO: 753939

SEQ ID NO: 753971 - protein, 104 aa, Homo sapiens; identical to SEQ ID NO: 753934

SEQ ID NO: 753972 - protein, 104 aa, Homo sapiens; identical to SEQ ID NO: 753934

SEQ ID NO: 753973 - protein, 219 aa, Homo sapiens
CQLDELVVDAYKIGGIGTVPVGRVETGVLKPGMVVTFAPVNVTTEVKSVEMHHEALSEALPGDNVGFNVKNVSVKDVRRGNVAGDSKNDPPMEAAGFTAQVIILNHPGQISAGYAPVLDCHTAHIACKFAELKEKIDRRSGKKLEDGPKFLKSGDAAIVDMVPGKPMCVESFSDYPPLGRFAVRDMRQTVAVGVIKAVDKKAAGAGKVTKSAQKAQKAK

SEQ ID NO: 753974 - protein, 104 aa, Homo sapiens; identical to SEQ ID NO: 753934

SEQ ID NO: 753975 - protein, 104 aa, Homo sapiens; identical to SEQ ID NO: 753934

SEQ ID NO: 753976 - protein, 171 aa, Homo sapiens [sequence omitted]

SEQ ID NO: 753977 - protein, 830 aa, Homo sapiens
ASPEGGGERRGLAGSGGGGAGQRGRGGVPGPPPASSHRGPFRSLHRTPLGPQAAGAVATQVSPAVPLPPRRPSGMDSGRDFLTLHGLQDDEDLQALLKGSQLLKVKSSSWRRERFYKLQEDCKTIWQESRKVMRTPESQLFSIEDIQEVRMGHRTEGLEKFARDVPEDRCFSIVFKDQRNTLDLIAPSPADAQHWVLGLHKIIHHSGSMDQRQKLQHWIHSCLRKADKNKDNKMSFKELQNFLKELNIQVDDSYARKIFRECDHSQTDSLEDEEIEAFYKMLTQRVEIDRTFAEAAGSGETLSVDQLVTFLQHQQREEAAGPALALSLIERYEPSETAKAQRQMTKDGFLMYLLSADGSAFSLAHRRVYQDMGQPLSHYLVSSSHNTYLLEDQLAGPSSTEAYIRALCKGCRCLELDCWDGPNQEPIIYHGYTFTSKILFCDVLRAIRDYAFKASPYPVILSLENHCTLEQQRVMARHLHAILGPMLLNRPLDGVTNSLPSPEQLKGKILLKGKKLGGLLPPGGEGGPEATVVSDEDEAAEMEDEAVRSRVQHKPKEDKLRLAQELSDMVIYCKSVHFGGFSSPGTPGQAFYEMASFSENRALRLLQESGNGFVRHNVGHLSRIYPAGWRTDSSNYSPVEMWNGGCQIVALNFQTPGPEMDVYQGRFQDNGACGYVLKPAFLRDPNGTFNPRALAQGPWWARKRLNIRVISGQQLPKVNKNKNSIVDPKVTVEIHGVSRDVASRQTAVITNNGFNPWWDTEFAFEVVVPDLALIRFLVEDYDASSKNDFIGQSTIPLNSLKQGYRHVHLMSKNGDQHPSATLFVKISLQD

SEQ ID NO: 753978 - protein, 817 aa, Homo sapiens
PSKGDSSAPRTRAEGVVSIKHWRRHCPGPGSAQAGALWRAMQCLGIRSRSRSRELYLQERSLKVAALNGRRLGLQDDEDLQALLKGSQLLKVKSSSWRRERFYKLQEDCKTIWQESRKVMRTPESQLFSIEDIQEVRMGHRTEGLEKFARDVPEDRCFSIVFKDQRNTLDLIAPSPADAQHWVLGLHKIIHHSGSMDQRQKLQHWIHSCLRKADKNKDNKMSFKELQNFLKELNIQVDDSYARKIFRECDHSQTDSLEDEEIEAFYKMLTQRVEIDRTFAEAAGSGETLSVDQLVTFLQHQQREEAAGPALALSLIERYEPSETAKAQRQMTKDGFLMYLLSADGSAFSLAHRRVYQDMGQPLSHYLVSSSHNTYLLEDQLAGPSSTEAYIRALCKGCRCLELDCWDGPNQEPIIYHGYTFTSKILFCDVLRAIRDYAFKASPYPVILSLENHCTLEQQRVMARHLHAILGPMLLNRPLDGVTNSLPSPEQLKGKILLKGKKLGGLLPPGGEGGPEATVVSDEDEAAEMEDEAVRSRVQHKPKEDKLRLAQELSDMVIYCKSVHFGGFSSPGTPGQAFYEMASFSENRALRLLQESGNGFVRHNVGHLSRIYPAGWRTDSSNYSPVEMWNGGCQIVALNFQTPGPEMDVYQGRFQDNGACGYVLKPAFLRDPNGTFNPRALAQGPWWARKRLNIRVISGQQLPKVNKNKNSIVDPKVTVEIHGVSRDVASRQTAVITNNGFNPWWDTEFAFEVVVPDLALIRFLVEDYDASSKNDFIGQSTIPLNSLKQGYRHVHLMSKNGDQHPSATLFVKISLQD

SEQ ID NO: 753979 - protein, 842 aa, Homo sapiens
PSKGDSSAPRTRAEGVVSIKHWRRHCPGPGSAQAGALWRAMQCLGIRSRSRSRELYLQERSLKVAALNGRRLGLQDDEDLQALLKGSQLLKVKSSSWRRERFYKLQEDCKTIWQESRKVMRTPESQLFSIEDIQEVRMGHRTEGLEKFARDVPEDRCFSIVFKDQRNTLDLIAPSPADAQHWVLGLHKIIHHSGSMDQRQKLQHWIHSCLRKADKNKDNKMSFKELQNFLKELNIQVDDSYARKIFRECDHSQTDSLEDEEIEAFYKMLTQRVEIDRTFAEAAGSGETLSVDQLVTFLQHQQREEAAGPALALSLIERYEPSETAKAQRQMTKDGFLMYLLSADGSAFSLAHRRVYQDMGQPLSHYLVSSSHNTYLLEDQLAGPSSTEAYIRALCKGCRCLELDCWDGPNQEPIIYHGYTFTSKILFCDVLRAIRDYAFKVGVPWQVRSGMLGVAHHSKCPLGLQASPYPVILSLENHCTLEQQRVMARHLHAILGPMLLNRPLDGVTNSLPSPEQLKGKILLKGKKLGGLLPPGGEGGPEATVVSDEDEAAEMEDEAVRSRVQHKPKEDKLRLAQELSDMVIYCKSVHFGGFSSPGTPGQAFYEMASFSENRALRLLQESGNGFVRHNVGHLSRIYPAGWRTDSSNYSPVEMWNGGCQIVALNFQTPGPEMDVYQGRFQDNGACGYVLKPAFLRDPNGTFNPRALAQGPWWARKRLNIRVISGQQLPKVNKNKNSIVDPKVTVEIHGVSRDVASRQTAVITNNGFNPWWDTEFAFEVVVPDLALIRFLVEDYDASSKNDFIGQSTIPLNSLKQGYRHVHLMSKNGDQHPSATLFVKISLQD

SEQ ID NO: 753980 - protein, 56 aa, Homo sapiens
MVPVPLGFNPWWDTEFAFEVVVPDLALIRFLVEDYDASSKNDFIGQSTIPLNSLKQ

SEQ ID NO: 753981 - protein, 739 aa, Homo sapiens
MPGKMVVILGASNILWIMFAASQAFKIETTPESRYLAQIGDSVSLTCSTTGCESPFFSWRTQIDSPLNGKVTNEGTTSTLTMNPVSFGNEHSYLCTATCESRKLEKGIQVEIYSFPKDPEIHLSGPLEAGKPITVKCSVADVYPFDRLEIDLLKGDHLMKSQEFLEDADRKSLETKSLEVTFTPVIEDIGKVLVCRAKLHIDEMDSVPTVRQAVKELQVYISPKNTVISVNPSTKLQEGGSVTMTCSSEGLPAPEIFWSKKLDNGNLQHLSGNATLTLIAMRMEDSGIYVCEGVNLIGKNRKEVELIVQEKPFTVEISPGPRIAAQIGDSVMLTCSVMGCESPSFSWRTQIDSPLSGKVRSEGTNSTLTLSPVSFENEHSYLCTVTCGHKKLEKGIQVELYSFPRDPEIEMSGGLVNGSSVTVSCKVPSVYPLDRLEIELLKGETILENIEFLEDTDMKSLENKSLEMTFIPTIEDTGKALVCQAKLHIDDMEFEPKQRQSTQTLYVNVAPRDTTVLVSPSSILEEGSSVNMTCLSQGFPAPKILWSRQLPNGELQPLSENATLTLISTKMEDSGVYLCEGINQAGRSRKEVELIIQVTPKDIKLTAFPSESVKEGDTVIISCTCGNVPETWIILKKKAETGDTVLKSIDGAYTIRKAQLKDAGVYECESKNKVGSQLRSLTLDVQGRENNKDYFSPELLVLYFASSLIIPAIGMIIYFARKANMKGSYSLVEAQKSKV

SEQ ID NO: 753982 - protein, 739 aa, Homo sapiens; identical to SEQ ID NO: 753981

SEQ ID NO: 753983 - protein, 647 aa, Homo sapiens
MPGKMVVILGASNILWIMFAASQAFKIETTPESRYLAQIGDSVSLTCSTTGCESPFFSWRTQIDSPLNGKVTNEGTTSTLTMNPVSFGNEHSYLCTATCESRKLEKGIQVEIYSFPKDPEIHLSGPLEAGKPITVKCSVADVYPFDRLEIDLLKGDHLMKSQEFLEDADRKSLETKSLEVTFTPVIEDIGKVLVCRAKLHIDEMDSVPTVRQAVKELQVYISPKNTVISVNPSTKLQEGGSVTMTCSSEGLPAPEIFWSKKLDNGNLQHLSGNATLTLIAMRMEDSGIYVCEGVNLIGKNRKEVELIVQAFPRDPEIEMSGGLVNGSSVTVSCKVPSVYPLDRLEIELLKGETILENIEFLEDTDMKSLENKSLEMTFIPTIEDTGKALVCQAKLHIDDMEFEPKQRQSTQTLYVNVAPRDTTVLVSPSSILEEGSSVNMTCLSQGFPAPKILWSRQLPNGELQPLSENATLTLISTKMEDSGVYLCEGINQAGRSRKEVELIIQVTPKDIKLTAFPSESVKEGDTVIISCTCGNVPETWIILKKKAETGDTVLKSIDGAYTIRKAQLKDAGVYECESKNKVGSQLRSLTLDVQGRENNKDYFSPELLVLYFASSLIIPAIGMIIYFARKANMKGSYSLVEAQKSKV

SEQ ID NO: 753984 - protein, 678 aa, Homo sapiens
MPGKMVVILGASNILWIMFAASQAFKIETTPESRYLAQIGDSVSLTCSTTGCESPFFSWRTQIDSPLNGKVTNEGTTSTLTMNPVSFGNEHSYLCTATCESRKLEKGIQVEIYSFPKDPEIHLSGPLEAGKPITVKCSVADVYPFDRLEIDLLKGDHLMKSQEFLEDADRKSLETKSLEVTFTPVIEDIGKVLVCRAKLHIDEMDSVPTVRQAVKELQVYISPKNTVISVNPSTKLQEGGSVTMTCSSEGLPAPEIFWSKKLDNGNLQHLSGNATLTLIAMRMEDSGIYVCEGVNLIGKNRKEVELIVQEKPFTVEISPGPRIAAQIGDSVMLTCSVMGCESPSFSWRTQIDSPLSGKVRSEGTNSTLTLSPVSFENEHSYLCTVTCGHKKLEKGIQVELYSFPRDPEIEMSGGLVNGSSVTVSCKVPSVYPLDRLEIELLKGETILENIEFLEDTDMKSLENKSLEMTFIPTIEDTGKALVCQAKLHIDDMEFEPKQRQSTQTLYVNVAPRDTTVLVSPSSILEEGSSVNMTCLSQGFPAPKILWSRQLPNGELQPLSENATLTLISTKMEDSGVYLCEGINQAGRSRKEVELIIQVTPKDIKLTAFPSESVKEGDTVIISCTCGNVPETWIILKKKAETGDTVLKSIDGAYTIRKAQLKDAGVYECESKNKVGSHL

SEQ ID NO: 753985 - protein, 122 aa, Homo sapiens
  misc_feature (11)..(13): Xaa can be any naturally occurring amino acid
GAMKVKAGAPXXXRFPRPLQSRASSAASVTAALPTPAELEVLSSLLLSGVFKGGGQGMGPEVLRLRGGGQGPSTSLHQEGKGLWGQVAAIPHQEIQGHRFFPTPLNSGPSHPQTSKSHFCDM

SEQ ID NO: 753986 - protein, 402 aa, Homo sapiens
SRSRYRRPAGRRLLSRVEAAEPEPGEGAAAVSRTTAAPAAPHRNKETSAGPVAVMGKDYYKILGIPSGANEDEIKKAYRKMALKYHPDKNKEPNAEEKFKEIAEAYDVLSDPKKRGLYDQYGEEGLKTGGGTSGGSSGSFHYTFHGDPHATFASFFGGSNPFDIFFASSRSTRPFSGFDPDDMDVDEDEDPFGAFGRFGFNGLSRGPRRAPEPLYPRRKVQDPPVVHELRVSLEEIYHGSTKRMKITRRRLNPDGRTVRTEDKILHIVIKRGWKEGTKITFPKEGDATPDNIPADIVFVLKDKPHAHFRRDGTNVLYSALISLKEALCGCTVNIPTIDGRVIPLPCNDVIKPGTVKRLRGEGLPFPKVPTQRGDLIVEFKVRFPDRLTPQTRQILKQHLPCS

SEQ ID NO: 753987 - protein, 478 aa, Homo sapiens
SRSRYRRPAGRRLLSRVEAAEPEPGEGAAAVSRTTAAPAAPHRNKETSAGPVAVMGKDYYKILGIPSGANEDEIKKAYRKMALKYHPDKNKEPNAEEKFKEIAEAYDVLSDPKKRGLYDQYGEEGLKTGGGTSGGSSGSFHYTFHGDPHATFASFFGGSNPFDIFFASSRSTRPFSGFDPDDMDVDEDEDPFGAFGRFGFNGLSRGPRRAPEPLYPRRKVQDPPVVHELRVSLEEIYHGSTKRMKITRRRLNPDGRTVRTEDKILHIVIKRGWKEGTKITFPKEGDATPDNIPADIVFVLKDKPHAHFRRDGTNVLYSALISLKEALCGCTVNIPTIDGRVIPLPCNDVIKPGTVKRLRGEGLPFPKVPTQRGDLIVEFKVRFPDRLTPQTRQILKHNTPNTHSTQCAPSLMSTGHWQLFLKCKKKPLVFRKMFLSLTPFRAGLPGGSGREVGRASPGQGSMFMSLAFNPVSTAVAGE

SEQ ID NO: 753988 - protein, 450 aa, Homo sapiens
PGPAIGGRRAGDSCPGWRRRSRSRGRGQRLSHGPRRRPQLLTAAPPLQARGAFRSFPHSWGEDFLASLMFKIQLEPLKLRAWTLNGFVKFRNKETSAGPVAVMGKDYYKILGIPSGANEDEIKKAYRKMALKYHPDKNKEPNAEEKFKEIAEAYDVLSDPKKRGLYDQYGEEGLKTGGGTSGGSSGSFHYTFHGDPHATFASFFGGSNPFDIFFASSRSTRPFSGFDPDDMDVDEDEDPFGAFGRFGFNGLSRGPRRAPEPLYPRRKVQDPPVVHELRVSLEEIYHGSTKRMKITRRRLNPDGRTVRTEDKILHIVIKRGWKEGTKITFPKEGDATPDNIPADIVFVLKDKPHAHFRRDGTNVLYSALISLKEALCGCTVNIPTIDGRVIPLPCNDVIKPGTVKRLRGEGLPFPKVPTQRGDLIVEFKVRFPDRLTPQTRQILKQHLPCS

SEQ ID NO: 753989 - protein, 420 aa, Homo sapiens
MFKRTVLSCPPPAAPPLQARGAFRSFPHSWGEDFLASLMFKIQLEPLKLRAWTLNGFVKFRNKETSAGPVAVMGKDYYKILGIPSGANEDEIKKAYRKMALKYHPDKNKEPNAEEKFKEIAEAYDVLSDPKKRGLYDQYGEEGLKTGGGTSGGSSGSFHYTFHGDPHATFASFFGGSNPFDIFFASSRSTRPFSGFDPDDMDVDEDEDPFGAFGRFGFNGLSRGPRRAPEPLYPRRKVQDPPVVHELRVSLEEIYHGSTKRMKITRRRLNPDGRTVRTEDKILHIVIKRGWKEGTKITFPKEGDATPDNIPADIVFVLKDKPHAHFRRDGTNVLYSALISLKEALCGCTVNIPTIDGRVIPLPCNDVIKPGTVKRLRGEGLPFPKVPTQRGDLIVEFKVRFPDRLTPQTRQILKQHLPCS

SEQ ID NO: 753990 - protein, 450 aa, Homo sapiens; identical to SEQ ID NO: 753988

SEQ ID NO: 753991 - protein, 439 aa, Homo sapiens
PVPLSAAGGQATPVPGGGGGAGAGGGGSGCLTDHGGARSSSPVRHLLRQTGLAGHAPLRVQGGGFQSCSTSGRLRWSDQRNKETSAGPVAVMGKDYYKILGIPSGANEDEIKKAYRKMALKYHPDKNKEPNAEEKFKEIAEAYDVLSDPKKRGLYDQYGEEGLKTGGGTSGGSSGSFHYTFHGDPHATFASFFGGSNPFDIFFASSRSTRPFSGFDPDDMDVDEDEDPFGAFGRFGFNGLSRGPRRAPEPLYPRRKVQDPPVVHELRVSLEEIYHGSTKRMKITRRRLNPDGRTVRTEDKILHIVIKRGWKEGTKITFPKEGDATPDNIPADIVFVLKDKPHAHFRRDGTNVLYSALISLKEALCGCTVNIPTIDGRVIPLPCNDVIKPGTVKRLRGEGLPFPKVPTQRGDLIVEFKVRFPDRLTPQTRQILKQHLPCS

SEQ ID NO: 753992 - protein, 348 aa, Homo sapiens
MGKDYYKILGIPSGANEDEIKKAYRKMALKYHPDKNKEPNAEEKFKEIAEAYDVLSDPKKRGLYDQYGEEGLKTGGGTSGGSSGSFHYTFHGDPHATFASFFGGSNPFDIFFASSRSTRPFSGFDPDDMDVDEDEDPFGAFGRFGFNGLSRGPRRAPEPLYPRRKVQDPPVVHELRVSLEEIYHGSTKRMKITRRRLNPDGRTVRTEDKILHIVIKRGWKEGTKITFPKEGDATPDNIPADIVFVLKDKPHAHFRRDGTNVLYSALISLKEALCGCTVNIPTIDGRVIPLPCNDVIKPGTVKRLRGEGLPFPKVPTQRGDLIVEFKVRFPDRLTPQTRQILKQHLPCS

SEQ ID NO: 753993 - protein, 220 aa, Homo sapiens
MDVDEDEDPFGAFGRFGFNGLSRGPRRAPEPLYPRRKVQDPPVVHELRVSLEEIYHGSTKRMKITRRRLNPDGRTVRTEDKILHIVIKRGWKEGTKITFPKEGDATPDNIPADIVFVLKDKPHAHFRRDGTNVLYSALISLKEALCGCTVNIPTIDGRVIPLPCNDVIKPGTVKRLRGEGLPFPKVPTQRGDLIVEFKVRFPDRLTPQTRQILKQHLPCS

SEQ ID NO: 753994 - protein, 318 aa, Homo sapiens
SRSRYRRPAGRRLLSRVEAAEPEPGEGAAAVSRTTAAPAAPHRNKETSAGPVAVMGKDYYKILGIPSGANEDEIKKAYRKMALKYHPDKNKEPNAEEKFKEIAEAYDVLSDPKKRGLYDQYGEEGLKTGGGTSGGSSGSFHYTFHGDPHATFASFFGGSNPFDIFFASSRSTRPFSGFDPDDMDVDEDEDPFGAFGRFGFNGLSRGPRRAPEPLYPRRKVQDPPVVHELRVSLEEIYHGSTKRMKITRRRLNPDGRTVRTEDKILHIVIKRGWKEGTKITFPKEGDATHQPPRFSPPPEPRDGVGVEVLFYALNEPPA

SEQ ID NO: 753995 - protein, 111 aa, Homo sapiens
TFHLTSRANPLSLVPGREGLSSYAPTLHEAGGSWAWQTPRSTWGAEDSPQRQGCWTEGRRDAEPTPGQCPHLAYDLATSTKVAVGHGPGPWVTRHSAPPHSPASSAAMSGR

SEQ ID NO: 753996 - protein, 968 aa, Homo sapiens
DNHSPAVVTTTVSSKKQPSVLVTFPKEERKSVSGKASIKLSETISEGTSNSLSTCTKSGPSPLSSPNGKLTVASPKRGQKREEGWKEVVRRSKKVSVPSTVISRVIGRGGCNINAIREFTGAHIDIDKQKDKTGDRIITIRGGTESTRQATQLINALIKDPDKEIDELIPKNLFEKLLSKFQNRVISTYHHCCYTSLMGIKMTTVALSSTSQTATALTVPAISSASTHKTIKNPVNNVRPGFPVSLPLAYPPPQFAHALLAAQTFQQIRPPRLPMTHFGGTFPPAQSTWGPFPVRPLSPARATNSPKPHMVPRHSNQNSSGSQVNSAGSLTSSPTTTTSSSASTVPGTSTNGSPSSPSVRRQLFVTVVKTSNATTTTVTTTASNNNTAPTNATYPMPTAKEHYPVSSPSSPSPPAQPGGVSRNSPLDCGSASPNKVASSSEQEAGSPPVVETTNTRPPNSSSSSGSSSAHSNQQQPPGSVSQEPRPPLQQSQVPPPEVRMTVPPLATSSAPVAVPSTAPVTYPMPQTPMGCPQPTPKMETPAIRPPPHGTTAPHKNSASVQNSSVAVLSVNHIKRPHSVPSSVQLPSTLSTQSACQNSVHPANKPIAPNFSAPLPFGPFSTLFENSPTSAHAFWGGSVVSSQSTPESMLSGKSSYLPNSDPLHQSDTSKAPGFRPPLQRPAPSPSGIVNMDSPYGSVTPSSTHLGNFASNISGGQMYGPGAPLGGAPAAANFNRQHFSPLSLLTPCSSASNDSSAQSVSSGVRAPSPAPSSVPLGSEKPSNVSQDRKVPVPIGTERSARIRQTGTSAPSVIGSNLSTSVGHSGIWSFEGIGGNQDKVDWCNPGMGNPMIHRPMSDPGVFSQHQAMERDSTGIVTPSGTFHQHVPAGYMDFPKVGGMPFSVYGNAMIPPVAPIPDGAGGPIFNGPHAADPSWNSLIKMVSSSTENNGPQTVWTGPWAPHMNSVHMNQLG

SEQ ID NO: 753997 - protein, 609 aa, Homo sapiens
DNHSPAVVTTTVSSKKQPSVLVTFPKEERKSVSGKASIKLSETISEGTSNSLSTCTKSGPSPLSSPNGKLTVASPKRGQKREEGWKEVVRRSKKVSVPSTVISRVIGRGGCNINAIREFTGAHIDIDKQKDKTGDRIITIRGGTESTRQATQLINALIKDPDKEIDELIPKNLFEKLLSKFQNRVISTYHHCCYTSLMGIKMTTVALSSTSQTATALTVPAISSASTHKTIKNPVNNVRPGFPVSLPLAYPPPQFAHALLAAQTFQQIRPPRLPMTHFGGTFPPAQSTWGPFPVRPLSPARATNSPKPHMVPRHSNQNSSGSQVNSAGSLTSSPTTTTSSSASTVPGTSTNGSPSSPSVRRQLFVTVVKTSNATTTTVTTTASNNNTAPTNATYPMPTAKEHYPVSSPSSPSPPAQPGGVSRNSPLDCGSASPNKVASSSEQEAGSPPVVETTNTRPPNSSSSSGSSSAHSNQQQPPGSVSQEPRPPLQQSQVPPPEVRMTVPPLATSSAPVAVPSTAPVTYPMPQTPMGCPQPTPKMETPAIRPPPHGTTAPHKNSASVQNSSVAVLSVNHIKRPHSVPSSVQLPSTLSTQSACQNSVHPQFVYISRT

SEQ ID NO: 753998 - protein, 279 aa, Homo sapiens
MDSPYGSVTPSSTHLGNFASNISGGQMYGPGAPLGGAPAAANFNRQHFSPLSLLTPCSSASNDSSAQSVSSGVRAPSPAPSSVPLGSEKPSNVSQDRKVPVPIGTERSARIRQTGTSAPSVIGSNLSTSVGHSGIWSFEGIGGNQDKVDWCNPGMGNPMIHRPMSDPGVFSQHQAMERDSTGIVTPSGTFHQHVPAGYMDFPKVGGMPFSVYGNAMIPPVAPIPDGAGGPIFNGPHAADPSWNSLIKMVSSSTENNGPQTVWTGPWAPHMNSVHMNQLG

SEQ ID NO: 753999 - protein, 421 aa, Homo sapiens
DNHSPAVVTTTVSSKKQPSVLVTFPKEERKSVSGKASIKLSETISEGTSNSLSTCTKSGPSPLSSPNGKLTVASPKRGQKREEGWKEVVRRSKKVSVPSTVISRVIGRGGCNINAIREFTGAHIDIDKQKDKTGDLDNRIVNMDSPYGSVTPSSTHLGNFASNISGGQMYGPGAPLGGAPAAANFNRQHFSPLSLLTPCSSASNDSSAQSVSSGVRAPSPAPSSVPLGSEKPSNVSQDRKVPVPIGTERSARIRQTGTSAPSVIGSNLSTSVGHSGIWSFEGIGGNQDKVDWCNPGMGNPMIHRPMSDPGVFSQHQAMERDSTGIVTPSGTFHQHVPAGYMDFPKVGGMPFSVYGNAMIPPVAPIPDGAGGPIFNGPHAADPSWNSLIKMVSSSTENNGPQTVWTGPWAPHMNSVHMNQLG

SEQ ID NO: 754000 - protein, 90 aa, Homo sapiens
  misc_feature (6)..(6): Xaa can be any naturally occurring amino acid
  misc_feature (9)..(9): Xaa can be any naturally occurring amino acid
PPLGGXRLXMDFPKVGGMPFSVYGNAMIPPVAPIPDGAGGPIFNGPHAADPSWNSLIKMVSSSTENNGPQTVWTGPWAPHMNSVHMNQLG

SEQ ID NO: 754001 - protein, 763 aa, Homo sapiens
DNHSPAVVTTTVSSKKQPSVLVTFPKEERKSVSGKASIKLSETISEGTSNSLSTCTKSGPSPLSSPNGKLTVASPKRGQKREEGWKEVVRRSKKVSVPSTVISRVIGRGGCNINAIREFTGAHIDIDKQKDKTGDRIITIRGGTESTRQATQLINALIKDPDKEIDELIPKNLFEKLLSKFQNRVISTYHHCCYTSLMGIKMTTVALSSTSQTATALTVPAISSASTHKTIKNPVNNVRPGFPVSLPLAYPPPQFAHALLAAQTFQQIRPPRLPMTHFGGTFPPAQSTWGPFPVRPLSPARATNSPKPHMVPRHSNQNSSGSQVNSAGSLTSSPTTTTSSSASTVPGTSTNGSPSSPSVRRQLFVTVVKTSNATTTTVTTTASNNNTAPTNATYPMPTAKEHYPVSSPSSPSPPAQPGGVSRNSPLDCGSASPNKVASSSEQEAGSPPVVETTNTRPPNSSSSSGSSSAHSNQQQPPGSVSQEPRPPLQQSQVPPPEVRMTVPPLATSSAPVAVPSTAPVTYPMPQTPMGCPQPTPKMETPAIRPPPHGTTAPHKNSASVQNSSVAVLSVNHIKRPHSVPSSVQLPSTLSTQSACQNSVHPANKPIAPNFSAPLPFGPFSTLFENSPTSAHAFWGGSVVSSQSTPESMLSGKSSYLPNSDPLHQSDTSKAPGFRPPLQRPAPSPSGIVNMDSPYGSVTPSSTHLGNFASNISGGQMYGPGAPLGGAPAAANFNRQHFSPLSLLTPCSSASNGVALNQQDKQLN

SEQ ID NO: 754002 - protein, 706 aa, Homo sapiens
DNHSPAVVTTTVSSKKQPSVLVTFPKEERKSVSGKASIKLSETISEGTSNSLSTCTKSGPSPLSSPNGKLTVASPKRGQKREEGWKEVVRRSKKVSVPSTVISRVIGRGGCNINAIREFTGAHIDIDKQKDKTGDRIITIRGGTESTRQATQLINALIKDPDKEIDELIPKNLFEKLLSKFQNRVISTYHHCCYTSLMGIKMTTVALSSTSQTATALTVPAISSASTHKTIKNPVNNVRPGFPVSLPLAYPPPQFAHALLAAQTFQQIRPPRLPMTHFGGTFPPAQSTWGPFPVRPLSPARATNSPKPHMVPRHSNQNSSGSQVNSAGSLTSSPTTTTSSSASTVPGTSTNGSPSSPSVRRQLFVTVVKTSNATTTTVTTTASNNNTAPTNATYPMPTAKEHYPVSSPSSPSPPAQPGGVSRNSPLDCGSASPNKVASSSEQEAGSPPVVETTNTRPPNSSSSSGSSSAHSNQQQPPGSVSQEPRPPLQQSQVPPPEVRMTVPPLATSSAPVAVPSTAPVTYPMPQTPMGCPQPTPKMETPAIRPPPHGTTAPHKNSASVQNSSVAVLSVNHIKRPHSVPSSVQLPSTLSTQSACQNSVHPANKPIAPNFSAPLPFGPFSTLFENSPTSAHAFWGGSVVSSQSTPESMLSGKSSYLPNSDPLHQSDTSKAPGFRPPLQRPAPSPSEFQMYGLATLERRRKRYTLES

SEQ ID NO: 754003 - protein, 968 aa, Homo sapiens; identical to SEQ ID NO: 753996

SEQ ID NO: 754004 - protein, 425 aa, Homo sapiens
DNHSPAVVTTTVSSKKQPSVLVTFPKEERKSVSGKASIKLSETISEGTSNSLSTCTKSGPSPLSSPNGKLTVASPKRGQKREEGWKEVVRRSKKVSVPSTVISRVIGRGGCNINAIREFTGAHIDIDKQKDKTGDRIITIRGGTESTRQATQLINALIKDPDKEIDELIPKNLFEKLLSKFQNRVISTYHHCCYTSLMGIKMTTVALSSTSQTATALTVPAISSASTHKTIKNPVNNVRPGFPVSLPLAYPPPQFAHALLAAQTFQQIRPPRLPMTHFGGTFPPAQSTWGPFPVRPLSPARATNSPKPHMVPRHSNQNSSGSQVNSAGSLTSSPTTTTSSSASTVPGTSTNGSPSSPSVRRQLFVTVVKTSNATTTTVTTTASNNNTAPTNATYPMPTAKEHYPVSSPSSPSILMYSRVQSSILS

SEQ ID NO: 754005 - protein, 472 aa, Homo sapiens
MQTDTILYGDLEPLEQQKQQIINEEGTELFSYKGNDVEYFISSSSPSGLYQLDLLSTEKDTHFKVYATTTPESDQPYPELPYDPRVDVTSLGRTTVTLAWKPSPTASLLKQPIQYCVVINKEHNFKSLCAVEAKLSADDAFMMAPKPGLDFSPFDFAHFGFPSDNSGKERSFQAKPSPKLGRHVYSRPKVDIQKICIGNKNIFTVSDLKPDTQYYFDVFVVNINSNMSTAYVGTFARTKEEAKQKTVELKDGKITDVFVKRKGAKFLRFAPVSSHQKVTFFIHSCLDAVQIQVRRDGKLLLSQNVEGIQQFQLRGKPKAKYLVRLKGNKKGASMLKILATTRPTKQSFPSLPEDTRIKAFDKLRTCSSATVAWLGTQERNKFCIYKKEVDDNYNEDQKKREQNQCLGPDIRKKSEKVLCKYFHSQNLQKAVTTETIKGLQPGKSYLLDVYVIGHGGHSVKYQSKVVKTRKFC

SEQ ID NO: 754006 - protein, 701 aa, Homo sapiens
SPRQPRGSLRHPPAAQPPHAPCSLKGPPAASRRCPGIPQPRAAPYSTSQQLRRPRAARPRPPLKFAVPTAKLGHFSGLNFSLLSASVPALQASRSWILVLSILAGSGDVDYFAHHTTGRDFFLFSLRKTDLFKDGAAPLVPAVAPVSTQLKDPEVTHPGWELFQMQIRDKAFFHDSSVIPDGAEISSYLFRDTPKRYFFVVEEDNTPLSVTVTPCDAPLEWKLSLQELPEDRSGEGSGDLEPLEQQKQQIINEEGTELFSYKGNDVEYFISSSSPSGLYQLDLLSTEKDTHFKVYATTTPESDQPYPELPYDPRVDVTSLGRTTVTLAWKPSPTASLLKQPIQYCVVINKEHNFKSLCAVEAKLSADDAFMMAPKPGLDFSPFDFAHFGFPSDNSGKERSFQAKPSPKLGRHVYSRPKVDIQKICIGNKNIFTVSDLKPDTQYYFDVFVVNINSNMSTAYVGTFARTKEEAKQKTVELKDGKITDVFVKRKGAKFLRFAPVSSHQKVTFFIHSCLDAVQIQVRRDGKLLLSQNVEGIQQFQLRGKPKAKYLVRLKGNKKGASMLKILATTRPTKQSFPSLPEDTRIKAFDKLRTCSSATVAWLGTQERNKFCIYKKEVDDNYNEDQKKREQNQCLGPDIRKKSEKVLCKYFHSQNLQKAVTTETIKGLQPGKSYLLDVYVIGHGGHSVKYQSKVVKTRKFC

SEQ ID NO: 754007 - protein, 701 aa, Homo sapiens; identical to SEQ ID NO: 754006

SEQ ID NO: 754008 - protein, 297 aa, Homo sapiens
GGVPKASLFLSRGPLSWAWLGSALRSRRYQDDRLPAAQAARTGAMSSPDKVSVCGAGFDLEGGKKAGSRTASPGAPGAHSHGLDLGVPGSGDGKSESGFTDPEGFSFESESELIEQGRVVLWGREGRPGTPVDDQGDVVDYSFYLADEPAAIVPPPSVQGHPFPEGAAAEGSAENWADAEVGPSGRDVLGHSPGKWQQASAGRLHLCGPGPVRAWKNPERGSKSRWSLRVDPQQPSAKGPTRLPTHDSDSADESSDLPLMKVGICRNEGSQAKPGSPKKRADTSRQASFHCKESYLP

SEQ ID NO: 754009 - protein, 89 aa, Homo sapiens
MVPRLAFILFVLARDYNVTSLGQDLNWKYEAKDYRKTGELKNIGECGRSYKFLSRNQDWNTRYSHPNRPAKYSGIDEMCKAQESGLSPV

SEQ ID NO: 754010 - protein, 74 aa, Homo sapiens
CHAPSSSHTLSSLLPLPPPPSLLSSEGGQVGLPARSGCYISLEFLATSSPELPVLGWVAGTDRTSKVNIGHPFH

SEQ ID NO: 754011 - protein, 107 aa, Homo sapiens [sequence omitted]

SEQ ID NO: 754012 - protein, 192 aa, Homo sapiens
RGGSRCSDMGGSARLTSRWGSGFSRDGGCASERGAGSRGAGGSARAGSRYGCGSSRGGSRGYSGSRSGPGYSASRRRTGDKLMNATLRGSAIPTVLALRFCSSRRSLLRRAACLPALPLALCRFSSLHHPQPSPPAPRDGCSACLQLPTPHPTTTTVQLWTSSVMCSLSLYENLFRTQTQARTVGSLGLRTH

SEQ ID NO: 754013 - protein, 154 aa, Homo sapiens
RGGSRCSDMGGSARLTSRWGSGFSRDGGCASERGAGSRGAGGSARAGSRYGCGSSRGGSRGYSGSRSGPGYSASRRRTGDKLMNATLRGSAIPTVLALRFCSSRRSLLRRAACLPALPLALCRFSSLHHPQPSPPAPRFAEQLSELGRSSQQRG

SEQ ID NO: 754014 - protein, 138 aa, Homo sapiens
RGGSRCSDMGGSARLTSRWGSGFSRDGGCASERGAGSRGAGGSARAGSRYGCGSSRGGSRGYSGSRSGPGYSASRRRTGDKLMNATLRGSAIPTVLALRFCSSRRSLLRRAACLPALPLALCRFSSLHHPQPSPPAPR

SEQ ID NO: 754015 - protein, 150 aa, Homo sapiens
MEWKVKIRSDGTRYITKRPVRDRILKERALKIKEERSGMTTDDDTMSEMKMGRYWSKEERKQHLVRAKEQRRRREFMMRSRLECLKESPQSGSEGKKEINIIELSHKKMMKKRNKKILDNWMTIQELMTHGAKSPDGTRVHNAFLSVTTV

SEQ ID NO: 754016 - protein, 150 aa, Homo sapiens; identical to SEQ ID NO: 754015

SEQ ID NO: 754017 - protein, 473 aa, Homo sapiens
AAGPVSGGSVGRQTRERLRLVQGSCGLAALASAVVPARMPHLENVVLCRESQVSILQSLFGERHHFSFPSIFIYGHTASGKTYVTQTLLKTLELPHVFVNCVECFTLRLLLEQILNKLNHLSSSEDGCSTEITCETFNDFVRLFKQVTTAENLKDQTVYIVLDKAEYLRDMEANLLPGFLRLQELADRNVTVLFLSEIVWEKFRPNTGCFEPFVLYFPDYSIGNLQKILSHDHPPEYSADFYAAYINILLGVFYTVCRDLKELRHLAVLNFPKYCEPVVKGEASERDTRKLWRNIEPHLKKAMQTVYLREISSSQWEKLQKDDTDPGQLKGLSAHTHVELPYYSKFILIAAYLASYNPARTDKRFFLKHHGKIKKTNFLKKHEKTSNHLLGPKPFPLDRLLAILYSIVDSRVAPTANIFSQITSLVTLQLLTLVGHDDQLDGPKYKCTVSLDFIRAIARTVNFDIIKYLYDFL

SEQ ID NO: 754018 - protein, 473 aa, Homo sapiens; identical to SEQ ID NO: 754017

SEQ ID NO: 754019 - protein, 303 aa, Homo sapiens
MEANLLPGFLRLQELADRNVTVLFLSEIVWEKFRPNTGCFEPFVLYFPDYSIGNLQKILSHDHPPEYSADFYAAYINILLGVFYTVCRDLKELRHLAVLNFPKYCEPVVKGEASERDTRKLWRNIEPHLKKAMQTVYLREISSSQWEKLQKDDTDPGQLKGLSAHTHVELPYYSKFILIAAYLASYNPARTDKRFFLKHHGKIKKTNFLKKHEKTSNHLLGPKPFPLDRLLAILYSIVDSRVAPTANIFSQITSLVTLQLLTLVGHDDQLDGPKYKCTVSLDFIRAIARTVNFDIIKYLYDFL

SEQ ID NO: 754020 - protein, 429 aa, Homo sapiens
IADLQEDPQRYSQSLFGERHHFSFPSIFIYGHTASGKTYVTQTLLKTLELPHVFVNCVECFTLRLLLEQILNKLNHLSSSEDGCSTEITCETFNDFVRLFKQVTTAENLKDQTVYIVLDKAEYLRDMEANLLPGFLRLQELADRNVTVLFLSEIVWEKFRPNTGCFEPFVLYFPDYSIGNLQKILSHDHPPEYSADFYAAYINILLGVFYTVCRDLKELRHLAVLNFPKYCEPVVKGEASERDTRKLWRNIEPHLKKAMQTVYLREISSSQWEKLQKDDTDPGQLKGLSAHTHVELPYYSKFILIAAYLASYNPARTDKRFFLKHHGKIKKTNFLKKHEKTSNHLLGPKPFPLDRLLAILYSIVDSRVAPTANIFSQITSLVTLQLLTLVGHDDQLDGPKYKCTVSLDFIRAIARTVNFDIIKYLYDFL

SEQ ID NO: 754021 - protein, 491 aa, Homo sapiens
  misc_feature (4)..(4): Xaa can be any naturally occurring amino acid
MAGXLRGYTPKFLKKKTPFSGPVRRGSVGRQTRERLRLVQGSCGLAALASAVVPARMPHLENVVLCRESQVSILQSLFGERHHFSFPSIFIYGHTASGKTYVTQTLLKTLELPHVFVNCVECFTLRLLLEQILNKLNHLSSSEDGCSTEITCETFNDFVRLFKQVTTAENLKDQTVYIVLDKAEYLRDMEANLLPGFLRLQELADRNVTVLFLSEIVWEKFRPNTGCFEPFVLYFPDYSIGNLQKILSHDHPPEYSADFYAAYINILLGVFYTVCRDLKELRHLAVLNFPKYCEPVVKGEASERDTRKLWRNIEPHLKKAMQTVYLREISSSQWEKLQKDDTDPGQLKGLSAHTHVELPYYSKFILIAAYLASYNPARTDKRFFLKHHGKIKKTNFLKKHEKTSNHLLGPKPFPLDRLLAILYSIVDSRVAPTANIFSQITSLVTLQLLTLVGHDDQLDGPKYKCTVSLDFIRAIARTVNFDIIKYLYDFL

SEQ ID NO: 754022 - protein, 362 aa, Homo sapiens
AAGPVSGGSVGRQTRERLRLVQGSCGLAALASAVVPARMPHLENVVLCRESQVSILQSLFGERHHFSFPSIFIYGHTASGKTYVTQTLLKTLELPHVFVNCVECFTLRLLLEQILNKLNHLSSSEDGCSTEITCETFNDFVRLFKQVTTAENLKDQTVYIVLDKAEYLRDMEANLLPGFLRLQELADRNVTVLFLSEIVWEKFRPNTGCFEPFVLYFPDYSIGNLQKILSHDHPPEYSADFYAAYINILLGVFYTVCRDLKELRHLAVLNFPKYCEPVVKGEASERDTRKLWRNIEPHLKKAMQTVYLREISSSQWEKLQKDDTDPGQLKGIRGSIETVTGDTSSANYQDTKVNTKEHSVRK

SEQ ID NO: 754023 - protein, 337 aa, Homo sapiens
AAGPVSGGSVGRQTRERLRLVQGSCGLAALASAVVPARMPHLENVVLCRESQVSILQSLFGERHHFSFPSIFIYGHTASGKTYVTQTLLKTLELPHVFVNCVECFTLRLLLEQILNKLNHLSSSEDGCSTEITCETFNDFVRLFKQVTTAENLKDQTVYIVLDKAEYLRDMEANLLPGFLRLQELADRNVTVLFLSEIVWEKFRPNTGCFEPFVLYFPDYSIGNLQKILSHDHPPEYSADFYAAYINILLGVFYTVCRDLKELRHLAVLNFPKYCEPVVKGEASERDTRKLWRNIEPHLKKAMQTVYLREISRINYKDGASSELDRDLPGRCPHGGI

SEQ ID NO: 754024 - protein, 921 aa, Homo sapiens
MACTEAFFPFISRGKELLWGKPEESRVSSVLEESKRLVDTAMYATMQRNLKKRGILSPAQLLSFSKLPEPTSGVIARAAEIMETSIQAMKRKVNLKTQQSQHPTDALSEDLLSIIANMSGCLPYMLPPKCPNTCLANKYRPITGACNNRDHPRWGASNTALARWLPPVYEDGFSQPRGWNPGFLYNGFPLPPVREVTRHVIQVSNEVVTDDDRYSDLLMAWGQYIDHDIAFTPQSTSKAAFGGGADCQMTCENQNPCFPIQLPEEARPAAGTACLPFYRSSAACGTGDQGALFGNLSTANPRQQMNGLTSFLDASTVYGSSPALERQLRNWTSAEGLLRVHARLRDSGRAYLPFVPPRAPAACAPEPGIPGETRGPCFLAGDGRASEVPSLTALHTLWLREHNRLAAALKALNAHWSADAVYQEARKVVGALHQIITLRDYIPRILGPEAFQQYVGPYEGYDSTANPTVSNVFSTAAFRFGHATIHPLVRRLDASFQEHPDLPGLWLHQAFFSPWTLLRGGGLDPLIRGLLARPAKLQVQDQLMNEELTERLFVLSNSSTLDLASINLQRGRDHGLPGYNEWREFCGLPRLETPADLSTAIASRSVADKILDLYKHPDNIDVWLGGLAENFLPRARTGPLFACLIGKQMKALRDGDWFWWENSHVFTDAQRRELEKHSLSRVICDNTGLTRVPMDAFQVGKFPEDFESCDSITGMNLEAWRETFPQDDKCGFPESVENGDFVHCEESGRRVLVYSCRHGYELQGREQLTCTQEGWDFQPPLCKDVNECADGAHPPCHASARCRNTKGGFQCLCADPYELGDDGRTCVDSGRLPRVTWISMSLAALLIGGFAGLTSTVICRWTRTGTKSTLPISETGGGTPELRCGKHQAVGTSPQRAAAQDSEQESAGMEGRDTHRLPRAL

SEQ ID NO: 754025 - protein, 90 aa, Homo sapiens
CLAVARAVLSTLHSHGAGPSPDNWTRVSHRTRTGTKSTLPISETGGGTPELRCGKHQAVGTSPQRAAAQDSEQESAGMEGRDTHRLPRAL

SEQ ID NO: 754026 - protein, 133 aa, Homo sapiens
DAVTRLKVFGEFADLEGIHGHPGEASVVTDDPRQGVLLQLTPLCILKTWLFSHQNQSPSRRAFICFPMRQANRGPVRALGRKFSAKPPSQTSMLSGCLYKSRILSRRSSWRWLCSVSGVSGEAAPDSLHSGIL

SEQ ID NO: 754027 - protein, 917 aa, Homo sapiens
MACTEAFFPFISRGKELLWGKPEESRVSSVLEESKRLVDTAMYATMQRNLKKRGILSPAQLLSFSKLPEPTSGVIARAAEIMETSIQAMKRKVNLKTQQSQHPTDALSEDLLSIIANMSGCLPYMLPPKCPNTCLANKYRPITGACNNRDHPRWGASNTALARWLPPVYEDGFSQPRGWNPGFLYNGFPLPPVREVTRHVIQVSNEVVTDDDRYSDLLMAWGQYIDHDIAFTPQSTSKAAFGGGADCQMTCENQNPCFPIQLPEEARPAAGTACLPFYRSSAACGTGDQGALFGNLSTANPRQQMNGLTSFLDASTVYGSSPALERQLRNWTSAEGLLRVHARLRDSGRAYLPFVPPRAPAACAPEPGIPGETRGPCFLAGDGRASEVPSLTALHTLWLREHNRLAAALKALNAHWSADAVYQEARKVVGALHQIITLRDYIPRILGPEAFQQYVGPYEGYDSTANPTVSNVFSTAAFRFGHATIHPLVRRLDASFQEHPDLPGLWLHQAFFSPWTLLRGGGLDPLIRGLLARPAKLQVQDQLMNEELTERLFVLSNSSTLDLASINLQRGRDHGLPGYNEWREFCGLPRLETPADLSTAIASRSVADKILDLYKHPDNIDVWLGGLAENFLPRARTGPLFACLIGKQMKALRDGDWFWWENSHVFTDAQRRELEKHSLSRVICDNTGLTRVPMDAFQVGKFPEDFESCDSITGMNLEAWRETFPQDDKCGFPESVENGDFVHCEESGRRVLVYSCRHGYELQGREQLTCTQEGWDFQPPLCKDVNECADGAHPPCHASARCRNTKGGFQCLCADPYELGDDGRTCVDSGRLPRVTWISMSLAALLIGGFAGLTSTVICRWRVLGWKAGILTGCREPSEGKVAGHCRTASCSQNHRTTLFQTQANPKSAGRLFSQHG

SEQ ID NO: 754028 - protein, 166 aa, Homo sapiens [sequence omitted]

SEQ ID NO: 754029 - protein, 202 aa, Homo sapiens
MACTEAFFPFISRGKELLWGKPEESRVSSVLEESKRLVDTAMYATMQRNLKKRGILSPAQLLSFSKLPEPTSGVIARAAEIMETSIQAMKRKVNLKTQQSQHPTDALSEDLLSIIANMSGCLPYMLPPKCPNTCLANKYRPITGACNNRDHPRWGASNTALARWLPPVYEDGFSQPRGWNPGFLYNGFPLPPVGTQNATILD

SEQ ID NO: 754030 - protein, 479 aa, Homo sapiens
MACTEAFFPFISRGKELLWGKPEESRVSSVLEESKRLVDTAMYATMQRNLKKRGILSPAQLLSFSKLPEPTSGVIARAAEIMETSIQAMKRKVNLKTQQSQHPTDALSEDLLSIIANMSGCLPYMLPPKCPNTCLANKYRPITGACNNRDHPRWGASNTALARWLPPVYEDGFSQPRGWNPGFLYNGFPLPPVREVTRHVIQVSNEVVTDDDRYSDLLMAWGQYIDHDIAFTPQSTSKAAFGGGADCQMTCENQNPCFPIQLPEEARPAAGTACLPFYRSSAACGTGDQGALFGNLSTANPRQQMNGLTSFLDASTVYGSSPALERQLRNWTSAEGLLRVHARLRDSGRAYLPFVPPRAPAACAPEPGIPGETRGPCFLAGDGRASEVPSLTALHTLWLREHNRLAAALKALNAHWSADAVYQEARKVVGALHQIITLRDYIPRILGPEAFQQYVGPYEGYDSTANPSHHPAEPSSASQ

SEQ ID NO: 754031 - protein, 864 aa, Homo sapiens
MACTEAFFPFISRGKELLWGKPEESRVSSVLEESKRLVDTAMYATMQRNLKKRGILSPAQLLSFSKLPEPTSGVIARAAEIMETSIQAMKRKVNLKTQQSQHPTDALSEDLLSIIANMSGCLPYMLPPKCPNTCLANKYRPITGACNNRDHPRWGASNTALARWLPPVYEDGFSQPRGWNPGFLYNGFPLPPVREVTRHVIQVSNEVVTDDDRYSDLLMAWGQYIDHDIAFTPQSTSKAAFGGGADCQMTCENQNPCFPIQLPEEARPAAGTACLPFYRSSAACGTGDQGALFGNLSTANPRQQMNGLTSFLDASTVYGSSPALERQLRNWTSAEGLLRVHARLRDSGRAYLPFVPPRAPAACAPEPGIPGETRGPCFLAGDGRASEVPSLTALHTLWLREHNRLAAALKALNAHWSADAVYQEARKVVGALHQIITLRDYIPRILGPEAFQQYVGPYEGYDSTANPTVSNVFSTAAFRFGHATIHPLVRRLDASFQEHPDLPGLWLHQAFFSPWTLLRGGYNEWREFCGLPRLETPADLSTAIASRSVADKILDLYKHPDNIDVWLGGLAENFLPRARTGPLFACLIGKQMKALRDGDWFWWENSHVFTDAQRRELEKHSLSRVICDNTGLTRVPMDAFQVGKFPEDFESCDSITGMNLEAWRETFPQDDKCGFPESVENGDFVHCEESGRRVLVYSCRHGYELQGREQLTCTQEGWDFQPPLCKDVNECADGAHPPCHASARCRNTKGGFQCLCADPYELGDDGRTCVDSGRLPRVTWISMSLAALLIGGFAGLTSTVICRWTRTGTKSTLPISETGGGTPELRCGKHQAVGTSPQRAAAQDSEQESAGMEGRDTHRLPRAL

SEQ ID NO: 754032 - protein, 921 aa, Homo sapiens; identical to SEQ ID NO: 754024

SEQ ID NO: 754033 - protein, 203 aa, Homo sapiens
MSTCPHFIDDKCGFPESVENGDFVHCEESGRRVLVYSCRHGYELQGREQLTCTQEGWDFQPPLCKDVNECADGAHPPCHASARCRNTKGGFQCLCADPYELGDDGRTCVDSGRLPRVTWISMSLAALLIGGFAGLTSTVICRWTRTGTKSTLPISETGGGTPELRCGKHQAVGTSPQRAAAQDSEQESAGMEGRDTHRLPRAL

SEQ ID NO: 754034 - protein, 166 aa, Homo sapiens [sequence omitted]

SEQ ID NO: 754035 - protein, 56 aa, Homo sapiens
PPSISKDDPLAEVGVKEVKTKVNSTLTLECESWAVPPPTIRWYKDGQVSLGPPAQL

SEQ ID NO: 754036 - protein, 430 aa, Homo sapiens
MHSTTPISSLFSFTSPAVKRLLGWKQGDEEEKWAEKAVDSLVKKLKKKKGAMDELERALSCPGQPSKCVTIPRSLDGRLQVSHRKGLPHVIYCRVWRWPDLQSHHELKPLECCEFPFGSKQKEVCINPYHYRRVETPVLPPVLVPRHSEYNPQLSLLAKFRSASLHSEPLMPHNATYPDSFQQPPCSALPPSPSHAFSQSPCTASYPHSPGSPSEPESPYQHSDFRPVCYEEPQHWCSVAYYELNNRVGETFQASSRSVLIDGFTDPSNNRNRFCLGLLSNVNRNSTIENTRRHIGKGVHLYYVGGEVYAECVSDSSIFVQSRNCNYQHGFHPATVCKIPSGCSLKVFNNQLFAQLLAQSVHHGFEVVYELTKMCTIRMSFVKGWGAEYHRQDVTSTPCWIEIHLHGPLQWLDKVLTQMGSPHNPISSVS

SEQ ID NO: 754037 - protein, 502 aa, Homo sapiens
LINDIKNKKKIWMQWLIPIVPALWEAKGEDHLSPGVWGCSELCSLFSFTSPAVKRLLGWKQGDEEEKWAEKAVDSLVKKLKKKKGAMDELERALSCPGQPSKCVTIPRSLDGRLQVSHRKGLPHVIYCRVWRWPDLQSHHELKPLECCEFPFGSKQKEVCINPYHYRRVETPVLPPVLVPRHSEYNPQLSLLAKFRSASLHSEPLMPHNATYPDSFQQPPCSALPPSPSHAFSQSPCTASYPHSPGSPSEPESPYQHSVDTPPLPYHATEASETQSGQPVDATADRHVVLSIPNGDFRPVCYEEPQHWCSVAYYELNNRVGETFQASSRSVLIDGFTDPSNNRNRFCLGLLSNVNRNSTIENTRRHIGKGVHLYYVGGEVYAECVSDSSIFVQSRNCNYQHGFHPATVCKIPSGCSLKVFNNQLFAQLLAQSVHHGFEVVYELTKMCTIRMSFVKGWGAEYHRQDVTSTPCWIEIHLHGPLQWLDKVLTQMGSPHNPISSVS

SEQ ID NO: 754038 - protein, 430 aa, Homo sapiens; identical to SEQ ID NO: 754036

SEQ ID NO: 754039 - protein, 467 aa, Homo sapiens
MHSTTPISSLFSFTSPAVKRLLGWKQGDEEEKWAEKAVDSLVKKLKKKKGAMDELERALSCPGQPSKCVTIPRSLDGRLQVSHRKGLPHVIYCRVWRWPDLQSHHELKPLECCEFPFGSKQKEVCINPYHYRRVETPVLPPVLVPRHSEYNPQLSLLAKFRSASLHSEPLMPHNATYPDSFQQPPCSALPPSPSHAFSQSPCTASYPHSPGSPSEPESPYQHSVDTPPLPYHATEASETQSGQPVDATADRHVVLSIPNGDFRPVCYEEPQHWCSVAYYELNNRVGETFQASSRSVLIDGFTDPSNNRNRFCLGLLSNVNRNSTIENTRRHIGKGVHLYYVGGEVYAECVSDSSIFVQSRNCNYQHGFHPATVCKIPSGCSLKVFNNQLFAQLLAQSVHHGFEVVYELTKMCTIRMSFVKGWGAEYHRQDVTSTPCWIEIHLHGPLQWLDKVLTQMGSPHNPISSVS

SEQ ID NO: 754040 - protein, 383 aa, Homo sapiens
MHSTTPISSLFSFTSPAVKRLLGWKQGDEEEKWAEKAVDSLVKKLKKKKGAMDELERALSCPGQPSKCVTIPRSLDGRLQVSHRKGLPHVIYCRVWRWPDLQSHHELKPLECCEFPFGSKQKEVCINPYHYRRVETPVLPPVLVPRHSEYNPQLSLLAKFRSASLHSEPLMPHNATYPDSFQQPPCSALPPSPSHAFSQSPCTASYPHSPGSPSEPESPYQHSDFRPVCYEEPQHWCSVAYYELNNRVGETFQASSRSVLIDGFTDPSNNRNRFCLGLLSNVNRNSTIENTRRHIGKGVHLYYVGGEVYAECVSDSSIFVQSRNCNYQHGFHPATVCKIPSGCSLKVFNNQLFAQLLAQSVHHGFEVVYELTKMCTIRMSFVK

SEQ ID NO: 754041 - protein, 104 aa, Homo sapiens
MCPGKSSPRFLGRLQPIQPPSSFIAIFSYHSFIKTSNNILTSFLTALAGRGRGGGCKALLSATGSPFVSGESLPFPRAYACLLRAVAIRFCHPSPFERLTLIRT

SEQ ID NO: 754042 - protein, 110 aa, Homo sapiens
  misc_feature (9)..(9): Xaa can be any naturally occurring amino acid
YREIWPSSXKIRHETEACGTRCKGSVLCLGTPFPQYCQKVSKSIWDGISTQYVVAVWSSDLLAFPFYHLHGKGLRQQMWLCHNCHSCGLGWRSCELEDGHTHSTADISHT

SEQ ID NO: 754043 - protein, 489 aa, Homo sapiens
RTAPGSPAGEFCQISGQMGNSRSRVGRSFCSQFLPEEQAEIDQLFDALSSDKNSPNVSSKSFSLKALQNHVGEALPPEMVTRLYDGMRRVDLTGKAKGPSENVSQEQFTASMSHLLKGNSEEKSLMIMKMISATEGPVKAREVQKFTEDLVGSVVHVLSHRQELRGWTGKEAPGPNPRVQVLAAQLLSEMKLQDGKRLLGPQWLDYDCDRAVIEDWVFRVPHVAIFLSVVICKGFLVLCSSLDLTTLVPERQVDQGRGFESILDVLSVMYINAQLPREQRHRWRLLFSSELHGHSFSQLCGHITHRGPCVAVLEDHDKHVFGGFASCSWEVKPQFQGDNRCFLFSICPSMAVYTHTGYNDHYMYLNHGQQTIPNGLGMGGQHNYFGLWVDVDFGKGHSRAKPTCTTYNSPQLSAQENFQFDKMEVWAVGDPSEEQLAKGNKSILDADPEAQALLEISGHSRHSKGSGKSRTMNEEPPEPSWSQDLDSSG

SEQ ID NO: 754044 - protein, 472 aa, Homo sapiens
MGNSRSRVGRSFCSQFLPEEQAEIDQLFDALSSDKNSPNVSSKSFSLKALQNHVGEALPPEMVTRLYDGMRRVDLTGKAKGPSENVSQEQFTASMSHLLKGNSEEKSLMIMKMISATEGPVKAREVQKFTEDLVGSVVHVLSHRQELRGWTGKEAPGPNPRVQVLAAQLLSEMKLQDGKRLLGPQWLDYDCDRAVIEDWVFRVPHVAIFLSVVICKGFLVLCSSLDLTTLVPERQVDQGRGFESILDVLSVMYINAQLPREQRHRWRLLFSSELHGHSFSQLCGHITHRGPCVAVLEDHDKHVFGGFASCSWEVKPQFQGDNRCFLFSICPSMAVYTHTGYNDHYMYLNHGQQTIPNGLGMGGQHNYFGLWVDVDFGKGHSRAKPTCTTYNSPQLSAQENFQFDKMEVWAVGDPSEEQLAKGNKSILDADPEAQALLEISGHSRHSKGSGKSRTMNEEPPEPSWSQDLDSSG

SEQ ID NO: 754045 - protein, 218 aa, Homo sapiens
MTDGDYDYLIKLLALGDSGVGKTTFLYRYTDNKFNPKFITTVGIDFREKRVVYNAQGPNGSSGKAFKVHLQLWDTAGQERFRSLTTAFFRDAMGFLLMFDLTSQQSFLNVRNWMSQLQANAYCENPDIVLIGNKADLPDQREVNERQARELADKYGIPYFETSAATGQNVEKAVETLLDLIMKRMEQCVEKTQIPDTVNGGNSGNLDGEKPPEKKCIC

SEQ ID NO: 754046 - protein, 218 aa, Homo sapiens
MTDGDYDYLIKLLALGDSGVGKTTFLYRYTDNKFNPKFITTVGIDFREKRVVYNAQGPNGSSGKAFKVHLQLWDTAGQERFRSLTTAFFRDAMGFLLMFDLTSQQSFLNVRNWMSQLQANAYCENPDIVLIGNKADLPDQREVNERQARELADKYGCKLSTLGINKFDEACLSLHQWSCSLFCISLHLKRIHNSFLIAYYTKRLREKSSFVKDFGFII

SEQ ID NO: 754047 - protein, 153 aa, Homo sapiens
MWTNFQNYPLCFLGRFRSLTTAFFRDAMGFLLMFDLTSQQSFLNVRNWMSQLQANAYCENPDIVLIGNKADLPDQREVNERQARELADKYGCKLSTLGINKFDEACLSLHQWSCSLFCISLHLKRIHNSFLIAYYTKRLREKSSFVKDFGFII

SEQ ID NO: 754048 - protein, 218 aa, Homo sapiens; identical to SEQ ID NO: 754045

SEQ ID NO: 754049 - protein, 277 aa, Homo sapiens
RAFAVTQEESRQHQYRLSILPPSVRLEADRSNSAIKKWARYFQRLQSGGVVEVPTKTITMTDGDYDYLIKLLALGDSGVGKTTFLYRYTDNKFNPKFITTVGIDFREKRVVYNAQGPNGSSGKAFKVHLQLWDTAGQERFRSLTTAFFRDAMGFLLMFDLTSQQSFLNVRNWMSQLQANAYCENPDIVLIGNKADLPDQREVNERQARELADKYGCKLSTLGINKFDEACLSLHQWSCSLFCISLHLKRIHNSFLIAYYTKRLREKSSFVKDFGFII

SEQ ID NO: 754050 - protein, 218 aa, Homo sapiens; identical to SEQ ID NO: 754046

SEQ ID NO: 754051 - protein, 121 aa, Homo sapiens
SVHLSAKSNSTHLGVHLWLSLCLVSAPLYVHTPCQRAALRVYRAQCDSPAAGDIEELCDDGRCGSPASCLAASGSSLSVLAQGAVPYGGSETGLHSHPGVPSTSARLPFPMKIWVYPGCGL

SEQ ID NO: 754052 - protein, 126 aa, Homo sapiens
  misc_feature (36)..(36): Xaa can be any naturally occurring amino acid
GLLLGDVLRKTASEAGPIALLILIEASCAVAGLAVXASSIVELCYDSIMTGRLFTTLGFLSLHEALTRYSHLILDFTASRNMPWNTLVSVTNAALLCYIEYKRNTWAIFSTEHKLCLLFSSPVIQV

SEQ ID NO: 754053 - protein, 211 aa, Homo sapiens
SSYPELHTEVPLSVLILGLLVVFILSVCFGAGLFVFVLKRRKGVPSVPRNTNNLDVSSFQLQYGSYNTETHDKTDGHVYNYIPPPVGQMCQNPIYMQKEGDPVAYYRNLQEFSYSNLEEKKEEPATPAYTISATELLEKQATPREPELLYQNIAERVKELPSAGLVHYNFCTLPKRQFAPSYESRRQNQDRINKTVLYGTPRKCFVGQSKP

SEQ ID NO: 754054 - protein, 815 aa, Homo sapiens
FEVLWSDSSITSVTKSSSEVTEFISKLCQLYPEENLEKLIPCLAGPDAFYVERNHVDLDSGLRYLASLPSHVLKNDHVRRFLSTSSPPQQLQSPSPGNPSLSKVGTVMGVSGRPVCGVAGIPSSQSGAQHHGQHPAGSAAPLPHCSHAGSAGSALAYRTQMDTSPAILMPSSLQTPQTQEQNGILDWLRKLRLHKYYPVFKQLSMEKFLSLTEEDLNKFESLTMGAKKKLKTQLELEKEKSERRCLNPSAPPLVTSSGVARVPPTSHVGPVQSGRGSHAAELRVEVEQPHHQLPREGSSSEYSSSSSSPMGVQAREESSDSAEENDRRVEIHLESSDKEKPVMLLNHFTSSSARPTAQVLPVQNEASSNPSGHHPLPPQMLSAASHITPIRMLNSVHKPERGSADMKLLSSSVHSLLSLEERNKGSGPRSSMKVDKSFGSAMMDVLPASAPHQPVQVLSGLSESSSMSPTVSFGPRTKVVHASTLDRVLKTAQQPALVVETSTAATGTPSTVLHAARPPIKLLLSSSVPADSAISGQTSCPNNVQISVPPAIINPRTALYTANTKVAFSAMSSMPVGPLQGGFCANSNTASPSSHPSTSFANMATLPSCPAPSSSPALSSVPESSFYSSSGGGGSTGNIPASNPNHHHHHHHQQPPAPPQPAPPPPGCIVCTSCGCSGSCGSSGLTVSYANYFQHPFSGPSVFTFPFLPFSPMCSSGYVSAQQYGGGSTFPVVHAPYSSSGTPDPVLSGQSTFAVPPMQNFMAGTAGVYQTQGLVGSSNGSSHKKSGNLSCYNCGATGHRAQDCKQPSMDFNRPG

SEQ ID NO: 754055 - protein, 832 aa, Homo sapiens
FEVLWSDSSITSVTKSSSEVTEFISKLCQLYPEENLEKLIPCLAGPDAFYVERNHVDLDSGLRYLASLPSHVLKNDHVRRFLSTSSPPQQLQSPSPGNPSLSKVGTVMGVSGRPVCGVAGIPSSQSGAQHHGQHPAGSAAPLPHCSHAGSAGSALAYRTQMDTSPAILMPSSLQTPQTQEQNGILDWLRKLRLHKYYPVFKQLSMEKFLSLTEEDLNKFESLTMGAKKKLKTQLELEKEKSERRCLNPSAPPLVTSSGVARVPPTSHVGPVQSGRGSHAAELRVEVEQPHHQLPREGSSSEYSSSSSSPMGVQAREESSDSAEENDRRVEIHLESSDKEKPVMLLNHFTSSSARPTAQVLPVQNEASSNPSGHHPLPPQMLSAASHITPIRMLNSVHKPERGSADMKLLSSSVHSLLSLEERNKGSGPRSSMKVDKSFGSAMMDVLPASAPHQPVQVLSGLSESSSMSPTVSFGPRTKVVHASTLDRVLKTAQQPALVVETSTAATGTPSTVLHAARPPIKLLLSSSVPADSAISGQTSCPNNVQISVPPAIINPRTALYTANTKVAFSAMSSMPVGPLQGGFCANSNTASPSSHPSTSFANMATLPSCPAPSSSPALSSVPESSFYSSSGGGGSTGNIPASNPNHHHHHHHQQPPAPPQPAPPPPGCIVCTSCGCSGSCGSSGLTVSYANYFQHPFSGPSVFTFPFLPFSPMCSSGYVSAQQYGGGSTFPVVHAPYSSSGTPDPVLSGQSTFAVPPMQNFMAGTAGVYQTQGLVGSSNGSSHKKSGNLSCYNCGATGHRAQDCKQPSMDFNRPGTFRLKYAPPAESLDSTD

SEQ ID NO: 754056 - protein, 832 aa, Homo sapiens; identical to SEQ ID NO: 754055

SEQ ID NO: 754057 - protein, 832 aa, Homo sapiens; identical to SEQ ID NO: 754055

SEQ ID NO: 754058 - protein, 566 aa, Homo sapiens
FEVLWSDSSITSVTKSSSEVTEFISKLCQLYPEENLEKLIPCLAGPDAFYVERNHVDLDSGLRYLASLPSHVLKNDHVRRFLSTSSPPQQLQSPSPGNPSLSKVGTVMGVSGRPVCGVAGIPSSQSGAQHHGQHPAGSAAPLPHCSHAGSAGSALAYRTQMDTSPAILMPSSLQTPQTQEQNGILDWLRKLRLHKYYPVFKQLSMEKFLSLTEEDLNKFESLTMGAKKKLKTQLELEKEKSERRCLNPSAPPLVTSSGVARVPPTSHVGPVQSGRGSHAAELRVEVEQPHHQLPREGSSSEYSSSSSSPMGVQAREESSDSAEENDRRVEIHLESSDKEKPVMLLNHFTSSSARPTAQVLPVQNEASSNPSGHHPLPPQMLSAASHITPIRMLNSVHKPERGSADMKLLSSSVHSLLSLEERNKGSGPRSSMKVDKSFGSAMMDVLPASAPHQPVQVLSGLSESSSMSPTVSFGPRTKVVHASTLDRVLKTAQQPALVVETSTAATGTPSTVLHAARPPIKLLLSSSVPADSAISGQTSCPNNVQISVPPAIISPSNCCCRQSSSC

SEQ ID NO: 754059 - protein, 832 aa, Homo sapiens; identical to SEQ ID NO: 754055

SEQ ID NO: 754060 - protein, 832 aa, Homo sapiens; identical to SEQ ID NO: 754055

SEQ ID NO: 754061 - protein, 845 aa, Homo sapiens
FEVLWSDSSITSVTKSSSEVTEFISKLCQLYPEENLEKLIPCLAGPDAFYVERNHVDLDSGLRYLASLPSHVLKNDHVRRFLSTSSPPQQLQSPSPGNPSLSKVGTVMGVSGRPVCGVAGIPSSQSGAQHHGQHPAGSAAPLPHCSHAGSAGSALAYRTQMDTSPAILMPSSLQTPQTQEQNGILDWLRKLRLHKYYPVFKQLSMEKFLSLTEEDLNKFESLTMGAKKKLKTQLELEKEKSERRCLNPSAPPLVTSSGVARVPPTSHVGPVQSGRGSHAAELRVEVEQPHHQLPREGSSSEYSSSSSSPMGVQAREESSDSAEENDRRVEIHLESSDKEKPVMLLNHFTSSSARPTAQVLPVQNEASSNPSGHHPLPPQMLSAASHITPIRMLNSVHKPERGSADMKLLSSSVHSLLSLEERNKGSGPRSSMKVDKSFGSAMMDVLPASAPHQPVQVLSGLSESSSMSPTVSFGPRTKVVHASTLDRVLKTAQQPALVVETSTAATGTPSTVLHAARPPIKLLLSSSVPADSAISGQTSCPNNVQISVPPAIINPRTALYTANTKVAFSAMSSMPVGPLQGGFCANSNTASPSSHPSTSFANMATLPSCPAPSSSPALSSVPESSFYSSSGGGGSTGNIPASNPNHHHHHHHQQPPAPPQPAPPPPGCIVCTSCGCSGSCGSSGLTVSYANYFQHPFSGPSVFTFPFLPFSPMCSSGYVSAQQYGGGSTFPVVHAPYSSSGTPDPVLSGQSTFAVPPMQNFMAGTAGVYQTQGLVGSSNGSSHKKSGNLSCYNCGATGHRAQDCKQPSMDFNRPGKRAPWPRPPGSRRTSAHKCLVFMKSKLLSL

SEQ ID NO: 754062 - protein, 68 aa, Homo sapiens
GAARAGSWVGWGTGAPAPPAPAGLVLHIPASPSSRPHSQAPSQLPRAGRAALISKMLLKAHGHDCTPH

SEQ ID NO: 754063 - protein, 68 aa, Homo sapiens; identical to SEQ ID NO: 754062

SEQ ID NO: 754064 - protein, 68 aa, Homo sapiens; identical to SEQ ID NO: 754062

SEQ ID NO: 754065 - protein, 425 aa, Homo sapiens
MEPSATPGAQMGVPPGSREPSPVPPDYEDEFLRYLWRDYLYPKQYEWVLIAAYVAVFVVALVGNTLVCLAVWRNHHMRTVTNYFIVNLSLADVLVTAICLPASLLVDITESWLFGHALCKVIPYLQAVSVSVAVLTLSFIALDRWYAICHPLLFKSTARRARGSILGIWAVSLAIMVPQAAVMECSSVLPELANRTRLFSVCDERWADDLYPKIYHSCFFIVTYLAPLGLMAMAYFQIFRKLWGRQIPGTTSALVRNWKRPSDQLGDLEQGLSGEPQPRGRAFLAEVKQMRARRKTAKMLMVVLLVFALCYLPISVLNVLKRVFGMFRQASDREAVYACFTFSHWLVYANSAANPIIYNFLSGKFREQFKAAFSCCLPGLGPCGSLKAPSPRSSASHKSLSLQSRCSISKISEHVVLTSVTTVLP

SEQ ID NO: 754066 - protein, 336 aa, Homo sapiens
MCRKVPRTERACRRSVGFLVKHLARIGAHYSSSWSCKAVSVSVAVLTLSFIALDRWYAICHPLLFKSTARRARGSILGIWAVSLAIMVPQAAVMECSSVLPELANRTRLFSVCDERWADDLYPKIYHSCFFIVTYLAPLGLMAMAYFQIFRKLWGRQIPGTTSALVRNWKRPSDQLGDLEQGLSGEPQPRGRAFLAEVKQMRARRKTAKMLMVVLLVFALCYLPISVLNVLKRVFGMFRQASDREAVYACFTFSHWLVYANSAANPIIYNFLSGKFREQFKAAFSCCLPGLGPCGSLKAPSPRSSASHKSLSLQSRCSISKISEHVVLTSVTTVLP

SEQ ID NO: 754067 - protein, 52 aa, Homo sapiens
MYWCTYCMEAWLSSQQLVLHRNMRPCIFQMFSLSRLFTMESTTSCTHSCCSS

SEQ ID NO: 754068 - protein, 98 aa, Homo sapiens
GGLGKLRPRCRRVSGLEGSGSQRLRWPQKEAAGAGGEEGLGPRSPSPGGAGGGRGRRDSPRRSDTPAFPSWDHDPGGGRRRRRRHRGRDRAAGGKKKA

SEQ ID NO: 754069 - protein, 128 aa, Homo sapiens
MAAKEPLCSAVSVIRALRTPRVRIDTIDRNGSEEAVMVYHASDVRILAAASGPSVEMMESLKELGLAPCGRHQLSLAAAPFSLCLGFTSEESARKSCPITSVVPILHHQNVSKSERYSCHFVFRFFSR

SEQ ID NO: 754070 - protein, 622 aa, Homo sapiens
MSMRSPISAQLALDGVGTMVNCTIKSEEKKEPCHEAPQGSATAAEPQPGDPARASQDSADPQAPAQGNFRGSWDCSSPEGNGSPEPKRPGVSEAASGSQEKLDFNRNLKEVVPAIEKLLSSDWKERFLGRNSMEAKDVKGTQESLAEKELQLLVMIHQLSTLRDQLLTAHSEQKNMAAMLFEKQQQQMELARQQQEQIAKQQQQLIQQQHKINLLQQQIQQVNMPYVMIPAFPPSHQPLPVTPDSQLALPIQPIPCKPVEYPLQLLHSPPAPVVKRPGAMATHHPLQEPSQPLNLTAKPKAPELPNTSSSPSLKMSSCVPRPPSHGGPTRDLQSSPPSLPLGFLGEGDAVTKAIQDARQLLHSHSGALDGSPNTPFRKDLISLDSSPAKERLEDGCVHPLEEAMLSCDMDGSRHFPESRNSSHIKRPMNAFMVWAKDERRKILQAFPDMHNSSISKILGSRWKSMTNQEKQPYYEEQARLSRQHLEKYPDYKYKPRPKRTCIVEGKRLRVGEYKALMRTRRQDARQSYVIPPQAGQVQMSSSDVLYPRAAGMPLAQPLVEHYVPRSLDPNMPVIVNTCSLREEGEGTDDRHSVADGEMYRYSEDEDSEGEEKSDGELVVLTD

SEQ ID NO: 754071 - protein, 622 aa, Homo sapiens; identical to SEQ ID NO: 754070

SEQ ID NO: 754072 - protein, 119 aa, Homo sapiens
IPAFPPSHQPLPVTPDSQLALPIQPIPCKPGTQESLAEKELQLLVMIHQLSTLRDQLLTAHSEQKNMAAMLFEKQQQQMELARQQQEQIAKQQQQLIQQQHKINLLQQQISLLLASVSP

SEQ ID NO: 754073 - protein, 259 aa, Homo sapiens
MCIVVPVYFVRGVGYSSTLCGHSLAKERLEDGCVHPLEEAMLSCDMDGSRHFPESRNSSHIKRPMNAFMVWAKDERRKILQAFPDMHNSSISKILGSRWKSMTNQEKQPYYEEQARLSRQHLEKYPDYKYKPRPKRTCIVEGKRLRVGEYKALMRTRRQDARQSYVIPPQAGQVQMSSSDVLYPRAAGMPLAQPLVEHYVPRSLDPNMPVIVNTCSLREEGEGTDDRHSVADGEMYRYSEDEDSEGEEKSDGELVVLTD

SEQ ID NO: 754074 - protein, 195 aa, Homo sapiens [sequence omitted]

SEQ ID NO: 754075 - protein, 622 aa, Homo sapiens; identical to SEQ ID NO: 754070

SEQ ID NO: 754076 - protein, 251 aa, Homo sapiens
MSMRSPISAQLALDGVGTMVNCTIKSEEKKEPCHEAPQGSATAAEPQPGDPARASQDSADPQAPAQGNFRGSWDCSSPEGNGSPEPKRPGVSEAASGSQEKLDFNRNLKEVVPAIEKLLSSDWKERFLGRNSMEAKDVKGTQESLAEKELQLLVMIHQLSTLRDQLLTAHSEQKNMAAMLFEKQQQQMELARQQQEQIAKQQQQLIQQQHKINLLQQQIQQVNMPYVMIPAFPPSHQPLPVSLMVGATPHL

SEQ ID NO: 754077 - protein, 169 aa, Homo sapiens
  misc_feature (86)..(86): Xaa can be any naturally occurring amino acid
  misc_feature (99)..(99): Xaa can be any naturally occurring amino acid
  misc_feature (117)..(117): Xaa can be any naturally occurring amino acid
  misc_feature (122)..(122): Xaa can be any naturally occurring amino acid
  misc_feature (128)..(128): Xaa can be any naturally occurring amino acid
EENWPSSTHPHTPSSRPPQPLRRQMSLWTPTSLNLIPSKKLIPLLDPLGTKIPITFKSALIPLPCFWWGEADCSIKSRCLSLVRLXLAAFSLSLPVNTXGPTAVRTPLSQRPSFGEXRDWEXGTRFKXPHLTTLFPTTSYATDDDIVFEDFARLRLKGMKDDDYDDQLC

SEQ ID NO: 754078 - protein, 220 aa, Homo sapiens
MLTVYLGKRDFVDHLDKVDPVDGVVLVDPDYLKDRKVFVTLTCAFRYGREDLDVLGLSFRKDLFIATYQAFPPVPNPPRPPTRLQDRLLRKLGQHAHPFFFTIPQNLPCSVTLQPGPEDTGKACGVDFEIRAFCAKSLEEKSHKRNSVRLVIRKVQFAPEKPGPQPSAETTRHFLMSDRSLHLEASLDKELPPFLQEETLWGQGRFFVSEHKEENKSFTK

SEQ ID NO: 754079 - protein, 89 aa, Homo sapiens
MAINCVFTRGRSHGVAVRQAVRNPGSSGMRTSGEKWLDTAAASKLLLSTSHQHLPLSLSLPPFLQEETLWGQGRFFVSEHKEENKSFTK

SEQ ID NO: 754080 - protein, 409 aa, Homo sapiens
MGEKPGTRVFKKSSPNCKLTVYLGKRDFVDHLDKVDPVDGVVLVDPDYLKDRKVFVTLTCAFRYGREDLDVLGLSFRKDLFIATYQAFPPVPNPPRPPTRLQDRLLRKLGQHAHPFFFTIPQNLPCSVTLQPGPEDTGKACGVDFEIRAFCAKSLEEKSHKRNSVRLVIRKVQFAPEKPGPQPSAETTRHFLMSDRSLHLEASLDKELYYHGEPLNVNVHVTNNSTKTVKKIKVSVRQYADICLFSTAQYKCPVAQLEQDDQVSPSSTFCKVYTITPLLSDNREKRGLALDGKLKHEDTNLASSTIVKEGANKEVLGILVSYRVKVKLVVSRGGDVSVELPFVLMHPKPHDHIPLPRPQSAAPETDVPVDTNLIEFDTNYATDDDIVFEDFARLRLKGMKDDDYDDQLC

SEQ ID NO: 754081 - protein, 477 aa, Homo sapiens
ANGPACLLERAGSAAARAIRLTHLAPVPQDQSGAGREGEEARARRARVRIGAGRSRDLGSGRGGCERAANRAGGGRAHHGGETRDQLTVYLGKRDFVDHLDKVDPVDGVVLVDPDYLKDRKVFVTLTCAFRYGREDLDVLGLSFRKDLFIATYQAFPPVPNPPRPPTRLQDRLLRKLGQHAHPFFFTIPQNLPCSVTLQPGPEDTGKACGVDFEIRAFCAKSLEEKSHKRNSVRLVIRKVQFAPEKPGPQPSAETTRHFLMSDRSLHLEASLDKELYYHGEPLNVNVHVTNNSTKTVKKIKVSVRQYADICLFSTAQYKCPVAQLEQDDQVSPSSTFCKVYTITPLLSDNREKRGLALDGKLKHEDTNLASSTIVKEGANKEVLGILVSYRVKVKLVVSRGGDVSVELPFVLMHPKPHDHIPLPRPQSAAPETDVPVDTNLIEFDTNYATDDDIVFEDFARLRLKGMKDDDYDDQLC

SEQ ID NO: 754082 - protein, 498 aa, Homo sapiens
MGEKPGTRVFKKSSPNCKLTVYLGKRDFVDHLDKVDPVDGVVLVDPDYLKDRKVFVTLTCAFRYGREDLDVLGLSFRKDLFIATYQAFPPVPNPPRPPTRLQDRLLRKLGQHAHPFFFTIPQNLPCSVTLQPGPEDTGKACGVDFEIRAFCAKSLEEKSHKRNSVRLVIRKVQFAPEKPGPQPSAETTRHFLMSDRSLHLEASLDKELYYHGEPLNVNVHVTNNSTKTVKKIKVSGRRWGLEGGLRGGRYCTGGSWCDLSPGHFPVRETHQGSKNLGCSRMIRGASVFTASVGSMGEATPRGLELWCGGGLCSIQSCLTPSHPTVRQYADICLFSTAQYKCPVAQLEQDDQVSPSSTFCKVYTITPLLSDNREKRGLALDGKLKHEDTNLASSTIVKEGANKEVLGILVSYRVKVKLVVSRGGDVSVELPFVLMHPKPHDHIPLPRPQSAAPETDVPVDTNLIEFDTNYATDDDIVFEDFARLRLKGMKDDDYDDQLC

SEQ ID NO: 754083 - protein, 385 aa, Homo sapiens
MLLREEQRLLVPGDWGSGAPDHSSHPPLPVFVTLTCAFRYGREDLDVLGLSFRKDLFIATYQAFPPVPNPPRPPTRLQDRLLRKLGQHAHPFFFTIPQNLPCSVTLQPGPEDTGKACGVDFEIRAFCAKSLEEKSHKRNSVRLVIRKVQFAPEKPGPQPSAETTRHFLMSDRSLHLEASLDKELYYHGEPLNVNVHVTNNSTKTVKKIKVSVRQYADICLFSTAQYKCPVAQLEQDDQVSPSSTFCKVYTITPLLSDNREKRGLALDGKLKHEDTNLASSTIVKEGANKEVLGILVSYRVKVKLVVSRGGDVSVELPFVLMHPKPHDHIPLPRPQSAAPETDVPVDTNLIEFDTNYATDDDIVFEDFARLRLKGMKDDDYDDQLC

SEQ ID NO: 754084 - protein, 207 aa, Homo sapiens
MGEKPGTRVFKKSSPNCKLTVYLGKRDFVDHLDKVDPVDGVVLVDPDYLKDRKVFVTLTCAFRYGREDLDVLGLSFRKDLFIATYQAFPPVPNPPRPPTRLQDRLLRKLGQHAHPFFFTIPQNLPCSVTLQPGPEDTGKACGVDFEIRAFCAKSLEEKSHKRNSVRLVIRKVQFAPEKPGPQPSAETTRHFLMSDRSLHLEASLDKE

SEQ ID NO: 754085 - protein, 378 aa, Homo sapiens
TQASRGRVLMAGRGGCERAANRAGGGRAHHGGETRDQLDVLGLSFRKDLFIATYQAFPPVPNPPRPPTRLQDRLLRKLGQHAHPFFFTIPQNLPCSVTLQPGPEDTGKACGVDFEIRAFCAKSLEEKSHKRNSVRLVIRKVQFAPEKPGPQPSAETTRHFLMSDRSLHLEASLDKELYYHGEPLNVNVHVTNNSTKTVKKIKVSVRQYADICLFSTAQYKCPVAQLEQDDQVSPSSTFCKVYTITPLLSDNREKRGLALDGKLKHEDTNLASSTIVKEGANKEVLGILVSYRVKVKLVVSRGGDVSVELPFVLMHPKPHDHIPLPRPQSAAPETDVPVDTNLIEFDTNYATDDDIVFEDFARLRLKGMKDDDYDDQLC

SEQ ID NO: 754086 - protein, 409 aa, Homo sapiens; identical to SEQ ID NO: 754080

SEQ ID NO: 754087 - protein, 133 aa, Homo sapiens
GRVGRPTRRRGLALDGKLKHEDTNLASSTIVKEGANKEVLGILVSYRVKVKLVVSRGGDVSVELPFVLMHPKPHDHIPLPRPQSAAPETDVPVDTNLIEFDTNYATDDDIVFEDFARLRLKGMKDDDYDDQLC

SEQ ID NO: 754088 - protein, 442 aa, Homo sapiens
MGEKPGTRVFKKSSPNCKLTVYLGKRDFVDHLDKVDPVDGVVLVDPDYLKDRKVFVTLTCAFRYGREDLDVLGLSFRKDLFIATYQAFPPVPNPPRPPTRLQDRLLRKLGQHAHPFFFTIPQNLPCSVTLQPGPEDTGKACGVDFEIRAFCAKSLEEKSHKRNSVRLVIRKVQFAPEKPGPQPSAETTRHFLMSDRSLHLEASLDKELYYHGEPLNVNVHVTNNSTKTVKKIKVSGRRWGLEGGLRGGRYCTGGSWCDLSPGHFPVRETHQGSKNLGCSRMIRGASVFTASVGSMGGPRHGVWSCGVVVAVCSIQSCLTPSHPTVRQYADICLFSTAQYKCPVAQLEQDDQVSPSSTFCKVYTITPLLSDNREKRGLALDGKLKHEDTNLASSTIVKEGANKEVLGILVSYRVKVKLVVSRGGDVSVELPFVLTDPSLQTPW

SEQ ID NO: 754089 - protein, 201 aa, Homo sapiens
  misc_feature (95)..(95): Xaa can be any naturally occurring amino acid
MGEKPGTRVFKKSSPNCKLTVYLGKRDFVDHLDKVDPVDGVVLVDPDYLKDRKVFVTLTCAFRYGREDLDVLGLSFRKDLFIATYQAFPRSDEWXVKAAGCQCRAMLQCAFVRTANNDDEGTLKPRGKKATKRENGAARMANNARERLRVTRHTNEAFQKSSAAWMQAPPQECHAPNQAPDPPQAESASSVMEAARSEKGN

SEQ ID NO: 754090 - protein, 101 aa, Homo sapiens
MGEKPGTRVFKKSSPNCKLTVYLGKRDFVDHLDKVDPVDGVVLVDPDYLKDRKVFVTLTCAFRYGREDLDVLGLSFRKDLFIATYQAFPREGGGGRWGGGT

SEQ ID NO: 754091 - protein, 117 aa, Homo sapiens [sequence omitted]

SEQ ID NO: 754092 - protein, 141 aa, Homo sapiens
MGEKPGTRVFKKSSPNCKLTVYLGKRDFVDHLDKVDPVDGVVLVDPDYLKDRKVFVTLTCAFRYGREDLDVLGLSFRKDLFIATYQAFPRRWRKEQVRVTKTWRSCRYIRAPEVPTPFYMRQYSEQVCHCVRHAWSQVPDG

SEQ ID NO: 754093 - protein, 109 aa, Homo sapiens
MGEKPGTSGVSLSVLLRVFKKSSPNCKLTVYLGKRDFVDHLDKVDPVDGVVLVDPDYLKDRKVFVTLTCAFRYGREDLDVLGLSFRKDLFIATYQAFPREGGGGRWGGG

SEQ ID NO: 754094 - protein, 409 aa, Homo sapiens; identical to SEQ ID NO: 754080

SEQ ID NO: 754095 - protein, 421 aa, Homo sapiens
MGEKPGTRVFKKSSPNCKLTVYLGKRDFVDHLDKVDPVDGVVLVDPDYLKDRKVFVTLTCAFRYGREDLDVLGLSFRKDLFIATYQAFPPVPNPPRPPTRLQDRLLRKLGQHAHPFFFTIPQNLPCSVTLQPGPEDTGKACGVDFEIRAFCAKSLEEKSHKRNSVRLVIRKVQFAPEKPGPQPSAETTRHFLMSDRSLHLEASLDKELYYHGEPLNVNVHVTNNSTKTVKKIKVSVRQYADICLFSTAQYKCPVAQLEQDDQVSPSSTFCKVYTITPLLSDNREKRGLALDGKLKHEDTNLASSTIVKEGANKEVLGILVSYRVKVKLVVSRGGDVSVELPFVLMHPKPHDHIPLPRPQSAPTPTPPPPVPPAAPETDVPVDTNLIEFDTNYATDDDIVFEDFARLRLKGMKDDDYDDQLC

SEQ ID NO: 754096 - protein, 394 aa, Homo sapiens
MPQLTVYLGKRDFVDHLDKVDPVDGVVLVDPDYLKDRKVFVTLTCAFRYGREDLDVLGLSFRKDLFIATYQAFPPVPNPPRPPTRLQDRLLRKLGQHAHPFFFTIPQNLPCSVTLQPGPEDTGKACGVDFEIRAFCAKSLEEKSHKRNSVRLVIRKVQFAPEKPGPQPSAETTRHFLMSDRSLHLEASLDKELYYHGEPLNVNVHVTNNSTKTVKKIKVSVRQYADICLFSTAQYKCPVAQLEQDDQVSPSSTFCKVYTITPLLSDNREKRGLALDGKLKHEDTNLASSTIVKEGANKEVLGILVSYRVKVKLVVSRGGDVSVELPFVLMHPKPHDHIPLPRPQSAAPETDVPVDTNLIEFDTNYATDDDIVFEDFARLRLKGMKDDDYDDQLC

SEQ ID NO: 754097 - protein, 408 aa, Homo sapiens
TQASRGRVLIGRARRLRASREPSGRRARAPWGRNPGPDGVVLVDPDYLKDRKVFVTLTCAFRYGREDLDVLGLSFRKDLFIATYQAFPPVPNPPRPPTRLQDRLLRKLGQHAHPFFFTIPQNLPCSVTLQPGPEDTGKACGVDFEIRAFCAKSLEEKSHKRNSVRLVIRKVQFAPEKPGPQPSAETTRHFLMSDRSLHLEASLDKELYYHGEPLNVNVHVTNNSTKTVKKIKVSVRQYADICLFSTAQYKCPVAQLEQDDQVSPSSTFCKVYTITPLLSDNREKRGLALDGKLKHEDTNLASSTIVKEGANKEVLGILVSYRVKVKLVVSRGGDVSVELPFVLMHPKPHDHIPLPRPQSAAPETDVPVDTNLIEFDTNYATDDDIVFEDFARLRLKGMKDDDYDDQLC

SEQ ID NO: 754098 - protein, 313 aa, Homo sapiens
SGSKEFGTRLRKLGQHAHPFFFTIPQNLPCSVTLQPGPEDTGKACGVDFEIRAFCAKSLEEKSHKRNSVRLVIRKVQFAPEKPGPQPSAETTRHFLMSDRSLHLEASLDKELYYHGEPLNVNVHVTNNSTKTVKKIKVSVRQYADICLFSTAQYKCPVAQLEQDDQVSPSSTFCKVYTITPLLSDNREKRGLALDGKLKHEDTNLASSTIVKEGANKEVLGILVSYRVKVKLVVSRGGDVSVELPFVLMHPKPHDHIPLPRPQSAAPETDVPVDTNLIEFDTNYATDDDIVFEDFARLRLKGMKDDDYDDQLC

SEQ ID NO: 754099 - protein, 298 aa, Homo sapiens
MTPSPQKLYYHGEPLNVNVHVTNNSTKTVKKIKVSGRRWGLEGGLRGGRYCTGGSWCDLSPGHFPVRETHQGSKNLGCSRMIRGASVFTASVGSMGEATPRGLELWCGGGLCSIQSCLTPSHPTVRQYADICLFSTAQYKCPVAQLEQDDQVSPSSTFCKVYTITPLLSDNREKRGLALDGKLKHEDTNLASSTIVKEGANKEVLGILVSYRVKVKLVVSRGGDVSVELPFVLMHPKPHDHIPLPRPQSAAPETDVPVDTNLIEFDTNYATDDDIVFEDFARLRLKGMKDDDYDDQLC

SEQ ID NO: 754100 - protein, 237 aa, Homo sapiens
MGEKPGTRVFKKSSPNCKLTVYLGKRDFVDHLDKVDPVDGVVLVDPDYLKDRKVFVTLTCAFRYGREDLDVLGLSFRKDLFIATYQAFPPVPNPPRPPTRLQDRLLRKLGQHAHPFFFTIPQNLPCSVTLQPGPEDTGKACGVDFEIRAFCAKSLEEKSHKRNSVRLVIRKVQFAPEKPGPQPSAETTRHFLMSDRSLHLEASLDKELPPFLQEETLWGQGRFFVSEHKEENKSFTK

SEQ ID NO: 754101 - protein, 203 aa, Homo sapiens
SQWPRVSAEERAGSAAARAIRLTHLAPVPQDQSGAGREGEEARARRARVRIGAGRSRDLGSGRGGCERAANRAGGGRAHHGGETRDQLTVYLGKRDFVDHLDKVDPVDGVVLVDPDYLKDRKVFVTLTCAFRYGREDLDVLGLSFRKDLFIATYQAFPRRWRKEQVRVKRGGGGGGQLGWETDLAGGNGGPRKDGGIGATFRH

SEQ ID NO: 754102 - protein, 373 aa, Homo sapiens
LRLVEAGCYSAGRGGCERAANRAGGGRAHHGGETRDQIPQNLPCSVTLQPGPEDTGKACGVDFEIRAFCAKSLEEKSHKRNSVRLVIRKVQFAPEKPGPQPSAETTRHFLMSDRSLHLEASLDKELYYHGEPLNVNVHVTNNSTKTVKKIKVSVRQYADICLFSTAQYKCPVAQLEQDDQVSPSSTFCKVYTITPLLSDNREKRGLALDGKLKHEDTNLASSTIVKEGANKEVLGILVSYRVKVKLVVSRGGDVSVSCLCSNAPQRPTDNIPDSPEPSDGREDTHDPMGNSANPRRQLRQTPHNAPRKEAPSGGYEDTMAPDKPQTTGAQQDSRNKERTQTTATANEETETSNAPARRHATTRDGHHKKPQAQ

SEQ ID NO: 754103 - protein, 368 aa, Homo sapiens
LEFSGRCILEADLEDRDGRVYAKASDLYITLPLALLFLIVRYFFELYVATPLAALLNIKEKTRLRAPPNATLEHFYLTSGKQPKQVEVELLSRQSGLSGRQVERWFRRRRNQDRPSLLKKFREASWRFTFYLIAFIAGMAVIVDKPWFYDMKKVWEGYPIQSTIPSQYWYYMIELSFYWSLLFSIASDVKRKDFKEQIIHHVATIILISFSWFANYIRAGTLIMALHDSSDYLLESAKMFNYAGWKNTCNNIFIVFAIVFIITRLVILPFWILHCTLVYPLELYPAFFGYYFFNSMMGVLQLLHIFWAYLILRMAHKFITGKLVEDERSDREETESSEGEEAAAGGGAKSRPLANGHPILNNNHRKND

SEQ ID NO: 754104 - protein, 246 aa, Homo sapiens
WLLGTFSEDCACPGCGMAVTVDKPWFYDMKKVWEGYPIQSTIPSQYWYYMIELSFYWSLLFSIASDVKRKDFKEQIIHHVATIILISFSWFANYIRAGTLIMALHDSSDYLLESAKMFNYAGWKNTCNNIFIVFAIVFIITRLVILPFWILHCTLVYPLELYPAFFGYYFFNSMMGVLQLLHIFWAYLILRMAHKFITGKLVEDERSDREETESSEGEEAAAGGGAKSRPLANGHPILNNNHRKND

SEQ ID NO: 754105 - protein, 456 aa, Homo sapiens
FFFPGWARAQLDWARRAAAAAPAAGGGGRARAGAGRRAGGRGRRGAGSQASGPRSNHPSRRSTRSSGPGPANAAAGMLQTLYDYFWWERLWLPVNLTWADLEDRDGRVYAKASDLYITLPLALLFLIVRYFFELYVATPLAALLNIKEKTRLRAPPNATLEHFYLTSGKQPKQVEVELLSRQSGLSGRQVERWFRRRRNQDRPSLLKKFREASWRFTFYLIAFIAGMAVIVDKPWFYDMKKVWEGYPIQSTIPSQYWYYMIELSFYWSLLFSIASDVKRKDFKEQIIHHVATIILISFSWFANYIRAGTLIMALHDSSDYLLESAKMFNYAGWKNTCNNIFIVFAIVFIITRLVILPFWILHCTLVYPLELYPAFFGYYFFNSMMGVLQLLHIFWAYLILRMAHKFITGKLVEDERSDREETESSEGEEAAAGGGAKSRPLANGHPILNNNHRKND

SEQ ID NO: 754106 - protein, 456 aa, Homo sapiens; identical to SEQ ID NO: 754105

SEQ ID NO: 754107 - protein, 380 aa, Homo sapiens
MLQTLYDYFWWERLWLPVNLTWADLEDRDGRVYAKASDLYITLPLALLFLIVRYFFELYVATPLAALLNIKEKTRLRAPPNATLEHFYLTSGKQPKQVEVELLSRQSGLSGRQVERWFRRRRNQDRPSLLKKFREASWRFTFYLIAFIAGMAVIVDKPWFYDMKKVWEGYPIQSTIPSQYWYYMIELSFYWSLLFSIASDVKRKDFKEQIIHHVATIILISFSWFANYIRAGTLIMALHDSSDYLLESAKMFNYAGWKNTCNNIFIVFAIVFIITRLVILPFWILHCTLVYPLELYPAFFGYYFFNSMMGVLQLLHIFWAYLILRMAHKFITGKLVEDERSDREETESSEGEEAAAGGGAKSRPLANGHPILNNNHRKND

SEQ ID NO: 754108 - protein, 456 aa, Homo sapiens; identical to SEQ ID NO: 754105

SEQ ID NO: 754109 - protein, 456 aa, Homo sapiens; identical to SEQ ID NO: 754105

SEQ ID NO: 754110 - protein, 456 aa, Homo sapiens; identical to SEQ ID NO: 754105

SEQ ID NO: 754111 - protein, 380 aa, Homo sapiens; identical to SEQ ID NO: 754107

SEQ ID NO: 754112 - protein, 380 aa, Homo sapiens; identical to SEQ ID NO: 754107

SEQ ID NO: 754113 - protein, 450 aa, Homo sapiens
MLQTLYDYFWWERLWLPVNLTWADLEDRDGRVYAKASDLYITLPLALLFLIVRYFFELYVATPLAALLNIKEKTRLRAPPNATLEHFYLTSGKQPKQVEVELLSRQSGLSGRQVERWFRRRRNQDRPSLLKKFREASWRFTFYLIAFIAGMAVIVDKPWFYDMKKVWEGYPIQSTIPSQYWYYMIELSFYWSLLFSIASDVKRKDFKEQIIHHVATIILISFSWFANYIRAGTLIMALHDSSDYLLEAGFLKSRDPGAGSSVPLVFFGREVRGGNLEDDIPGTKEEGTESVLLTGVYICMYSRESGAHDDGWGLSMQSAKMFNYAGWKNTCNNIFIVFAIVFIITRLVILPFWILHCTLVYPLELYPAFFGYYFFNSMMGVLQLLHIFWAYLILRMAHKFITGKLVEDERSDREETESSEGEEAAAGGGAKSRPLANGHPILNNNHRKND

SEQ ID NO: 754114 - protein, 456 aa, Homo sapiens; identical to SEQ ID NO: 754105

SEQ ID NO: 754115 - protein, 151 aa, Homo sapiens
MYSRESGAHDDGWGLSMQSAKMFNYAGWKNTCNNIFIVFAIVFIITRLVILPFWILHCTLVYPLELYPAFFGYYFFNSMMGVLQLLHIFWAYLILRMAHKFITGKLVEDERSDREETESSEGEEAAAGGGAKSRPLANGHPILNNNHRKND

SEQ ID NO: 754116 - protein, 456 aa, Homo sapiens; identical to SEQ ID NO: 754105

SEQ ID NO: 754117 - protein, 456 aa, Homo sapiens; identical to SEQ ID NO: 754105

SEQ ID NO: 754118 - protein, 117 aa, Homo sapiens
HCKGRRTSRITPEWYHCPYWILHCTLVYPLELYPAFFGYYFFNSMMGVLQLLHIFWAYLILRMAHKFITGKLVEDERSDREETESSEGEEAAAGGGAKSRPLANGHPILNNNHRKND

SEQ ID NO: 754119 - protein, 456 aa, Homo sapiens; identical to SEQ ID NO: 754105

SEQ ID NO: 754120 - protein, 392 aa, Homo sapiens
FFFPGWARAQLDWARRAAAAAPAAGGGGRARAGAGRRAGGRGRRGAGSQASGPRSNHPSRRSTRSSGPGPANAAAGMLQTLYDYFWWERLWLPVNLTWADLEDRDGRVYAKASDLYITLPLALLFLIVRYFFELYVATPLAALLNIKEKTRLRAPPNATLEHFYLTSGKQPKQVEVELLSRQSGLSGRQVERWFRRRRNQDRPSLLKKFREASWRFTFYLIAFIAGMAVIVDKPWFYDMKKVWEGYPIQSTIPSQYWYYMIELSFYWSLLFSIASDVKRKDFKEQIIHHVATIILISFSWFANYIRAGTLIMALHDSSDYLLESAKMFNYAGWKNTCNNIFIVFAIVFIITRLVILPFWILHCTLVYPLELYPAFRLVYSVLSSLHDVTQYI

SEQ ID NO: 754121 - protein, 67 aa, Homo sapiens
GNTEKKEQKTQAGTGPECPGQASGPRSNHPSRRSTRSSGPGPANAAAGYSLLMPSPLPLTQDAPDLV

SEQ ID NO: 754122 - protein, 398 aa, Homo sapiens
FFFPGWARAQLDWARRAAAAAPAAGGGGRARAGAGRRAGGRGRRGAGSQASGPRSNHPSRRSTRSSGPGPANAAAGYVATPLAALLNIKEKTRLRAPPNATLEHFYLTSGKQPKQVEVELLSRQSGLSGRQVERWFRRRRNQDRPSLLKKFREASWRFTFYLIAFIAGMAVIVDKPWFYDMKKVWEGYPIQSTIPSQYWYYMIELSFYWSLLFSIASDVKRKDFKEQIIHHVATIILISFSWFANYIRAGTLIMALHDSSDYLLESAKMFNYAGWKNTCNNIFIVFAIVFIITRLVILPFWILHCTLVYPLELYPAFFGYYFFNSMMGVLQLLHIFWAYLILRMAHKFITGKLVEDERSDREETESSEGEEAAAGGGAKSRPLANGHPILNNNHRKND

SEQ ID NO: 754123 - protein, 448 aa, Homo sapiens
  misc_feature (6)..(6): Xaa can be any naturally occurring amino acid
  misc_feature (8)..(8): Xaa can be any naturally occurring amino acid
SGWYPXSXGISSTTAAGGGGRARAGAGRRAGGRGRRGAGSQASGPRSNHPSRRSTRSSGPGPANAAAGMLQTLYDYFWWERLWLPVNLTWADLEDRDGRVYAKASDLYITLPLALLFLIVRYFFELYVATPLAALLNIKEKTRLRAPPNATLEHFYLTSGKQPKQVEVELLSRQSGLSGRQVERWFRRRRNQDRPSLLKKFREASWRFTFYLIAFIAGMAVIVDKPWFYDMKKVWEGYPIQSTIPSQYWYYMIELSFYWSLLFSIASDVKRKDFKEQIIHHVATIILISFSWFANYIRAGTLIMALHDSSDYLLESAKMFNYAGWKNTCNNIFIVFAIVFIITRLVILPFWILHCTLVYPLELYPAFFGYYFFNSMMGVLQLLHIFWAYLILRMAHKFITGKLVEDERSDREETESSEGEEAAAGGGAKSRPLANGHPILNNNHRKND

SEQ ID NO: 754124 - protein, 428 aa, Homo sapiens
GNTEKKEQKTQAGTGPECPGQASGPRSNHPSRRSTRSSGPGPANAAAGMLQTLYDYFWWERLWLPVNLTWADLEDRDGRVYAKASDLYITLPLALLFLIVRYFFELYVATPLAALLNIKEKTRLRAPPNATLEHFYLTSGKQPKQVEVELLSRQSGLSGRQVERWFRRRRNQDRPSLLKKFREASWRFTFYLIAFIAGMAVIVDKPWFYDMKKVWEGYPIQSTIPSQYWYYMIELSFYWSLLFSIASDVKRKDFKEQIIHHVATIILISFSWFANYIRAGTLIMALHDSSDYLLESAKMFNYAGWKNTCNNIFIVFAIVFIITRLVILPFWILHCTLVYPLELYPAFFGYYFFNSMMGVLQLLHIFWAYLILRMAHKFITGKLVEDERSDREETESSEGEEAAAGGGAKSRPLANGHPILNNNHRKND

SEQ ID NO: 754125 - protein, 456 aa, Homo sapiens; identical to SEQ ID NO: 754105

SEQ ID NO: 754126 - protein, 380 aa, Homo sapiens; identical to SEQ ID NO: 754107

SEQ ID NO: 754127 - protein, 230 aa, Homo sapiens
MAVIVDKPWFYDMKKVWEGYPIQSTIPSQYWYYMIELSFYWSLLFSIASDVKRKDFKEQIIHHVATIILISFSWFANYIRAGTLIMALHDSSDYLLESAKMFNYAGWKNTCNNIFIVFAIVFIITRLVILPFWILHCTLVYPLELYPAFFGYYFFNSMMGVLQLLHIFWAYLILRMAHKFITGKLVEDERSDREETESSEGEEAAAGGGAKSRPLANGHPILNNNHRKND

SEQ ID NO: 754128 - protein, 240 aa, Homo sapiens
WEEAAAWGGAKSRPLANGHPILNNNHRKNDWTISTIPSQYWYYMIELSFYWSLLFSIASDVKRKDFKEQIIHHVATIILISFSWFANYIRAGTLIMALHDSSDYLLESAKMFNYAGWKNTCNNIFIVFAIVFIITRLVILPFWILHCTLVYPLELYPAFFGYYFFNSMMGVLQLLHIFWAYLILRMAHKFITGKLVEDERSDREETESSEGEEAAAGGGAKSRPLANGHPILNNNHRKND

SEQ ID NO: 754129 - protein, 456 aa, Homo sapiens; identical to SEQ ID NO: 754105

SEQ ID NO: 754130 - protein, 135 aa, Homo sapiens
ETPVFICATAGWKNTCNNIFIVFAIVFIITRLVILPFWILHCTLVYPLELYPAFFGYYFFNSMMGVLQLLHIFWAYLILRMAHKFITGKLVEDERSDREETESSEGEEAAAGGGAKSRPLANGHPILNNNHRKND

SEQ ID NO: 754131 - protein, 456 aa, Homo sapiens; identical to SEQ ID NO: 754105

SEQ ID NO: 754132 - protein, 456 aa, Homo sapiens; identical to SEQ ID NO: 754105

SEQ ID NO: 754133 - protein, 359 aa, Homo sapiens
FFFPGWARAQLDWARRAAAAAPAAGGGGRARAGAGRRAGGRGRRGAGSQASGPRSNHPSRRSTRSSGPGPANAAAGMLQTLYDYFWWERLWLPVNLTWADLEDRDGRVYAKASDLYITLPLALLFLIVRYFFELYVATPLAALLNIKEKTRLRAPPNATLEHFYLTSGKQPKQVEVELLSRQSGLSGRQVERWFRRRRNQDRPSLLKKFREASWRFTFYLIAFIAGMAVIVDKPWFYDMKKVWEGYPIQSTIPSQYWYYMIELSFYWSLLFSIASDVKRKDFKEQIIHHVATIILISFSWFANYIRAGTLIMALHDSSDYLLESAKMFNYAGWKNTCNNIFIVFAIVFIITRLVILPFW

SEQ ID NO: 754134 - protein, 316 aa, Homo sapiens
SDAISQRRRRGSRFRGSSAAVAAANRPDASSLAGLPLELTKAGSAVQAAAATGPAAGQLPGTRVAGFLDEVMKKYGSLVPLSEKEVLGRLKDVFNEDFSNRKPFINREITNYRARHQKCNFRIFYNKHMLDMDDLATLDGQNWLNDQVINMYGELIMDAVPDKVHFFNSFFHRQLVTKGYNGVKRWTKKVDLFKKSLLLIPIHLEVHWSLITVTLSNRIISFYDSQGIHFKFCVENIRKYLLTEAREKNRPEFLQGWQTAVTKCIPQQKNDSDCGVFVLQYCKCLALEQPFQFSQEDMPRVRKRIYKELCECRLMD

SEQ ID NO: 754135 - protein, 831 aa, Homo sapiens
GRDKPAPASRQPLQRKLGGCGRGEQAGRLVAGGASLGADEGGVRGPGCCRDGAGGGAAARNEGSSCIQISLCIRKMKKQRKILWRKGIHLAFSEKWNTGFGGFKKFYFHQHLCILKAKLGRPVTWNRQLRHFQGRKKALQIQKTWIKDEPLCAKTKFNVATQNVSTLSSKVKRKDAKHFISSSKTLLRLQAEKLLSSAKNSDHEYCREKNLLKAVTDFPSNSALGQANGHRPRTDPQPSDFPMKFNGESQSPGESGTIVVTLNNHKRKGFCYGCCQGPEHHRNGGPLIPKKFQLNQHRRIKLSPLMMYEKLSMIRFRYRILRSQHFRTKSKVCKLRKAQRSWVQKVTGDHQETRRENGEGGSCSPFPSPEPKDPSCRHQPYFPDMDSSAVVKGTNSHVPDCHTKGSSFLGKELSLDEAFPDQQNGSATNAWDQSSCSSPKWECTELIHDIPLPEHRSNTMFISETEREIMTLGQENQTSSVSDDRVKLSVSGADTSVSSVDGPVSQKAVQNENSYQMEEDGSLKQSILSSELLDHPYCKSPLEAPLVCSGLKLENQVGGGKNSQKASPVDDEQLSVCLSGFLDEVMKKYGSLVPLSEKEVLGRLKDVFNEDFSNRKPFINREITNYRARHQKCNFRIFYNKHMLDMDDLATLDGQNWLNDQVINMYGELIMDAVPDKVHFFNSFFHRQLVTKGYNGVKRWTKKVDLFKKSLLLIPIHLEVHWSLITVTLSNRIISFYDSQGIHFKFCVENIRKYLLTEAREKNRPEFLQGWQTAVTKCIPQQKNDSDCGVFVLQYCKCLALEQPFQFSQEDMPRVRKRIYKELCGWREEGR

SEQ ID NO: 754136 - protein, 806 aa, Homo sapiens
GRDKPAPASRQPLQRKLGGCGRGEQAGRLVAGGASLGADEGGVRGPGCCRDGAGGGAAARNEGSSCIQISLCIRKMKKQRKILWRKGIHLAFSEKWNTGFGGFKKFYFHQHLCILKAKLGRPVTWNRQLRHFQGRKKALQIQKTWIKDEPLCAKTKFNVATQNVSTLSSKVKRKDAKHFISSSKTLLRLQAEKLLSSAKNSDHEYCREKNLLKAVTDFPSNSALGQANGHRPRTDPQPSDFPMKFNGESQSPGESGTIVVTLNNHKRKGFCYGCCQGPEHHRNGGPLIPKKFQLNQHRRIKLSPLMMYEKLSMIRFRYRILRSQHFRTKSKVCKLRKAQRSWVQKVTGDHQETRRENGEGGSCSPFPSPEPKDPSCRHQPYFPDMDSSAVVKGTNSHVPDCHTKGSSFLGKELSLDEAFPDQQNGSATNAWDQSSCSSPKWECTELIHDIPLPEHRSNTMFISETEREIMTLGQENQTSSVSDDRVKLSVSGADTSVSSVDGPVSQKAVQNENSYQMEEDGSLKQSILSSELLDHPYCKSPLEAPLVCSGLKLENQVGGGKNSQKASPVDDEQLSVCLSGFLDEVMKKYGSLVPLSEKEVLGRLKDVFNEDFSNRKPFINREITNYRARHQKCNFRIFYNKHMLDMDDLATLDGQNWLNDQVINMYGELIMDAVPDKVHFFNSFFHRQLVTKGYNGVKRWTKKVDLFKKSLLLIPIHLEVHWSLITVTLSNRIISFYDSQGIHFKFCVENIRKYLLTEAREKNRPEFLQGWQTAVTKCIPQQKNDSDCGVFVLQVKKHLLFGTYNV

SEQ ID NO: 754137 - protein, 830 aa, Homo sapiens
GRDKPAPASRQPLQRKLGGCGRGEQAGRLVAGGASLGADEGGVRGPGCCRDGAGGGAAARNEGSSCIQISLCIRKMKKQRKILWRKGIHLAFSEKWNTGFGGFKKFYFHQHLCILKAKLGRPVTWNRQLRHFQGRKKALQIQKTWIKDEPLCAKTKFNVATQNVSTLSSKVKRKDAKHFISSSKTLLRLQAEKLLSSAKNSDHEYCREKNLLKAVTDFPSNSALGQANGHRPRTDPQPSDFPMKFNGESQSPGESGTIVVTLNNHKRKGFCYGCCQGPEHHRNGGPLIPKKFQLNQHRRIKLSPLMMYEKLSMIRFRYRILRSQHFRTKSKVCKLRKAQRSWVQKVTGDHQETRRENGEGGSCSPFPSPEPKDPSCRHQPYFPDMDSSAVVKGTNSHVPDCHTKGSSFLGKELSLDEAFPDQQNGSATNAWDQSSCSSPKWECTELIHDIPLPEHRSNTMFISETEREIMTLGQENQTSSVSDDRVKLSVSGADTSVSSVDGPVSQKAVQNENSYQMEEDGSLKQSILSSELLDHPYCKSPLEAPLVCSGLKLENQVGGGKNSQKASPVDDEQLSVCLSGFLDEVMKKYGSLVPLSEKEVLGRLKDVFNEDFSNRKPFINREITNYRARHQKCNFRIFYNKHMLDMDDLATLDGQNWLNDQVINMYGELIMDAVPDKVHFFNSFFHRQLVTKGYNGVKRWTKKVDLFKKSLLLIPIHLEVHWSLITVTLSNRIISFYDSQGIHFKFCVENIRKYLLTEAREKNRPEFLQGWQTAVTKCIPQQKNDSDCGVFVLQYCKCLALEQPFQFSQEDMPRVRKRIYKELCECRLMD

SEQ ID NO: 754138 - protein, 802 aa, Homo sapiens
GRDKPAPASRQPLQRKLGGCGRGEQAGRLVAGGASLGADEGGVRGPGCCRDGAGGGAAARNEGSSCIQISLCIRKMKKQRKILWRKGIHLAFSEKWNTGFGGFKKFYFHQHLCILKAKLGRPVTWNRQLRHFQGRKKALQIQKTWIKDEPLCAKTKFNVATQNVSTLSSKVKRKDAKHFISSSKTLLRLQAEKLLSSAKNSDHEYCREKNLLKAVTDFPSNSALGQANGHRPRTDPQPSDFPMKFNGESQSPGESGTIVVTLNNHKRKGFCYGCCQGPEHHRNGGPLIPKKFQLNQHRRIKLSPLMMYEKLSMIRFRYRILRSQHFRTKSKVCKLRKAQRSWVQKVTGDHQETRRENGEGGSCSPFPSPEPKDPSCRHQPYFPDMDSSAVVKGTNSHVPDCHTKGSSFLGKELSLDEAFPDQQNGSATNAWDQSSCSSPKWECTELIHDIPLPEHRSNTMFISETEREIMTLGQENQTSSVSDDRVKLSVSGADTSVSSVDGPVSQKAVQNENSYQMEEDGSLKQSILSSELLDHPYCKSPLEAPLVCSGLKLENQVGGGKNSQKASPVDDEQLSVCLSGFLDEVMKKYGSLVPLSEKEVLGRLKDVFNEDFSNRKPFINREITNYRARHQKCNFRIFYNKHMLDMDDLATLDGQNWLNDQVINMYGELIMDAVPDKVHFFNSFFHRQLVTKGYNGVKRWTKKVDLFKKSLLLIPIHLEVHWSLITVTLSNRIISFYDSQGIHFKFCVECIPQQKNDSDCGVFVLQYCKCLALEQPFQFSQEDMPRVRKRIYKELCECRLMD

SEQ ID NO: 754139 - protein, 812 aa, Homo sapiens
GRDKPAPASRQPLQRKLGGCGRGEQAGRLVAGGASLGADEGGVRGPGCCRDGAGGGAAARNEGSSCIQISLCIRKMKKQRKILWRKGIHLAFSEKWNTGFGGFKKFYFHQHLCILKAKLGRPVTWNRQLRHFQGRKKALQIQKTWIKDEPLCAKTKFNVATQNVSTLSSKVKRKDAKHFISSSKTLLRLQAEKLLSSAKNSDHEYCREKNLLKAVTDFPSNSALGQANGHRPRTDPQPSDFPMKFNGESQSPGESGTIVVTLNNHKRKGFCYGCCQGPEHHRNGGPLIPKKFQLNQHRRIKLSPLMMYEKLSMIRFRYRILRSQHFRTKSKVCKLRKAQRSWVQKVTGDHQETRRENGEGGSCSPFPSPEPKDPSCRHQPYFPDMDSSAVVKGTNSHVPDCHTKGSSFLGKELSLDEAFPDQQNGSATNAWDQSSCSSPKWECTELIHDIPLPEHRSNTMFISETEREIMTLGQENQTSSVSDDRVKLSVSGADTSVSSVDGPVSQKAVQNENSYQMEEDGSLKQSILSSELLDHPYCKSPLEAPLVCSGLKLENQVGGGKNSQKASPVDDEQLSVCLSGFLDEVMKKYGSLVPLSEKEVLGRLKDVFNEDFSNRKPFINREITNYRARHQKCNFRIFYNKHMLDMDDLATLDGQNWLNDQVINMYGELIMDAVPDKVHFFNSFFHRQLVTKGYNGVKRWTKKVDLFKKSLLLIPIHLEVHWSLITVTLSNRIISFYDSQGIHFKFCVENIRKYLLTEAREKNRPEFLQGWQTAVTKCIPQQKNDSDCGVFVLQYCSTPLDAFPFSGSSRTP

SEQ ID NO: 754140 - protein, 131 aa, Homo sapiens
LVRTEPPNRQKVAVLAHRRHSHSCGQLNYRDPHLPTGLAPSKAQDSKAYTSILYGNGPGYVFNSGVRPDVNESESETADLCHAAACTPDNKGTKTTQPPPCLYPKEDQAGLDPETSPIVGHDTPRPRAPPS

SEQ ID NO: 754141 - protein, 639 aa, Homo sapiens
MQGPWVLLLLGLRLQLSLGVIPGNEAPQAVPHTGHPLSQADLISTLPLATEEENPAFWNRQAAEALDAAKKLQPIQKVAKNLILFLGDGLGVPTVTATRILKGQKNGKLGPETPLAMDRFPYLALSKTYNVDRQVPDSAATATAYLCGVKANFQTIGLSAAARFNQCNTTRGNEVISVMNRAKQAGKSVGVVTTTRVQHASPAGTYAHTVNRNWYSDADMPASARQEGCQDIATQLISNMDIDVILGGGRKYMFPMGTPDPEYPADASQNGIRLDGKNLVQEWLAKHQGAWYVWNRTELMQASLDQSVTHLMGLFEPGDTKYEIHRDPTLDPSLMEMTEAALRLLSRNPRGFYLFVEGGRIDHGHHEGVAYQALTEAVMFDDAIERAGQLTSEEDTLTLVTADHSHVFSFGGYTLRGSSIFGLAPSKAQDSKAYTSILYGNGPGYVFNSGVRPDVNESESGSPDYQQQAAVPLSSETHGGEDVAVFARGPQAHLVHGVQEQSFVAHVMAFAACLEPYTACDLAPPRLHHRRRAPSCRVAATAGRDPAAAGGVRCSLSAPLRSYPAPHLRASCPVPRPEPPLPANTHRCPAVGPSPPRDKPASAGAAGPFFPPHPLQGAGAQGALGAEPGTSRTSPQVVL

SEQ ID NO: 754142 - protein, 612 aa, Homo sapiens
MQGPWVLLLLGLRLQLSLGVIPAEEENPAFWNRQAAEALDAAKKLQPIQKVAKNLILFLGDGLGVPTVTATRILKGQKNGKLGPETPLAMDRFPYLALSKTYNVDRQVPDSAATATAYLCGVKANFQTIGLSAAARFNQCNTTRGNEVISVMNRAKQAGKSVGVVTTTRVQHASPAGTYAHTVNRNWYSDADMPASARQEGCQDIATQLISNMDIDVILGGGRKYMFPMGTPDPEYPADASQNGIRLDGKNLVQEWLAKHQGAWYVWNRTELMQASLDQSVTHLMGLFEPGDTKYEIHRDPTLDPSLMEMTEAALRLLSRNPRGFYLFVEGGRIDHGHHEGVAYQALTEAVMFDDAIERAGQLTSEEDTLTLVTADHSHVFSFGGYTLRGSSIFGLAPSKAQDSKAYTSILYGNGPGYVFNSGVRPDVNESESGSPDYQQQAAVPLSSETHGGEDVAVFARGPQAHLVHGVQEQSFVAHVMAFAACLEPYTACDLAPPRLHHRRRAPSCRVAATAGRDPAAAGGVRCSLSAPLRSYPAPHLRASCPVPRPEPPLPANTHRCPAVGPSPPRDKPASAGAAGPFFPPHPLQGAGAQGALGAEPGTSRTSPQVVL

SEQ ID NO: 754143 - protein, 121 aa, Homo sapiens
DSHALELISLRNVCIHTNAQHKVNIFLGPFCLCQGQEVEAGNSSGPQYGRRQGGDGVAHPFSGYLASGRQQGGAGRPSVTDKPAILSSGLWESACSKPVHPSCSPKSWLKVLGWIHWRWAT

SEQ ID NO: 754144 - protein, 116 aa, Homo sapiens
MTSSPVKTVSCSEWSFKGVGTNCKMMYLEGWGLRRIFCCLPEALWQTGSARGGEREASVLFGKLAIKTGKGVLFSKKAGICFRTLSCPLIAVDSSQQHKEMKGKGRMQQAKLTLYL

SEQ ID NO: 754145 - protein, 114 aa, Homo sapiens
MRQHRQFMDRTHYLLTFSSSETLLRLLLRIVDRAPKGRTFGDVLQPAKPEYRVGEVAEVIFVGANPKNSVQNQTHQTFLTVEKYEATSTSWQIVCNDASWENSFLLAQGTPGSE

SEQ ID NO: 754146 - protein, 123 aa, Homo sapiens
MCLLLAFAPHQLIRGRPHSCPGLRGGLRRGRCTLLRSPTAGVEAADSEGRVGRNREGCGPGGTHCADGAGARTQLLTSLPALPWKSSRRRSLFSAFLFPSPRVGATVNFRFRRCGSGPEESQL

SEQ ID NO: 754147 - protein, 123 aa, Homo sapiens; identical to SEQ ID NO: 754146

SEQ ID NO: 754148 - protein, 323 aa, Homo sapiens
MGNLLKVLTREIENYPHFFLDFENAQPTEGEREIWNQISAVLQDSESILADLQAYKGAGPEIRDAIQNPNDIQLQEKAWNAVCPLVVRLKRFYEFSIRLEKALQSLLESLTCPPYTPTQHLEREQALAKEFAEILHFTLRFDELKMRNPAIQNDFSYYRRTISRNRINNMHLDIENEVNNEMANRMSLFYAEATPMLKTLSNATMHFVSENKTLPIENTTDCLSTMTSVCKVMLETPEYRSRFTSEETLMFCMRVMVGVIILYDHVHPVGAFCKTSKIDMKGCIKVLKEQAPDSVEGLLNALRFTTKHLNDESTSKQIRAMLQ

SEQ ID NO: 754149 - protein, 94 aa, Homo sapiens
STFYHHWHLNTPLGGLRLVLPTPATTITADTYLHMAPAGLETELPTPSQPPPTPAYTAQDPEDYPITATAVLCQLPRGPRICPPTQLTAATTSI

SEQ ID NO: 754150 - protein, 101 aa, Homo sapiens
MKPISRMDFAHRPLVTDDTFSSFTPHVFLSRFFFFVCLFVLRWSFTLVAQAGVQGDNSRVTGNSASQDQAISPASGSQIAGITGMCHRAQVTRIVCVVEMG

SEQ ID NO: 754151 - protein, 247 aa, Homo sapiens
MNKMGLNNPKKNHSRTMGATGLGFLLPWKQDNLNGTDCQGCNILYFSETTGSMCSELSLNRGLEARRKKDLKDSFLWRYGKVGCISLPLREMTAWINPPQISEIFQGYHQRVHGADALSLQTNSLRSRLSSQCLGQSFLLRTLERAVVSGHLGTSVATFMKKTKPTSSQDPPKSGRGFGTPAVGSTMRIKPPSLLDMSRSGRCYKSPGATTRVRIKTSPQDPPRRVHGIETSGGQVRKRHPVCSTQN

SEQ ID NO: 754152 - protein, 129 aa, Homo sapiens
MPQYSRTALPLSGQPSEAVFPLTRMGITPWACKSYLSSCNCMSKACPQGDGADPGWQTQSGEENAESHPLRDLLQSATILEVHDLEQQSLVGEGFFCWSGVSSHSLRVLSWGCYPVNWVIFSLHPNLGL

SEQ ID NO: 754153 - protein, 79 aa, Homo sapiens
TAPGWEPPDDPDTGSECSHPEVSPSPRFVAAKTQTNQSGKKAPASVVRCATLLHRTPPATQTQTFRTPNSGSPASKATA

SEQ ID NO: 754154 - protein, 1906 aa, Homo sapiens
VSSNNVLLNSQADDRVVINKPESAGFRDVGSEEIQDAENSAKTLKEIRTLLMEAENMALKRCNFPAPLARFRDISDISFIQSKKVVCFKEPSSTGVSNGDLLHRQPFTEESPSSRCIQKDIGTQTNLKCRRGIENWEFISSTTVRSPLQEAESKVSMALEETLRQYQAAKSVMRSEPEGCSGTIGNKIIIPMMTVIKSDSSSDASDGNGSCSWDSNLPESLESVSDVLLNFFPYVSPKTSITDSREEEGVSESEDGGGSSVDSLAAHVKNLLQCESSLNHAKEILRNAEEEESRVRAHAWNMKFNLAHDCGYSISELNEDDRRKVEEIKAELFGHGRTTDLSKGLQSPRGMGCKPEAVCSHIIIESHEKGCFRTLTSEHPQLDRHPCAFRSAGPSEMTRGRQNPSSCRAKHVNLSASLDQNNSHFKVWNSLQLKSHSPFQNFIPDEFKISKGLRMPFDEKMDPWLSELVEPAFVPPKEVDFHSSSQMPSPEPMKKFTTSITFSSHRHSKCISNSSVVKVGVTEGSQCTGASVGVFNSHFTEEQNPPRDLKQKTSSPSSFKMHSNSQDKEVTILAEGRRQSQKLPVDFERSFQEEKPLERSDFTGSHSEPSTRANCSNFKEIQISDNHTLISMGRPSSTLGVNRSSSRLGVKEKNVTITPDLPSCIFLEQRELFEQSKAPRADDHVRKHHSPSPQHQDYVAPDLPSCIFLEQRELFEQCKAPYVDHQMRENHSPLPQGQDSIASDLPSPISLEQCQSKAPGVDDQMNKHHFPLPQGQDCVVEKNNQHKPKSHISNINVEAKFNTVVSQSAPNHCTLAASASTPPSNRKALSCVHITLCPKTSSKLDSGTLDERFHSLDAASKARMNSEFNFDLHTVSSRSLEPTSKLLTSKPVAQDQESLGFLGPKSSLDFQVVQPSLPDSNTITQDLKTIPSQNSQIVTSRQIQVNISDFEGHSNPEGTPVFADRLPEKMKTPLSAFSEKLSSDAVTQITTESPEKTLFSSEIFINAEDRGHEIIEPGNQKLRKAPVKFASSSSVQQVTFSRGTDGQPLLLPYKPSGSTKMYYVPQLRQIPPSPDSKSDTTVESSHSGSNDAIAPDFPAQVLGTRDDDLSATVNIKHKEGIYSKRVVTKASLPVGEKPLQNENADASVQVLITGDENLSDKKQQEIHSTRAVTEAAQAKEKESLQKDTADSSAAAAAEHSAQVGDPEMKNLPDTKAITQKEEIHRKKTVPEEAWPNNKESLQINIEESECHSEFENTTRSVFRSAKFYIHHPVHLPSDQDICHESLGKSVFMRHSWKDFFQHHPDKHREHMCLPLPYQNMDKTKTDYTRIKSLSINVNLGNKEVMDTTKSQVRDYPKHNGQISDPQRDQKVTPEQTTQHTVSLNELWNKYRERQRQQRQPELGDRKELSLVDRLDRLAKILQNPITHSLQVSESTHDDSRGERSVKEWSGRQQQRNKLQKKKRFKSLEKSHKNTGELKKSKVLSHHRAGRSNQIKIEQIKFDKYILSKQPGFNYISNTSSDCRPSEESELLTDTTTNILSGTTSTVESDILTQTDREVALHERSSSVSTIDTARLIQAFGHERVCLSPRRIKLYSSITNQQRRYLEKRSKHSKKVLNTGHPLVTSEHTRRRHIQVANHVISSDSISSSASSFLSSNSTFCNKQNVHMLNKGIQAGNLEIVNGAKKHTRDVGITFPTPSSSEAKLEENSDVTSWSEEKREEKMLFTGYPEDRKLKKNKKNSHEGVSWFVPVENVESRSKKENVPNTCGPGISWFEPITKTRPWREPLREQNCQGQHLDGRGYLAGPGREAGRDLLRPFVRATLQESLQFHRPDFISRSGERIKRLKLIVQERKLQSMLQTERDALFNIDRERQGHQNRMCPLPKRVFLAIQKNKPISKKEMIQRSKR

SEQ ID NO: 754155 - protein, 138 aa, Homo sapiens
FLFFFSFQESLQFHRPDFISRSGERIKRLKLIVQERKLQSMLQTERDALFNIDRERQGHQNRMCPLPKRVFLAIQKNKPISKKEMIQRSKRIYEQLPEVQKKREEEKRKSEYKSYRLRAQLYKKRVTNQLLGRKVPWD

SEQ ID NO: 754156 - protein, 1953 aa, Homo sapiens
VSSNNVLLNSQADDRVVINKPESAGFRDVGSEEIQDAENSAKTLKEIRTLLMEAENMALKRCNFPAPLARFRDISDISFIQSKKVVCFKEPSSTGVSNGDLLHRQPFTEESPSSRCIQKDIGTQTNLKCRRGIENWEFISSTTVRSPLQEAESKVSMALEETLRQYQAAKSVMRSEPEGCSGTIGNKIIIPMMTVIKSDSSSDASDGNGSCSWDSNLPESLESVSDVLLNFFPYVSPKTSITDSREEEGVSESEDGGGSSVDSLAAHVKNLLQCESSLNHAKEILRNAEEEESRVRAHAWNMKFNLAHDCGYSISELNEDDRRKVEEIKAELFGHGRTTDLSKGLQSPRGMGCKPEAVCSHIIIESHEKGCFRTLTSEHPQLDRHPCAFRSAGPSEMTRGRQNPSSCRAKHVNLSASLDQNNSHFKVWNSLQLKSHSPFQNFIPDEFKISKGLRMPFDEKMDPWLSELVEPAFVPPKEVDFHSSSQMPSPEPMKKFTTSITFSSHRHSKCISNSSVVKVGVTEGSQCTGASVGVFNSHFTEEQNPPRDLKQKTSSPSSFKMHSNSQDKEVTILAEGRRQSQKLPVDFERSFQEEKPLERSDFTGSHSEPSTRANCSNFKEIQISDNHTLISMGRPSSTLGVNRSSSRLGVKEKNVTITPDLPSCIFLEQRELFEQSKAPRADDHVRKHHSPSPQHQDYVAPDLPSCIFLEQRELFEQCKAPYVDHQMRENHSPLPQGQDSIASDLPSPISLEQCQSKAPGVDDQMNKHHFPLPQGQDCVVEKNNQHKPKSHISNINVEAKFNTVVSQSAPNHCTLAASASTPPSNRKALSCVHITLCPKTSSKLDSGTLDERFHSLDAASKARMNSEFNFDLHTVSSRSLEPTSKLLTSKPVAQDQESLGFLGPKSSLDFQVVQPSLPDSNTITQDLKTIPSQNSQIVTSRQIQVNISDFEGHSNPEGTPVFADRLPEKMKTPLSAFSEKLSSDAVTQITTESPEKTLFSSEIFINAEDRGHEIIEPGNQKLRKAPVKFASSSSVQQVTFSRGTDGQPLLLPYKPSGSTKMYYVPQLRQIPPSPDSKSDTTVESSHSGSNDAIAPDFPAQVLGTRDDDLSATVNIKHKEGIYSKRVVTKASLPVGEKPLQNENADASVQVLITGDENLSDKKQQEIHSTRAVTEAAQAKEKESLQKDTADSSAAAAAEHSAQVGDPEMKNLPDTKAITQKEEIHRKKTVPEEAWPNNKESLQINIEESECHSEFENTTRSVFRSAKFYIHHPVHLPSDQDICHESLGKSVFMRHSWKDFFQHHPDKHREHMCLPLPYQNMDKTKTDYTRIKSLSINVNLGNKEVMDTTKSQVRDYPKHNGQISDPQRDQKVTPEQTTQHTVSLNELWNKYRERQRQQRQPELGDRKELSLVDRLDRLAKILQNPITHSLQVSESTHDDSRGERSVKEWSGRQQQRNKLQKKKRFKSLEKSHKNTGELKKSKVLSHHRAGRSNQIKIEQIKFDKYILSKQPGFNYISNTSSDCRPSEESELLTDTTTNILSGTTSTVESDILTQTDREVALHERSSSVSTIDTARLIQAFGHERVCLSPRRIKLYSSITNQQRRYLEKRSKHSKKVLNTGHPLVTSEHTRRRHIQVANHVISSDSISSSASSFLSSNSTFCNKQNVHMLNKGIQAGNLEIVNGAKKHTRDVGITFPTPSSSEAKLEENSDVTSWSEEKREEKMLFTGYPEDRKLKKNKKNSHEGVSWFVPVENVESRSKKENVPNTCGPGISWFEPITKTRPWREPLREQNCQGQHLDGRGYLAGPGREAGRDLLRPFVRATLQESLQFHRPDFISRSGERIKRLKLIVQERKLQSMLQTERDALFNIDRERQGHQNRMCPLPKRVFLAIQKNKPISKKEMIQRSKRIYEQLPEVQKKREEEKRKSEYKSYRLRAQLYKKRVTNQLLGRKVPWD

SEQ ID NO: 754157 - protein, 1953 aa, Homo sapiens; identical to SEQ ID NO: 754156

SEQ ID NO: 754158 - protein, 138 aa, Homo sapiens; identical to SEQ ID NO: 754155

SEQ ID NO: 754159 - protein, 1953 aa, Homo sapiens; identical to SEQ ID NO: 754156

SEQ ID NO: 754160 - protein, 1713 aa, Homo sapiens
VSSNNVLLNSQADDRVVINKPESAGFRDVGSEEIQDAENSAKTLKEIRTLLMEAENMALKRCNFPAPLARFRDISDISFIQSKKVVCFKEPSSTGVSNGDLLHRQPFTEESPSSRCIQKDIGTQTNLKCRRGIENWEFISSTTVRSPLQEAESKVSMALEETLRQYQAAKSVMRSEPEGCSGTIGNKIIIPMMTVIKSDSSSDASDGNGSCSWDSNLPESLESVSDVLLNFFPYVSPKTSITDSREEEGVSESEDGGGSSVDSLAAHVKNLLQCESSLNHAKEILRNAEEEESRVRAHAWNMKFNLAHDCGYSISELNEDDRRKVEEIKAELFGHGRTTDLSKGLQSPRGMGCKPEAVCSHIIIESHEKGCFRTLTSEHPQLDRHPCAFRSAGPSEMTRGRQNPSSCRAKHVNLSASLDQNNSHFKVWNSLQLKSHSPFQNFIPDEFKISKGLRMPFDEKMDPWLSELVEPAFVPPKEVDFHSSSQMPSPEPMKKFTTSITFSSHRHSKCISNSSVVKVGVTEGSQCTGASVGVFNSHFTEEQNPPRDLKQKTSSPSSFKMHSNSQDKEVTILAEGRRQSQKLPVDFERSFQEEKPLERSDFTGSHSEPSTRANCSNFKEIQISDNHTLISMGRPSSTLGVNRSSSRLGVKEKNVTITPDLPSCIFLEQRELFEQSKAPRADDHVRKHHSPSPQHQDYVAPDLPSCIFLEQRELFEQCKAPYVDHQMRENHSPLPQGQDSIASDLPSPISLEQCQSKAPGVDDQMNKHHFPLPQGQDCVVEKNNQHKPKSHISNINVEAKFNTVVSQSAPNHCTLAASASTPPSNRKALSCVHITLCPKTSSKLDSGTLDERFHSLDAASKARMNSEFNFDLHTVSSRSLEPTSKLLTSKPVAQDQESLGFLGPKSSLDFQVVQPSLPDSNTITQDLKTIPSQNSQIVTSRQIQVNISDFEGHSNPEGTPVFADRLPEKMKTPLSAFSEKLSSDAVTQITTESPEKTLFSSEIFINAEDRGHEIIEPGNQKLRKAPVKFASSSSVQQVTFSRGTDGQPLLLPYKPSGSTKMYYVPQLRQIPPSPDSKSDTTVESSHSGSNDAIAPDFPAQVLGTRDDDLSATVNIKHKEGIYSKRVVTKASLPVGEKPLQNENADASVQVLITGDENLSDKKQQEIHSTRAVTEAAQAKEKESLQKDTADSSAAAAAEHSAQVGDPEMKNLPDTKAITQKEEIHRKKTVPEEAWPNNKESLQINIEESECHSEFENTTRSVFRSAKFYIHHPVHLPSDQDICHESLGKSVFMRHSWKDFFQHHPDKHREHMCLPLPYQNMDKTKTDYTRIKSLSINVNLGNKEVMDTTKSQVRDYPKHNGQISDPQRDQKVTPEQTTQHTVSLNELWNKYRERQRQQRQPELGDRKELSLVDRLDRLAKILQNPITHSLQVSESTHDDSRGERSVKEWSGRQQQRNKLQKKKRFKSLEKSHKNTGELKKSKVLSHHRAGRSNQIKIEQIKFDKYILSKQPGFNYISNTSSDCRPSEESELLTDTTTNILSGTTSTVESDILTQTDREVALHERSSSVSTIDTARLIQAFGHERVCLSPRRIKLYSSITNQQRRYLEKRSKHSKKVLNTGHPLVTSEHTRRRHIQVANHVISSDSISSSASSFLSSNSTFCNKQNVHMLNKGIQAGNLEIVNGAKKHTRDVGITFPTPSSSEAKLELGKLSQRR

SEQ ID NO: 754161 - protein, 111 aa, Homo sapiens
ERRGVEFVHVYCVDNILVRLADPVFIGFCVLQGADCGAKVVEKAYPEEPVGVVCQVDGVPQVVEYSEISPETAQLRASDGSLLYNAGNICNHFFTRGFLKAVTRCAAAGGC

SEQ ID NO: 754162 - protein, 265 aa, Homo sapiens
ERRGVEFVHVYCVDNILVRLADPVFIGFCVLQGADCGAKVVEKAYPEEPVGVVCQVDGVPQVVEYSEISPETAQLRASDGSLLYNAGNICNHFFTRGFLKAVTREFEPLLKPHVAVKKVPYVDEEGNLVKPLKPNGIKMEKFVFDVFRFAKNFAALEVLREEEFSPLKNAEPADRDSPRTARQALLTQHYRWALRAGARFLDAHGAWLPELPSLPPNGDPPAICEISPLVSYSGEGLEVYLQGREFQSPLILDEDQAREPQLQES

SEQ ID NO: 754163 - protein, 265 aa, Homo sapiens; identical to SEQ ID NO: 754162

SEQ ID NO: 754164 - protein, 121 aa, Homo sapiens [sequence omitted]

SEQ ID NO: 754165 - protein, 32 aa, Homo sapiens
MEWKGGLPLEFGYPLLTSSLWSYRQAVLLKSH

SEQ ID NO: 754166 - protein, 222 aa, Homo sapiens
AECLLRRCIDKAETVQRIIYIATVEAFHVAKMAFRHFKIHVRKSLTPSYVGSNDFENAVLDYVICHLDLYDSQSSVNDVIRAMNVNPKISFPPVVDFCLLSDFIQEICCIAFAMQALEPPLDIAYGADGEVFNDCKYRRSYDSDFTAPLVLYHVWPALMENDCVIMKGEAVTRRGAFWNSVRSVSRCRSRSLSPICPRSQIGLNTMSRSRSPSPIRCGLPRF

SEQ ID NO: 754167 - protein, 206 aa, Homo sapiens
AECLLRRCIDKAETVQRIIYIATVEAFHVAKMAFRHFKIHVRKSLTPSYVGSNDFENAVLDYVICHLDLYDSQSSVNDVIRAMNVNPKISFPPVVDFCLLSDFIQEICCIAFAMQALEPPLDIAYGADGEVFNDCKYRRSYDSDFTAPLVLYHVWPALMENDCVIMKGEAVTRRGAFVRWPCIVTIHPKCLIHKFENIYKPRDSIK

SEQ ID NO: 754168 - protein, 522 aa, Homo sapiens
MAVNKGLTLLDGDLPEQENVLQRVLQLPVVSGTCECFQKTYTSTKEAHPLVASVCNAYEKGVQSASSLAAWSMEPVVRRLSTQFTAANELACRGLDHLEEKIPALQYPPEKIASELKDTISTRLRSARNSISVPIASTSDKVLGAALAGCELAWGVARDTAEFAANTRAGRLASGGADLALGSIEKVVEYLLPADKEESAPAPGHQQAQKSPKAKPSLLSRVGALTNTLSRYTVQTMARALEQGHTVAMWIPGVVPLSSLAQWGASVAMQAVSRRRSEVRVPWLHSLAAAQEEDHEDQTDTEGEDTEEEEELETEENKFSEVAALPGPRGLLGGVAHTLQKTLQTTISAVTWAPAAVLGMAGRVLHLTPAPAVSSTKGRAMSLSDALKGVTDNVVDTVVHYVPLPRLSLMEPESEFRDIDNPPAEVERREAERRASGAPSAGPEPAPRLAQPRRSLRSAQSPGAPPGPGLEDEVATPAAPRPGFPAVPREKPKRRVSDSFFRPSVMEPIVGRTHYSQLRKKS

SEQ ID NO: 754169 - protein, 68 aa, Homo sapiens
MAIDCGLTLLAAHCSSGAMSVFTFLPQLGGNRGKDLSSGCGQGSFACILGAPHQRDVGQQFLSAITPG

SEQ ID NO: 754170 - protein, 370 aa, Homo sapiens
KALRAGSRRRVRTPRTESAQTTQHSPLRPLWRLKRDSSPCHPQTRADWGVCPPWGGAAQGLRPGCHLAPRRCLCPGSCCPWHWAEAQWSFLWRGLWGLRTLPTALRLSCRLWDSDILCLPGDIVPAPGPVLAPTHLQTELVLRCQKETDCDLCLRVAVHLAVHGHWEEPEDEEKFGGAADSGVEEPRNASLQAQVVLSFQAYPTARCVLLEVQVPAALVQFGQSVGSVVYDCFEAALGSEVRIWSYTQPRYEKELNHTQQLPALPWLNVSADGDNVHLVLNVSEEQHFGLSLYWNQVQGPPKPRWHKNLENLMDGILLDQQTGSGRISGSGRSVELLRERGPGTRDDLTCGSCQEGRAQPWSLTCCVGLI

SEQ ID NO: 754171 - protein, 736 aa, Homo sapiens
MPVPWFLLSLALGRSPVVLSLERLVGPQDATHCSPGLSCRLWDSDILCLPGDIVPAPGPVLAPTHLQTELVLRCQKETDCDLCLRVAVHLAVHGHWEEPEDEEKFGGAADSGVEEPRNASLQAQVVLSFQAYPTARCVLLEVQVPAALVQFGQSVGSVVYDCFEAALGSEVRIWSYTQPRYEKELNHTQQLPALPWLNVSADGDNVHLVLNVSEEQHFGLSLYWNQVQGPPKPRWHKNLTGPQIITLNHTDLVPCLCIQVWPLEPDSVRTNICPFREDPRAHQNLWQAARLRLLTLQSWLLDAPCSLPAEAALCWRAPGGDPCQPLVPPLSWENVTVDKVLEFPLLKGHPNLCVQVNSSEKLQLQECLWADSLGPLKDDVLLLETRGPQDNRSLCALEPSGCTSLPSKASTRAARLGEYLLQDLQSGQCLQLWDDDLGALWACPMDKYIHKRWALVWLACLLFAAALSLILLLKKDHAKGWLRLLKQDVRSGGEWEQALGGGPPPGSQACASSPLPSPSVFSAAAARGRAALLLYSADDSGFERLVGALASALCQLPLRVAVDLWSRRELSAQGPVAWFHAQRRQTLQEGGVVVLLFSPGAVALCSEWLQDGVSGPGAHGPHDAFRASLSCVLPDFLQGRAPGSYVGACFDRLLHPDAVPALFRTVPVFTLPSQLPDFLGALQQPRAPRSGRLQERAEQVSRALQPALDSYFHPPGTPAPGRGVGPGAGPGAGDGT

SEQ ID NO: 754172 - protein, 688 aa, Homo sapiens
MPVPWFLLSLALGRSPVVLSLERLVGPQDATHCSPGLSCRLWDSDILCLPGDIVPAPGPVLAPTHLQTELVLRCQKETDCDLCLRVAVHLAVHGHWEEPEDEEKFGGAADSGVEEPRNASLQAQVVLSFQAYPTARCVLLEVQVPAALVQFGQSVGSVVYDCFEAALGSEVRIWSYTQPRYEKELNHTQQLPALPWLNVSADGDNVHLVLNVSEEQHFGLSLYWNQVQGPPKPRWHKNLTGPQIITLNHTDLVPCLCIQVWPLEPDSVRTNICPFREDPRAHQNLWQAARLRLLTLQSWLLDAPCSLPAEAALCWRAPGGDPCQPLVPPLSWENVTVDVNSSEKLQLQECLWADSLGPLKDDVLLLETRGPQDNRSLCALEPSGCTSLPSKASTRAARLGEYLLQDLQSGQCLQLWDDDLGALWACPMDKYIHKRWALVWLACLLFAAALSLILLLKKDHAKGWLRLLKQDVRSGAAARGRAALLLYSADDSGFERLVGALASALCQLPLRVAVDLWSRRELSAQGPVAWFHAQRRQTLQEGGVVVLLFSPGAVALCSEWLQDGVSGPGAHGPHDAFRASLSCVLPDFLQGRAPGSYVGACFDRLLHPDAVPALFRTVPVFTLPSQLPDFLGALQQPRAPRSGRLQERAEQVSRALQPALDSYFHPPGTPAPGRGVGPGAGPGAGDGT

SEQ ID NO: 754173 - protein, 261 aa, Homo sapiens
MDKYIHKRWALVWLACLLFAAALSLILLLKKDHAKGWLRLLKQDVRSGAAARGRAALLLYSADDSGFERLVGALASALCQLPLRVAVDLWSRRELSAQGPVAWFHAQRRQTLQEGGVVVLLFSPGAVALCSEWLQDGVSGPGAHGPHDAFRASLSCVLPDFLQGRAPGSYVGACFDRLLHPDAVPALFRTVPVFTLPSQLPDFLGALQQPRAPRSGRLQERAEQVSRALQPALDSYFHPPGTPAPGRGVGPGAGPGAGDGT

SEQ ID NO: 754174 - protein, 357 aa, Homo sapiens
MPVPWFLLSLALGRSPVVLSLERLVGPQDATHCSPGLSCRLWDSDILCLPGDIVPAPGPVLAPTHLQTELVLRCQKETDCDLCLRVAVHLAVHGHWEEPEDEEKFGGAADSGVEEPRNASLQAQVVLSFQAYPTARCVLLEVQVPAALVQFGQSVGSVVYDCFEAALGSEVRIWSYTQPRYEKELNHTQQLPALPWLNVSADGDNVHLVLNVSEEQHFGLSLYWNQVQGPPKPRWHKNLTGPQIITLNHTDLVPCLCIQVWPLEPDSVRTNICPFREDPRAHQNLWQAARLRLLTLQSWLLDAPCSLPAEAALCWRAPGGDPCQPLVPPLSWENVTVDVNSSEKLQLQECLWAAMGR

SEQ ID NO: 754175 - protein, 707 aa, Homo sapiens
MPVPWFLLSLALGRSPVVLSLERLVGPQDATHCSPGLSCRLWDSDILCLPGDIVPAPGPVLAPTHLQTELVLRCQKETDCDLCLRVAVHLAVHGHWEEPEDEEKFGGAADSGVEEPRNASLQAQVVLSFQAYPTARCVLLEVQVPAALVQFGQSVGSVVYDCFEAALGSEVRIWSYTQPRYEKELNHTQQLPALPWLNVSADGDNVHLVLNVSEEQHFGLSLYWNQVQGPPKPRWHKNLTGPQIITLNHTDLVPCLCIQVWPLEPDSVRTNICPFREDPRAHQNLWQAARLRLLTLQSWLLDAPCSLPAEAALCWRAPGGDPCQPLVPPLSWENVTVDVNSSEKLQLQECLWADSLGPLKDDVLLLETRGPQDNRSLCALEPSGCTSLPSKASTLWDDDLGALWACPMDKYIHKRWALVWLACLLFAAALSLILLLKKDHAKGERFPAPHSPGGGPEWLWEFSEEKAAAELTGCLRPSPLTGWLRLLKQDVRSGAAARGRAALLLYSADDSGFERLVGALASALCQLPLRVAVDLWSRRELSAQGPVAWFHAQRRQTLQEGGVVVLLFSPGAVALCSEWLQDGVSGPGAHGPHDAFRASLSCVLPDFLQGRAPGSYVGACFDRLLHPDAVPALFRTVPVFTLPSQLPDFLGALQQPRAPRSGRLQERAEQVSRALQPALDSYFHPPGTPAPGRGVGPGAGPGAGDGT

SEQ ID NO: 754176 - protein, 544 aa, Homo sapiens
MPVPWFLLSLALGRSPVVLSLERLVGPQDATHCSPGLSCRLWDSDILCLPGDIVPAPGPVLAPTHLQTELVLRCQKETDCDLCLRVAVHLAVHGHWEEPEDEEKFGGAADSGVEEPRNASLQAQVVLSFQAYPTARCVLLEVQVPAALVQFGQSVGSVVYDCFEAALGSEVRIWSYTQPRYEKELNHTQQLPALPWLNVSADGDNVHLVLNVSEEQHFGLSLYWNQVQGPPKPRWHKTCGCTSLPSKASTRAARLGEYLLQDLQSGQCLQLWDDDLGALWACPMDKYIHKRWALVWLACLLFAAALSLILLLKKDHAKGWLRLLKQDVRSGAAARGRAALLLYSADDSGFERLVGALASALCQLPLRVAVDLWSRRELSAQGPVAWFHAQRRQTLQEGGVVVLLFSPGAVALCSEWLQDGVSGPGAHGPHDAFRASLSCVLPDFLQGRAPGSYVGACFDRLLHPDAVPALFRTVPVFTLPSQLPDFLGALQQPRAPRSGRLQERAEQVSRALQPALDSYFHPPGTPAPGRGVGPGAGPGAGDGT

SEQ ID NO: 754177 - protein, 720 aa, Homo sapiens
MPVPWFLLSLALGRSPVVLSLERLVGPQDATHCSPGLSCRLWDSDILCLPGDIVPAPGPVLAPTHLQTELVLRCQKETDCDLCLRVAVHLAVHGHWEEPEDEEKFGGAADSGVEEPRNASLQAQVVLSFQAYPTARCVLLEVQVPAALVQFGQSVGSVVYDCFEAALGSEVRIWSYTQPRYEKELNHTQQLPDCRGLEVWNSIPSCWALPWLNVSADGDNVHLVLNVSEEQHFGLSLYWNQVQGPPKPRWHKNLTGPQIITLNHTDLVPCLCIQVWPLEPDSVRTNICPFREDPRAHQNLWQAARLRLLTLQSWLLDAPCSLPAEAALCWRAPGGDPCQPLVPPLSWENVTVDKVLEFPLLKGHPNLCVQVNSSEKLQLQECLWADSLGPLKDDVLLLETRGPQDNRSLCALEPSGCTSLPSKASTRAARLGEYLLQDLQSGQCLQLWDDDLGALWACPMDKYIHKRWALVWLACLLFAAALSLILLLKKDHAKGWLRLLKQDVRSGAAARGRAALLLYSADDSGFERLVGALASALCQLPLRVAVDLWSRRELSAQGPVAWFHAQRRQTLQEGGVVVLLFSPGAVALCSEWLQDGVSGPGAHGPHDAFRASLSCVLPDFLQGRAPGSYVGACFDRLLHPDAVPALFRTVPVFTLPSQLPDFLGALQQPRAPRSGRLQERAEQVSRALQPALDSYFHPPGTPAPGRGVGPGAGPGAGDGT

SEQ ID NO: 754178 - protein, 847 aa, Homo sapiens
KALRAGSRRRVRTPRTESAQTTQHSPLRPLWRLKRDSSPCHPQTRADWGVCPPWGGAAQGLRPGCHLAPRRCLCPGSCCPWHWAEAQWSFLWRGLWGLRTLPTALRESGTLGRRGKAQGSVFGSAKPVAWLLSLLPLPELPCLVCLVLMVEEKNGEGARAGSVFLWEGLGIRSPRKRSLSCRLWDSDILCLPGDIVPAPGPVLAPTHLQTELVLRCQKETDCDLCLRVAVHLAVHGHWEEPEDEEKFGGAADSGVEEPRNASLQAQVVLSFQAYPTARCVLLEVQVPAALVQFGQSVGSVVYDCFEAALGSEVRIWSYTQPRYEKELNHTQQLPALPWLNVSADGDNVHLVLNVSEEQHFGLSLYWNQVQGPPKPRWHKNLTGPQIITLNHTDLVPCLCIQVWPLEPDSVRTNICPFREDPRAHQNLWQAARLRLLTLQSWLLDAPCSLPAEAALCWRAPGGDPCQPLVPPLSWENVTVDKVLEFPLLKGHPNLCVQVNSSEKLQLQECLWADSLGPLKDDVLLLETRGPQDNRSLCALEPSGCTSLPSKASTRAARLGEYLLQDLQSGQCLQLWDDDLGALWACPMDKYIHKRWALVWLACLLFAAALSLILLLKKDHAKGWLRLLKQDVRSGAAARGRAALLLYSADDSGFERLVGALASALCQLPLRVAVDLWSRRELSAQGPVAWFHAQRRQTLQEGGVVVLLFSPGAVALCSEWLQDGVSGPGAHGPHDAFRASLSCVLPDFLQGRAPGSYVGACFDRLLHPDAVPALFRTVPVFTLPSQLPDFLGALQQPRAPRSGRLQERAEQVSRALQPALDSYFHPPGTPAPGRGVGPGAGPGAGDGT

SEQ ID NO: 754179 - protein, 847 aa, Homo sapiens
KALRAGSRRRVRTPRTESAQTTQHSPLRPLWRLKRDSSPCHPQTRADWGVCPPWGGAAQGLRPGCHLAPRRCLCPGSCCPWHWAEAQWSFLWRGLWGLRTLPTALRLSCRLWDSDILCLPGDIVPAPGPVLAPTHLQTELVLRCQKETDCDLCLRVAVHLAVHGHWEEPEDEEKFGGAADSGVEEPRNASLQAQVVLSFQAYPTARCVLLEVQVPAALVQFGQSVGSVVYDCFEAALGSEVRIWSYTQPRYEKELNHTQQLPALPWLNVSADGDNVHLVLNVSEEQHFGLSLYWNQVQGPPKPRWHKNLTWGGLPLPKSIPTVGRCLCKGRSAISERILEEDSPQARENWWGNFCLPGFLDFGLLLFLLIFSNLLPLFVPQTGPQIITLNHTDLVPCLCIQVWPLEPDSVRTNICPFREDPRAHQNLWQAARLRLLTLQSWLLDAPCSLPAEAALCWRAPGGDPCQPLVPPLSWENVTVDKVLEFPLLKGHPNLCVQVNSSEKLQLQECLWADSLGPLKDDVLLLETRGPQDNRSLCALEPSGCTSLPSKASTRAARLGEYLLQDLQSGQCLQLWDDDLGALWACPMDKYIHKRWALVWLACLLFAAALSLILLLKKDHAKGWLRLLKQDVRSGAAARGRAALLLYSADDSGFERLVGALASALCQLPLRVAVDLWSRRELSAQGPVAWFHAQRRQTLQEGGVVVLLFSPGAVALCSEWLQDGVSGPGAHGPHDAFRASLSCVLPDFLQGRAPGSYVGACFDRLLHPDAVPALFRTVPVFTLPSQLPDFLGALQQPRAPRSGRLQERAEQVSRALQPALDSYFHPPGTPAPGRGVGPGAGPGAGDGT

SEQ ID NO: 754180 - protein, 241 aa, Homo sapiens
MPVPWFLLSLALGRSPVVLSLERLVGPQDATHCSPGLSCRLWDSDILCLPGDIVPAPGPVLAPTHLQTELVLRCQKETDCDLCLRVAVHLAVHGHWEEPEDEEKFGGAADSGVEEPRNASLQAQVVLSFQAYPTARCVLLEVQVPAALVQFGQSVGSVVYDCFEAALGSEVRIWSYTQPRYEKELNHTQQLPALPWLNVSADGDNVHLVLNVSEEQHFGLSLYWNQVQGPPKPRWHKNLTW

SEQ ID NO: 754181 - protein, 356 aa, Homo sapiens
MVSSQQVNSSEKLQLQECLWADSLGPLKDDVLLLETRGPQDNRSLCALEPSGCTSLPSKASTRAARLGEYLLQDLQSGQCLQLWDDDLGALWACPMDKYIHKRWALVWLACLLFAAALSLILLLKKDHAKGWLRLLKQDVRSGAAARGRAALLLYSADDSGFERLVGALASALCQLPLRVAVDLWSRRELSAQGPVAWFHAQRRQTLQEGGVVVLLFSPGAVALCSEWLQDGVSGPGAHGPHDAFRASLSCVLPDFLQGRAPGSYVGACFDRLLHPDAVPALFRTVPVFTLPSQLPDFLGALQQPRAPRSGRLQERAEQVSRALQPALDSYFHPPGTPAPGRGVGPGAGPGAGDGT

SEQ ID NO: 754182 - protein, 127 aa, Homo sapiens
MGCPGPGRTARTTPSAPRSAACCPTSCRAGRPAATWGPASTGCSTRTPYPPFSAPCPSSHCPPNCQTSWGPCSSLAPRVPGGSKRERSKCPGPFSQPWIATSIPRGLPRRDAGWDQGRDLGRGTGLK

SEQ ID NO: 754183 - protein, 375 aa, Homo sapiens
MLEIWRSGHQSLVNIGTPGWCPGFGSVCILQLWDDDLGALWACPMDKYIHKRWALVWLACLLFAAALSLILLLKKDHAKGERFPAPHSPGGGPEWLWEFSEEKAAAELTGCLRPSPLTGWLRLLKQDVRSGGEWEQALGGGPPPGSQACASSPLPSPSVFSAAAARGRAALLLYSADDSGFERLVGALASALCQLPLRVAVDLWSRRELSAQGPVAWFHAQRRQTLQEGGVVVLLFSPGAVALCSEWLQDGVSGPGAHGPHDAFRASLSCVLPDFLQGRAPGSYVGACFDRLLHPDAVPALFRTVPVFTLPSQLPDFLGALQQPRAPRSGRLQERAEQVSRALQPALDSYFHPPGTPAPGRGVGPGAGPGAGDGT

SEQ ID NO: 754184 - protein, 306 aa, Homo sapiens
MPVPWFLLSLALGRSPVVLSLERLVGPQDATHCSPGLSCRLWDSDILCLPGDIVPAPGPVLAPTHLQTELVLRCQKETDCDLCLRVAVHLAVHGHWEEPEDEEKFGGAADSGVEEPRNASLQAQVVLSFQAYPTARCVLLEVQVPAALVQFGQSVGSVVYDCFEAALGSEVRIWSYTQPRYEKELNHTQQLPALPWLNVSADGDNVHLVLNVSEEQHFGLSLYWNQVQGPPKPRWHKNLKGANIPDQHRYRRIRWPDLPTKMPREPPPQLKRDTTQRETHHGTEDSPVPAHTDRCDAPLYWQHALQ

SEQ ID NO: 754185 - protein, 705 aa, Homo sapiens
MPVPWFLLSLALGRSPVVLSLERLVGPQDATHCSPGLSCRLWDSDILCLPGDIVPAPGPVLAPTHLQTELVLRCQKETDCDLCLRVAVHLAVHGHWEEPEDEEKFGGAADSGVEEPRNASLQAQVVLSFQAYPTARCVLLEVQVPAALVQFGQSVGSVVYDCFEAALGSEVRIWSYTQPRYEKELNHTQQLPALPWLNVSADGDNVHLVLNVSEEQHFGLSLYWNQVQGPPKPRWHKNLTGPQIITLNHTDLVPCLCIQVWPLEPDSVRTNICPFREDPRAHQNLWQAARLRLLTLQSWLLDAPCSLPAEAALCWRAPGGDPCQPLVPPLSWENVTVDKVLEFPLLKGHPNLCVQVNSSEKLQLQECLWADSLGPLKDDVLLLETRGPQDNRSLCALEPSGCTSLPSKASTRAARLGEYLLQDLQSGQCLQLWDDDLGALWACPMDKYIHKRWALVWLACLLFAAALSLILLLKKDHAKGWLRLLKQDVRSGAAARGRAALLLYSADDSGFERLVGALASALCQLPLRVAVDLWSRRELSAQGPVAWFHAQRRQTLQEGGVVVLLFSPGAVALCSEWLQDGVSGPGAHGPHDAFRASLSCVLPDFLQGRAPGSYVGACFDRLLHPDAVPALFRTVPVFTLPSQLPDFLGALQQPRAPRSGRLQERAEQVSRALQPALDSYFHPPGTPAPGRGVGPGAGPGAGDGT

SEQ ID NO: 754186 - protein, 261 aa, Homo sapiens; identical to SEQ ID NO: 754173

SEQ ID NO: 754187 - protein, 261 aa, Homo sapiens; identical to SEQ ID NO: 754173

SEQ ID NO: 754188 - protein, 679 aa, Homo sapiens
MPVPWFLLSLALGRSPVVLSLERLVGPQDATHCSPGLSCRLWDSDILCLPGDIVPAPGPVLAPTHLQTELVLRCQKETDCDLCLRVAVHLAVHGHWEEPEDEEKFGGAADSGVEEPRNASLQAQVVLSFQAYPTARCVLLEVQVPAALVQFGQSVGSVVYDCFEAALGSEVRIWSYTQPRYEKELNHTQQLPALPWLNVSADGDNVHLVLNVSEEQHFGLSLYWNQVQGPPKPRWHKNLTGPQIITLNHTDLVPCLCIQVWPLEPDSVRTNICPFREDPRAHQNLWQAARLRLLTLQSWLLDAPCSLPAEAALCWRAPGGDPCQPLVPPLSWENVTVDKVLEFPLLKGHPNLCVQVNSSEKLQLQECLWADSLGPLKDDVLLLETRGPQDNRSLCALEPSGCTSLPSKASTRAARLGEYLLQDLQSGQCLQLWDDDLGALWACPMDKYIHKRWALVWLACLLFAAALSLILLLKKDHAKGWLRLLKQDVRSGAAARGRAALLLYSADDSGFERLVGALASALCHGARPCRRAAWWSCSSLPVRWRCAASGYRMGCPGPGRTARTTPSAPRSAACCPTSCRAGRPAATWGPASTGCSTRTPYPPFSAPCPSSHCPPNCQTSWGPCSSLAPRVPGGSKRERSKCPGPFSQPWIATSIPRGLPRRDAGWDQGRDLGRGTGLK

SEQ ID NO: 754189 - protein, 667 aa, Homo sapiens
MPVPWFLLSLALGRSPVVLSLERLVGPQDATHCSPGLSCRLWDSDILCLPGDIVPAPGPVLAPTHLQTELVLRCQKETDCDLCLRVAVHLAVHASLQAQVVLSFQAYPTARCVLLEVQVPAALVQFGQSVGSVVYDCFEAALGSEVRIWSYTQPRYEKELNHTQQLPALPWLNVSADGDNVHLVLNVSEEQHFGLSLYWNQTGPQIITLNHTDLVPCLCIQVWPLEPDSVRTNICPFREDPRAHQNLWQAARLRLLTLQSWLLDAPCSLPAEAALCWRAPGGDPCQPLVPPLSWENVTVDKVLEFPLLKGHPNLCVQVNSSEKLQLQECLWADSLGPLKDDVLLLETRGPQDNRSLCALEPSGCTSLPSKASTRAARLGEYLLQDLQSGQCLQLWDDDLGALWACPMDKYIHKRWALVWLACLLFAAALSLILLLKKDHAKGWLRLLKQDVRSGAAARGRAALLLYSADDSGFERLVGALASALCQLPLRVAVDLWSRRELSAQGPVAWFHAQRRQTLQEGGVVVLLFSPGAVALCSEWLQDGVSGPGAHGPHDAFRASLSCVLPDFLQGRAPGSYVGACFDRLLHPDAVPALFRTVPVFTLPSQLPDFLGALQQPRAPRSGRLQERAEQVSRALQPALDSYFHPPGTPAPGRGVGPGAGPGAGDGT

SEQ ID NO: 754190 - protein, 578 aa, Homo sapiens
ISVRGPGCVVHDLGVGRQFALVQFGQSVGSVVYDCFEAALGSEVRIWSYTQPRYEKELNHTQQLPALPWLNVSADGDNVHLVLNVSEEQHFGLSLYWNQVQGPPKPRWHKNLTGPQIITLNHTDLVPCLCIQVWPLEPDSVRTNICPFREDPRAHQNLWQAARLRLLTLQSWLLDAPCSLPAEAALCWRAPGGDPCQPLVPPLSWENVTVDKVLEFPLLKGHPNLCVQVNSSEKLQLQECLWADSLGPLKDDVLLLETRGPQDNRSLCALEPSGCTSLPSKASTRAARLGEYLLQDLQSGQCLQLWDDDLGALWACPMDKYIHKRWALVWLACLLFAAALSLILLLKKDHAKGWLRLLKQDVRSGAAARGRAALLLYSADDSGFERLVGALASALCQLPLRVAVDLWSRRELSAQGPVAWFHAQRRQTLQEGGVVVLLFSPGAVALCSEWLQDGVSGPGAHGPHDAFRASLSCVLPDFLQGRAPGSYVGACFDRLLHPDAVPALFRTVPVFTLPSQLPDFLGALQQPRAPRSGRLQERAEQVSRALQPALDSYFHPPGTPAPGRGVGPGAGPGAGDGT

SEQ ID NO: 754191 - protein, 344 aa, Homo sapiens
MLEIWRSGHQSLVNIGTPGWCPGFGSVCILQLWDDDLGALWACPMDKYIHKRWALVWLACLLFAAALSLILLLKKDHAKGERFPAPHSPGGGPEWLWEFSEEKAAAELTGCLRPSPLTGWLRLLKQDVRSGAAARGRAALLLYSADDSGFERLVGALASALCQLPLRVAVDLWSRRELSAQGPVAWFHAQRRQTLQEGGVVVLLFSPGAVALCSEWLQDGVSGPGAHGPHDAFRASLSCVLPDFLQGRAPGSYVGACFDRLLHPDAVPALFRTVPVFTLPSQLPDFLGALQQPRAPRSGRLQERAEQVSRALQPALDSYFHPPGTPAPGRGVGPGAGPGAGDGT

SEQ ID NO: 754192 - protein, 127 aa, Homo sapiens; identical to SEQ ID NO: 754182

SEQ ID NO: 754193 - protein, 55 aa, Homo sapiens
DNRSLCALEPSGCTSLPSKASTVRTGRPSSTDLSKCISHLASNFHSIHPVPVSGN

SEQ ID NO: 754194 - protein, 517 aa, Homo sapiens
MLRFLAPRLLSLQGRTARYSSAAALPSPILNPDIPYNQLFINNEWQDAVSKKTFPTVNPTTGEVIGHVAEGDRADVDRAVKAAREAFRLGSPWRRMDASERGRLLNLLADLVERDRVYLASLETLDNGKPFQESYALDLDEVIKVYRYFAGWADKWHGKTIPMDGQHFCFTRHEPVGVCGQIIPWNFPLVMQGWKLAPALATGNTVVMKVAEQTPLSALYLASLIKEAGFPPGVVNIITGYGPTAGAAIAQHMDVDKVAFTGSTEVGHLIQKAAGDSNLKRVTLELGGKSPSIVLADADMEHAVEQCHEALFFNMGQCCCAGSRTFVEESIYNEFLERTVEKAKQRKVGNPFELDTQQGPQVDKEQFERVLGYIQLGQKEGAKLLCGGERFGERGFFIKPTVFGGVQDDMRIAKEEIFGPVQPLFKFKKIEEVVERANNTRYGLAAAVFTRDLDKAMYFTQALQAGTVWVNTYNIVTCHTPFGGFKESGNGRELGEDGLKAYTEVKTVTIKVPQKNS

SEQ ID NO: 754195 - protein, 453 aa, Homo sapiens
MLRFLAPRLLSLQGRTARYSSAAALPSPILNPDIPYNQLFINNEWQDAVSKKTFPTVNPTTGEVIGHVAEGDRADVDRAVKAAREAFRLGSPWRRMDASERGRLLNLLADLVERDRVYLASLETLDNGKPFQESYALDLDEVIKVYRYFAGWADKWHGKTIPMDGQHFCFTRHEPVGVCGQIIPWNFPLVMQGWKLAPALATGNTVVMKVAEQTPLSALYLASLIKEAGFPPGVVNIITGYGPTAGAAIAQHMDVDKVAFTGSTEVGHLIQKAAGDSNLKRVTLELGGKSPSIVLADADMEHAVEQCHEALFFNMGQCCCAGSRTFVEESIYNEFLERTVEKAKQRKVGNPFELDTQQGPQVDKEQFERVLGYIQLGQKEGAKLLCGGERFGERGFFIKPTVFGGVQDDMRIAKEEIFGPVQPLFKFKKIEEDGLKAYTEVKTVTIKVPQKNS

SEQ ID NO: 754196 - protein, 379 aa, Homo sapiens
MLRFLAPRLLSLQGRTARYSSAAALPSPILNPDIPYNQLFINNEWQDAVSKKTFPTVNPTTGEVIGHVAEGDRADVDRAVKAAREAFRLGSPWRRMDASERGRLLNLLADLVERDRVYLASLETLDNGKPFQESYALDLDEVIKVYRYFAGWADKWHGKTIPMDGQHFCFTRHEPVGVCGQIIPWNFPLVMQGWKLAPALATGNTVVMKVAEQTPLSALYLASLIKEAGFPPGVVNIITGYGPTAGAAIAQHMDVDKVAFTGSTEVGHLIQKAAGDSNLKRVTLELGGKSPSIVLADADMEHAVEQCHEALFFNMGQCCCAGSRTFVEESIYNEFLERTVEKAKQRKVGNPFELDTQQGPQVDKEQFERVLGYIQLGQK

SEQ ID NO: 754197 - protein, 517 aa, Homo sapiens; identical to SEQ ID NO: 754194

SEQ ID NO: 754198 - protein, 517 aa, Homo sapiens; identical to SEQ ID NO: 754194

SEQ ID NO: 754199 - protein, 525 aa, Homo sapiens
MLRFLAPRLLSLQGRTARYSSAAALPSPILNPDIPYNQLFINNEWQDAVSKKTFPTVNPTTGEVIGHVAEGDRADVDRAVKAAREAFRLGSPWRRMDASERGRLLNLLADLVERDRVYLASLETLDNGKPFQESYALDLDEVIKVYRYFAGWADKWHGKTIPMDGQHFCFTRHEPVGVCGQIIPWNFPLVMQGWKLAPALATGNTVVMKVAEQTPLSALYLASLIKEAGFPPGVVNIITGYGPTAGAAIAQHMDVDKVAFTGSTEVGHLIQKAAGDSNLKRVTLELGGKSPSIVLADADMEHAVEQCHEALFFNMGQCCCAGSRTFVEESIYNEFLERTVEKAKQRKVGNPFELDTQQGPQVDKEQFERVLGYIQLGQKEGAKLLCGGERFGERGFFIKPTVFGGVQDDMRIAKEEIFGPVQPLFKFKKIEEVVERANNTSNSTTTLTNACQAVLKPRTPFLCSKLTLRRNPTNKAIQSRLFYLNQRWGPGSEFYLSNPQPQPPWWPMSCFHEILGVSGGQIKNQ

SEQ ID NO: 754200 - protein, 155 aa, Homo sapiens
IAVPDVHLYPHYRSDRSEGAKLLCGGERFGERGFFIKPTVFGGVQDDMRIAKEEIFGPVQPLFKFKKIEEVVERANNTRYGLAAAVFTRDLDKAMYFTQALQAGTVWVNTYNIVTCHTPFGGFKESGNGRELGEDGLKAYTEVKTVTIKVPQKNS

SEQ ID NO: 754201 - protein, 493 aa, Homo sapiens
MLPRWELALYLLASLGFHFYSFYEVYKVSREHEEELDQEFELETDTLFGGLKKDATDFEWSFWMEWGKQWLVWLLLGHMVVSQMATLLARKHRPWILMLYGMWACWCVLGTPGVAMVLLHTTISFCVAQFRSQLLTWLCSLLLLSTLRLQGVEEVKRRWYKTENEYYLLQFTLTVRCLYYTSFSLELCWQQLPAASTSYSFPWMLAYVFYYPVLHNGPILSFSEFIKQMQQQEHDSLKASLCVLALGLGRLLCWWWLAELMAHLMYMHAIYSSIPLLETVSCWTLGGLALAQVLFFYVKYLVLFGVPALLMRLDGLTPPALPRCVSTMFSFTGMWRYFDVGLHNFLIRYVYIPVGGSQHGLLGTLFSTAMTFAFVSYWHGGYDYLWCWAALNWLGVTVENGVRRLVETPCIQDSLARYFSPQARRRFHAALASCSTSMLILSNLVFLGGDEVGKTYWNRIFIQGWPWVTLSVLGFLYCYSHVGIAWAQTYATD

SEQ ID NO: 754202 - protein, 428 aa, Homo sapiens
MLPRWELALYLLASLGFHFYSFYEVYKVSREHEEELDQEFELETDTLFGGLKKDATDFEWSFWMEWGKQWLVWLLLGHMVVSQMATLLARKRRWYKTENEYYLLQFTLTVRCLYYTSFSLELCWQQLPAASTSYSFPWMLAYVFYYPVLHNGPILSFSEFIKQMQQQEHDSLKASLCVLALGLGRLLCWWWLAELMAHLMYMHAIYSSIPLLETVSCWTLGGLALAQVLFFYVKYLVLFGVPALLMRLDGLTPPALPRCVSTMFSFTGMWRYFDVGLHNFLIRYVYIPVGGSQHGLLGTLFSTAMTFAFVSYWHGGYDYLWCWAALNWLGVTVENGVRRLVETPCIQDSLARYFSPQARRRFHAALASCSTSMLILSNLVFLGGDEVGKTYWNRIFIQGWPWVTLSVLGFLYCYSHVGIAWAQTYATD

SEQ ID NO: 754203 - protein, 428 aa, Homo sapiens; identical to SEQ ID NO: 754202

SEQ ID NO: 754204 - protein, 493 aa, Homo sapiens; identical to SEQ ID NO: 754201

SEQ ID NO: 754205 - protein, 341 aa, Homo sapiens
GRASAAAVAAAATLTPPTMDSFDLALLQEWDLESLCVYEPDRNALRRKERERRNQETQQDDGTFNSSYSLFSEPYKTNKGDELSNRIQNTLGNYDEMKDFLTDRTNQSHLVGVPKPGVPQTPVNKIDEHFVADSRAQNQPSSICSTTTSTPAAVPVQQSKRGTMGWQKAGHPPSDGQQRATQQGSLRTLLGDGVGRQQPRAKQVCNVEVGLQTQERPPAMAAKHSSSGHCVQNFPPSLASKPSLVQQKPTAYVRPMDGQDQAPDESPKLKSSSETSVHCTSYRGVPASKPEPARAKAKLSKFSIPKQGEESRSGETNSCVEEIIRVRLFFKQSYQSVGHRL

SEQ ID NO: 754206 - protein, 326 aa, Homo sapiens
GRASAAAVAAAATLTPPTMDSFDLALLQEWDLESLCVYEPDRNALRRKERERRNQETQQDDGTFNSSYSLFSEPYKTNKGDELSNRIQNTLGNYDEMKDFLTDRTNQSHLVGVPKPGVPQTPVNKIDEHFVADSRAQNQPSSICSTTTSTPAAVPVQQSKRGTMGWQKAGHPPSDGQQRATQQGSLRTLLGDGVGRQQPRAKQVCNVEVGLQTQERPPAMAAKHSSSGHCVQNFPPSLASKPSLVQQKPTAYVRPMDGQDQAPDESPKLKSSSETSVHCTSYRGVPASKPEPARAKAKLSKFSIPKQGEESRSGETNSCVEEIIRS

SEQ ID NO: 754207 - protein, 1228 aa, Homo sapiens
GRASAAAVAAAATLTPPTMDSFDLALLQEWDLESLCVYEPDRNALRRKERERRNQETQQDDGTFNSSYSLFSEPYKTNKGDELSNRIQNTLGNYDEMKDFLTDRTNQSHLVGVPKPGVPQTPVNKIDEHFVADSRAQNQPSSICSTTTSTPAAVPVQQSKRGTMGWQKAGHPPSDGQQRATQQGSLRTLLGDGVGRQQPRAKQVCNVEVGLQTQERPPAMAAKHSSSGHCVQNFPPSLASKPSLVQQKPTAYVRPMDGQDQAPDESPKLKSSSETSVHCTSYRGVPASKPEPARAKAKLSKFSIPKQGEESRSGETNSCVEEIIREMTWLPPLSAIQAPGKVEPTKFPFPNKDSQLVSSGHNNPKKGDAEPESPDNGTSNTSMLEDDLKLSSDEEENEQQAAQRTALRALSDSAVVQQPNCRTSVPSSKGSSSSSSSGSSSSSSDSESSSGSDSETESSSSESEGSKPPHFSSPEAEPASSNKWQLDKWLNKVNPHKPPILIQNESHGSESNQYYNPVKEDVQDCGKVPDVCQPSLREKEIKSTCKEEQRPRTANKAPGSKGVKQKSPPAAVAVAVSAAAPPPAVPCAPAENAPAPARRSAGKKPTRRTERTSAGDGANCHRPEEPAAADALGTSVVVPPEPTKTRPCGNNRASHRKELRSSVTCEKRRTRGLSRIVPKSKEFIETESSSSSSSSDSDLESEQEEYPLSKAQTVAASASSGNDQRLKEAAANGGSGPRAPVGSINARTTSDIAKELEEQFYTLVPFGRNELLSPLKDSDEIRSLWVKIDLTLLSRIPEHLPQEPGVLSAPATKDSESAPPSHTSDTPAEKALPKSKRKRKCDNEDDYREIKKSQGEKDSSSRLATSTSNTLSANHCNMNINSVAIPINKNEKMLRSPISPLSDASKHKYTSEDLTSSSRPNGNSLFTSASSSKKPKADSQLQPHGGDLTKAAHNNSENIPLHKSRPQTKPWSPGSNGHRDCKRQKLVFDDMPRSADYFMQEAKRMKHKADAMVEKFGKALNYAEAALSFIECGNAMEQGPMESKSPYTMYSETVELIRYAMRLKTHSGPNATPEDKQLAALCYRCLALLYWRMFRLKRDHAVKYSKALIDYFKNSSKAAQAPSPWGASGNSVGSQGSLSNASALSPSTIVSIPQRIHQMAANHVSITNSILHSYDYWEMADNLAKENREFFNDLDLLMGPVTLHSSMEHLVQYSQQGLHWLRNSAHLS

SEQ ID NO: 754208 - protein, 854 aa, Homo sapiens
GRASAAAVAAAATLTPPTMDSFDLALLQEWDLESLCVYEPDRNALRRKERERRNQETQQDDGTFNSSYSLFSEPYKTNKGDELSNRIQNTLGNYDEMKDFLTDRTNQSHLVGVPKPGVPQTPVNKIDEHFVADSRAQNQPSSICSTTTSTPAAVPVQQSKRGTMGWQKAGHPPSDGQQRATQQGSLRTLLGDGVGRQQPRAKQVCNVEVGLQTQERPPAMAAKHSSSGHCVQNFPPSLASKPSLVQQKPTAYVRPMDGQDQAPDESPKLKSSSETSVHCTSYRGVPASKPEPARAKAKLSKFSIPKQGEESRSGETNSCVEEIIREMTWLPPLSAIQAPGKVEPTKFPFPNKDSQLVSSGHNNPKKGDAEPESPDNGTSNTSMLEDDLKLSSDEEENEQQAAQRTALRALSDSAVVQQPNCRTSVPSSKGSSSSSSSGSSSSSSDSESSSGSDSETESSSSESEGSKPPHFSSPEAEPASSNKWQLDKWLNKVNPHKPPILIQNESHGSESNQYYNPVKEDVQDCGKVPDVCQPSLREKEIKSTCKEEQRPRTANKAPGSKGVKQKSPPAAVAVAVSAAAPPPAVPCAPAENAPAPARRSAGKKPTRRTERTSAGDGANCHRPEEPAAADALGTSVVVPPEPTKTRPCGNNRASHRKELRSSVTCEKRRTRGLSRIVPKSKEFIETESSSSSSSSDSDLESEQEEYPLSKAQTVAASASSGNDQRLKEAAANGGSGPRAPVGSINARTTSDIAKELEEQFYTLVPFGRNELLSPLKDSDEIRSLWVKIDLTLLSRIPEHLPQEPGVLSAPATKDSESAPPSHTSDTPAEKALPKSKRKRKCDNEDDYRILAKPS

SEQ ID NO: 754209 - protein, 1244 aa, Homo sapiens
GRASAAAVAAAATLTPPTMDSFDLALLQEWDLESLCVYEPDRNALRRKERERRNQETQQDDGTFNSSYSLFSEPYKTNKGDELSNRIQNTLGNYDEMKDFLTDRTNQSHLVGVPKPGVPQTPVNKIDEHFVADSRAQNQPSSICSTTTSTPAAVPVQQSKRGTMGWQKAGHPPSDGQQRATQQGSLRTLLGDGVGRQQPRAKQVCNVEVGLQTQERPPAMAAKHSSSGHCVQNFPPSLASKPSLVQQKPTAYVRPMDGQDQAPDESPKLKSSSETSVHCTSYRGVPASKPEPARAKAKLSKFSIPKQGEESRSGETNSCVEEIIREMTWLPPLSAIQAPGKVEPTKFPFPNKDSQLVSSGHNNPKKGDAEPESPDNGTSNTSMLEDDLKLSSDEEENEQQAAQRTALRALSDSAVVQQPNCRTSVPSSKGSSSSSSSGSSSSSSDSESSSGSDSETESSSSESEGSKPPHFSSPEAEPASSNKWQLDKWLNKVNPHKPPILIQNESHGSESNQYYNPVKEDVQDCGKVPDVCQPSLREKEIKSTCKEEQRPRTANKAPGSKGVKQKSPPAAVAVAVSAAAPPPAVPCAPAENAPAPARRSAGKKPTRRTERTSAGDGANCHRPEEPAAADALGTSVVVPPEPTKTRPCGNNRASHRKELRSSVTCEKRRTRGLSRIVPKSKEFIETESSSSSSSSDSDLESEQEEYPLSKAQTVAASASSGNDQRLKEAAANGGSGPRAPVGSINARTTSDIAKELEEQFYTLVPFGRNELLSPLKDSDEIRSLWVKIDLTLLSRIPEHLPQEPGVLSAPATKDSESAPPSHTSDTPAEKALPKSKRKRKCDNEDDYREIKKSQGEKDSSSRLATSTSNTLSANHCNMNINSVAIPINKNEKMLRSPISPLSDASKHKYTSEDLTSSSRPNGNSLFTSASSSKKPKADSQLQPHGGDLTKAAHNNSENIPLHKSRPQTKPWSPGSNGHRDCKRQKLVFDDMPRSADYFMQEAKRMKHKADAMVEKFGKALNYAEAALSFIECGNAMEQGPMESKSPYTMYSETVELIRYAMRLKTHSGPNATPEDKQLAALCYRCLALLYWRMFRLKRDHAVKYSKALIDYFKNSSKAAQAPSPWGASGKSTGTPSPISPNPFPGSSVGSQGSLSNASALSPSTIVSIPQRIHQMAANHVSITNSILHSYDYWEMADNLAKENREFFNDLDLLMGPVTLHSSMEHLVQYSQQGLHWLRNSAHLS

SEQ ID NO: 754210 - protein, 416 aa, Homo sapiens
GRASAAAVAAAATLTPPTMDSFDLALLQEWDLESLCVYEPDRNALRRKERERRNQETQQDDGTFNSSYSLFSEPYKTNKGDELSNRIQNTLGNYDEMKDFLTDRTNQSHLVGVPKPGVPQTPVNKIDEHFVADSRAQNQPSSICSTTTSTPAAVPVQQSKRGTMGWQKAGHPPSDGQQRATQQGSLRTLLGDGVGRQQPRAKQVCNVEVGLQTQERPPAMAAKHSSSGHCVQNFPPSLASKPSLVQQKPTAYVRPMDGQDQAPDESPKLKSSSETSVHCTSYRGVPASKPEPARAKAKLSKFSIPKQGEESRSGETNSCVEEIIREMTWLPPLSAIQAPGKVEPTKFPFPNKDSQLVSSGHNNPKKGDAEPESPDNGTSNTSMLEDDLKLSSDEEENEQQAAQRTALRALSDSLSW

SEQ ID NO: 754211 - protein, 892 aa, Homo sapiens
  misc_feature (886)..(886): Xaa can be any naturally occurring amino acid
GRASAAAVAAAATLTPPTMDSFDLALLQEWDLESLCVYEPDRNALRRKERERRNQETQQDDGTFNSSYSLFSEPYKTNKGDELSNRIQNTLGNYDEMKDFLTDRTNQSHLVGVPKPGVPQTPVNKIDEHFVADSRAQNQPSSICSTTTSTPAAVPVQQSKRGTMGWQKAGHPPSDGQQRATQQGSLRTLLGDGVGRQQPRAKQVCNVEVGLQTQERPPAMAAKHSSSGHCVQNFPPSLASKPSLVQQKPTAYVRPMDGQDQAPDESPKLKSSSETSVHCTSYRGVPASKPEPARAKAKLSKFSIPKQGEESRSGETNSCVEEIIREMTWLPPLSAIQAPGKVEPTKFPFPNKDSQLVSSGHNNPKKGDAEPESPDNGTSNTSMLEDDLKLSSDEEENEQQAAQRTALRALSDSAVVQQPNCRTSVPSSKGSSSSSSSGSSSSSSDSESSSGSDSETESSSSESEGSKPPHFSSPEAEPASSNKWQLDKWLNKVNPHKPPILIQNESHGSESNQYYNPVKEDVQDCGKVPDVCQPSLREKEIKSTCKEEQRPRTANKAPGSKGVKQKSPPAAVAVAVSAAAPPPAVPCAPAENAPAPARRSAGKKPTRRTERTSAGDGANCHRPEEPAAADALGTSVVVPPEPTKTRPCGNNRASHRKELRSSVTCEKRRTRGLSRIVPKSKEFIETESSSSSSSSDSDLESEQEEYPLSKAQTVAASASSGNDQRLKEAAANGGSGPRAPVGSINARTTSDIAKELEEQFYTLVPFGRNELLSPLKDSDEIRSLWVKIDLTLLSRIPEHLPQEPGVLSAPATKDSESAPPSHTSDTPAEKALPKSKRKRKCDNEDDYREIKKSQGEKDSSSRLATSTSNTLSANHCNMNINSVASXTRGSLD

SEQ ID NO: 754212 - protein, 164 aa, Homo sapiens
MFCLSPVFCFQAEPASSNKWQLDKWLNKVNPHKPPILIQNESHGSESNQYYNPVKEDVQDCGKVPDVCQPSLREKEIKSTCKEEQRPRTANKAPGSKGVKQKSPPAAVAVAVSAAAPPPAVPCAPAENAPAPARRSAGKKPTRRTERTSAGDGANCHRPEEPAA

SEQ ID NO: 754213 - protein, 234 aa, Homo sapiens
SSSTSSNHSGHTPEPPLPPVGGDLASRLSSDEGEMDGADESEKLDCQFSTHHPRPLAFCSFGSRLMGRGYYVFDRRWGSFSIRTKLHGRKTPEFTDVEAQKPEPQGIRSLPPVQDLPTNLLSLSNIGAAWVSTLESVAPRYPLNLAAQTPGPGGPEPGGMAADGGVEDIRKKRNGQDSFFFNKHLTLHQGAANTVFSFSQGRSLLRQIAPCLARSHINTPVQHPFAALATRVCF

SEQ ID NO: 754214 - protein, 1208 aa, Homo sapiens
MDSLPDEFFVRHPAVEDQRKEETENKLEKSSGQLNKQENDIPTDLVPVNLLLEVKKLLNAINTLPKGVVPHIKKFLQEDFSFQTMQREVAANSQNGEEIVPALTLRFLITQLEAALRNIQAGNYTAHQINIGYYLTLLFLYGVALTERGKKEDYTEAENKFLVMKMMIQENEICENFMSLVYFGRGLLRCAQKRYNGGLLEFHKSLQEIGDKNDHWFDIDPTEDEDLPTTFKDLLNNFIKTTESNIMKQTICSYLDCERSCEADILKNTSYKGFFQLMCSKSCCVYFHKICWKKFKNLKYPGENDQSFSGKKCLKEGCTGDMVRMLQCDVPGIVKILFEVVRKDEYITIENLGASYRKLISLKITDTDIRPKISLKFNTKDEMPIFKLDYNYFYHLLHIIIISGTDIVRQIFDEAMPPPLLKKELLIHKNVLESYYNHLWTNHPLGGSWHLLYPPNKELPQSKQFDLCLLLALIKHLNVFPAPKKGWNMEPPSSDISKSADILRLCKYRDILLSEILMNGLTESQFNSIWKKVSDILLRLGMMQEDIDKVKENPIENISLDYHQLSVYLGIPVPEIIQRMLSCYQQGIALQSITGSQRIEIEELQNEEEELSPPLMEYNINVKSHPEIQFAEINKDGTSIPSESSTESLKDLQEVKSKQRKKKKTKNKKNKDSKEDQVPYVVEKEEQLRKEQANPHSVSRLIKDDASDVQEDSAMEDKFYSLDELHILDMIEQGSAGKVTTDYGETEKERLARQRQLYKLHYQCEDFKRQLRTVTFRWQENQMQIKKKDKIIASLNQQVAFGINKVSKLQRQIHAKDNEIKNLKEQLSMKRSQWEMEKHNLESTMKTYVSKLNAETSRALTAEVYFLQCRRDFGLLHLEQTEKECLNQLARVTHMAASNLESLQLKAAVDSWNAIVADVRNKIAFLRTQYNEQINKVKQGFALSTLPPVQLPPPPPSPEILMQQFLGRPLVKESFFRPILTVPQMPAVCPGVVSATGQPRAPLMTGIAWALPAPVGDAVPPSAGLRSDPSIMNWERITDRLKTAFPQQTRKELTDFLRKLKDAYGKSLSELTFDEIVCKISQFIDPKKSQSQGKSVSNVNCVSPSHSPSQPDAAQPPKPAWRPLTSQGPATWEGASNPDEEEEEEEPCVICHENLSPENLSVLPCAHKFHAQCIRPWLMQQGTCPTCRLHVLLPEEFPGHPSRQLPKI

SEQ ID NO: 754215 - protein, 1208 aa, Homo sapiens; identical to SEQ ID NO: 754214

SEQ ID NO: 754216 - protein, 1208 aa, Homo sapiens; identical to SEQ ID NO: 754214

SEQ ID NO: 754217 - protein, 1197 aa, Homo sapiens
MDSLPDEFFVRHPAVEDQRKEETENKLEKSSGQLNKQENDIPTDLVPVNLLLEVKKLLNAINTLPKGVVPHIKKFLQEDFSFQTMQREVAANSQNGEEIVPALTLRFLITQLEAALRNIQAGNYTAHQINIGYYLTLLFLYGVALTERGKKEDYTEAENKFLVMKMMIQENEICENFMSLVYFGRGLLRCAQKRYNGGLLEFHKSLQEIGDKNDHWFDIDPTEDEDLPTTFKDLLNNFIKTTESNIMKQTICSYLDCERSCEADILKNTSYKGFFQLMCSKSCCVYFHKICWKKFKNLKYPGENDQSFSGKKCLKEGCTGDMVRMLQCDVPGIVKILFEVVRKDEYITIENLGASYRKLISLKITDTDIRPKISLKFNTKDEMPIFKLDYNYFYHLLHIIIISGTDIVRQIFDEAMPPPLLKKELLIHKNVLESYYNHLWTNHPLGGSWHLLYPPNKELPQSKQFDLCLLLALIKHLNVFPAPKKGWNMEPPSSDISKSADILRLCKYRDILLSEILMNGLTESQFNSIWKKVSDILLRLGMMQEDIDKVKENPIENISLDYHQLSVYLGIPVPEIIQRMLSCYQQGIEIEELQNEEEELSPPLMEYNINVKSHPEIQFAEINKDGTSIPSESSTESLKDLQEVKSKQRKKKKTKNKKNKDSKEDQVPYVVEKEEQLRKEQANPHSVSRLIKDDASDVQEDSAMEDKFYSLDELHILDMIEQGSAGKVTTDYGETEKERLARQRQLYKLHYQCEDFKRQLRTVTFRWQENQMQIKKKDKIIASLNQQVAFGINKVSKLQRQIHAKDNEIKNLKEQLSMKRSQWEMEKHNLESTMKTYVSKLNAETSRALTAEVYFLQCRRDFGLLHLEQTEKECLNQLARVTHMAASNLESLQLKAAVDSWNAIVADVRNKIAFLRTQYNEQINKVKQGFALSTLPPVQLPPPPPSPEILMQQFLGRPLVKESFFRPILTVPQMPAVCPGVVSATGQPRAPLMTGIAWALPAPVGDAVPPSAGLRSDPSIMNWERITDRLKTAFPQQTRKELTDFLRKLKDAYGKSLSELTFDEIVCKISQFIDPKKSQSQGKSVSNVNCVSPSHSPSQPDAAQPPKPAWRPLTSQGPATWEGASNPDEEEEEEEPCVICHENLSPENLSVLPCAHKFHAQCIRPWLMQQGTCPTCRLHVLLPEEFPGHPSRQLPKI

SEQ ID NO: 754218 - protein, 1216 aa, Homo sapiens
MDSLPDEFFVRHPAVEDQRKEETENKLEKSSGQLNKQENDIPTDLVPVNLLLEVKKLLNAINTLPKGVVPHIKKFLQEDFSFQTMQREVAANSQNGEEIVPALTLRFLITQLEAALRNIQAGNYTAHQINIGYYLTLLFLYGVALTERGKKEDYTEAENKFLVMKMMIQENEICENFMSLVYFGRGLLRCAQKRYNGGLLEFHKSLQEIGDKNDHWFDIDPTEDEDLPTTFKDLLNNFIKTTESNIMKQTICSYLDCERSCEADILKNTSYKGFFQLMCSKSCCVYFHKICWKKFKNLKYPGENDQSFSGKKCLKEGCTGDMVRMLQCDVPGIVKILFEVVRKDEYITIENLGASYRKLISLKITDTDIRPKISLKFNTKDEMPIFKLDYNYFYHLLHIIIISGTDIVRQIFDEAMPPPLLKKELLIHKNVLESYYNHLWTNHPLGGSWHLLYPPNKELPQSKQFDLCLLLALIKHLNVFPAPKKGWNMEPPSSDISKSADILRLCKYRDILLSEILMNGLTESQFNSIWKKVSDILLRLGMMQEDIDKVKENPIENISLDYHQLSVYLGIPVPEIIQRMLSCYQQGIALQSITGSQRIEIEELQNEEEELSPPLMEYNINVKSHPEIQFAEINKDGTSIPSESSTESLKDLQEVKSKQRKKKKTKNKKNKDSKEDQVPYVVEKEEQLRKEQANPHSVSRLIKDDASDVQEDSAMEDKFYSLDELHILDMIEQGSAGKVTTDYGETEKERLARQRQLYKLHYQCEDFKRQLRTVTFRWQENQMQIKKKDKIIASLNQQVAFGINKVSKLQRQIHAKDNEIKNLKEQLSMKRSQWEMEKHNLESTMKTYVSKLNAETSRALTAEVYFLQCRRDFGLLHLEQTEKECLNQLARVTHMAASNLESLQLKAAVDSWNAIVADVRNKIAFLRYFLVFFYQTQYNEQINKVKQGFALSTLPPVQLPPPPPSPEILMQQFLGRPLVKESFFRPILTVPQMPAVCPGVVSATGQPRAPLMTGIAWALPAPVGDAVPPSAGLRSDPSIMNWERITDRLKTAFPQQTRKELTDFLRKLKDAYGKSLSELTFDEIVCKISQFIDPKKSQSQGKSVSNVNCVSPSHSPSQPDAAQPPKPAWRPLTSQGPATWEGASNPDEEEEEEEPCVICHENLSPENLSVLPCAHKFHAQCIRPWLMQQGTCPTCRLHVLLPEEFPGHPSRQLPKI

SEQ ID NO: 754219 - protein, 1124 aa, Homo sapiens
MQREVAANSQNGEEIVPALTLRFLITQLEAALRNIQAGNYTAHQINIGYYLTLLFLYGVALTERGKKEDYTEAENKFLVMKMMIQENEICENFMSLVYFGRGLLRCAQKRYNGGLLEFHKSLQEIGDKNDHWFDIDPTEDEDLPTTFKDLLNNFIKTTESNIMKQTICSYLDCERSCEADILKNTSYKGFFQLMCSKSCCVYFHKICWKKFKNLKYPGENDQSFSGKKCLKEGCTGDMVRMLQCDVPGIVKILFEVVRKDEYITIENLGASYRKLISLKITDTDIRPKISLKFNTKDEMPIFKLDYNYFYHLLHIIIISGTDIVRQIFDEAMPPPLLKKELLIHKNVLESYYNHLWTNHPLGGSWHLLYPPNKELPQSKQFDLCLLLALIKHLNVFPAPKKGWNMEPPSSDISKSADILRLCKYRDILLSEILMNGLTESQFNSIWKKVSDILLRLGMMQEDIDKVKENPIENISLDYHQLSVYLGIPVPEIIQRMLSCYQQGIALQSITGSQRIEIEELQNEEEELSPPLMEYNINVKSHPEIQFAEINKDGTSIPSESSTESLKDLQEVKSKQRKKKKTKNKKNKDSKEDQVPYVVEKEEQLRKEQANPHSVSRLIKDDASDVQEDSAMEDKFYSLDELHILDMIEQGSAGKVTTDYGETEKERLARQRQLYKLHYQCEDFKRQLRTVTFRWQENQMQIKKKDKIIASLNQQVAFGINKVSKLQRQIHAKDNEIKNLKEQLSMKRSQWEMEKHNLESTMKTYVSKLNAETSRALTAEVYFLQCRRDFGLLHLEQTEKECLNQLARVTHMAASNLESLQLKAAVDSWNAIVADVRNKIAFLRTQYNEQINKVKQGFALSTLPPVQLPPPPPSPEILMQQFLGRPLVKESFFRPILTVPQMPAVCPGVVSATGQPRAPLMTGIAWALPAPVGDAVPPSAGLRSDPSIMNWERITDRLKTAFPQQTRKELTDFLRKLKDAYGKSLSELTFDEIVCKISQFIDPKKSQSQGKSVSNVNCVSPSHSPSQPDAAQPPKPAWRPLTSQGPATWEGASNPDEEEEEEEPCVICHENLSPENLSVLPCAHKFHAQCIRPWLMQQGTCPTCRLHVLLPEEFPGHPSRQLPKI

SEQ ID NO: 754220 - protein, 1080 aa, Homo sapiens
AWSRPRYAGLFLYGVALTERGKKEDYTEAENKFLVMKMMIQENEICENFMSLVYFGRGLLRCAQKRYNGGLLEFHKSLQEIGDKNDHWFDIDPTEDEDLPTTFKDLLNNFIKTTESNIMKQTICSYLDCERSCEADILKNTSYKGFFQLMCSKSCCVYFHKICWKKFKNLKYPGENDQSFSGKKCLKEGCTGDMVRMLQCDVPGIVKILFEVVRKDEYITIENLGASYRKLISLKITDTDIRPKISLKFNTKDEMPIFKLDYNYFYHLLHIIIISGTDIVRQIFDEAMPPPLLKKELLIHKNVLESYYNHLWTNHPLGGSWHLLYPPNKELPQSKQFDLCLLLALIKHLNVFPAPKKGWNMEPPSSDISKSADILRLCKYRDILLSEILMNGLTESQFNSIWKKVSDILLRLGMMQEDIDKVKENPIENISLDYHQLSVYLGIPVPEIIQRMLSCYQQGIALQSITGSQRIEIEELQNEEEELSPPLMEYNINVKSHPEIQFAEINKDGTSIPSESSTESLKDLQEVKSKQRKKKKTKNKKNKDSKEDQVPYVVEKEEQLRKEQANPHSVSRLIKDDASDVQEDSAMEDKFYSLDELHILDMIEQGSAGKVTTDYGETEKERLARQRQLYKLHYQCEDFKRQLRTVTFRWQENQMQIKKKDKIIASLNQQVAFGINKVSKLQRQIHAKDNEIKNLKEQLSMKRSQWEMEKHNLESTMKTYVSKLNAETSRALTAEVYFLQCRRDFGLLHLEQTEKECLNQLARVTHMAASNLESLQLKAAVDSWNAIVADVRNKIAFLRTQYNEQINKVKQGFALSTLPPVQLPPPPPSPEILMQQFLGRPLVKESFFRPILTVPQMPAVCPGVVSATGQPRAPLMTGIAWALPAPVGDAVPPSAGLRSDPSIMNWERITDRLKTAFPQQTRKELTDFLRKLKDAYGKSLSELTFDEIVCKISQFIDPKKSQSQGKSVSNVNCVSPSHSPSQPDAAQPPKPAWRPLTSQGPATWEGASNPDEEEEEEEPCVICHENLSPENLSVLPCAHKFHAQCIRPWLMQQGTCPTCRLHVLLPEEFPGHPSRQLPKI

SEQ ID NO: 754221 - protein, 1069 aa, Homo sapiens
MDGEDLPSVTDIRRPRLYLLKWLKSDKALMMLFNDGTFQVNFYHDHTKIIICSQNEEYLLTYINEDRISTTFRLTTLLMSGCSSELKNRMEYALNMLLQRCNMKDFSNGPYGTPLFHCERSCEADILKNTSYKGFFQLMCSKSCCVYFHKICWKKFKNLKYPGENDQSFSGKKCLKEGCTGDMVRMLQCDVPGIVKILFEVVRKDEYITIENLGASYRKLISLKITDTDIRPKISLKFNTKDEMPIFKLDYNYFYHLLHIIIISGTDIVRQIFDEAMPPPLLKKELLIHKNVLESYYNHLWTNHPLGGSWHLLYPPNKELPQSKQFDLCLLLALIKHLNVFPAPKKGWNMEPPSSDISKSADILRLCKYRDILLSEILMNGLTESQFNSIWKKVSDILLRLGMMQEDIDKVKENPIENISLDYHQLSVYLGIPVPEIIQRMLSCYQQGIALQSITGSQRIEIEELQNEEEELSPPLMEYNINVKSHPEIQFAEINKDGTSIPSESSTESLKDLQEVKSKQRKKKKTKNKKNKDSKEDQVPYVVEKEEQLRKEQANPHSVSRLIKDDASDVQEDSAMEDKFYSLDELHILDMIEQGSAGKVTTDYGETEKERLARQRQLYKLHYQCEDFKRQLRTVTFRWQENQMQIKKKDKIIASLNQQVAFGINKVSKLQRQIHAKDNEIKNLKEQLSMKRSQWEMEKHNLESTMKTYVSKLNAETSRALTAEVYFLQCRRDFGLLHLEQTEKECLNQLARVTHMAASNLESLQLKAAVDSWNAIVADVRNKIAFLRTQYNEQINKVKQGFALSTLPPVQLPPPPPSPEILMQQFLGRPLVKESFFRPILTVPQMPAVCPGVVSATGQPRAPLMTGIAWALPAPVGDAVPPSAGLRSDPSIMNWERITDRLKTAFPQQTRKELTDFLRKLKDAYGKSLSELTFDEIVCKISQFIDPKKSQSQGKSVSNVNCVSPSHSPSQPDAAQPPKPAWRPLTSQGPATWEGASNPDEEEEEEEPCVICHENLSPENLSVLPCAHKFHAQCIRPWLMQQGTCPTCRLHVLLPEEFPGHPSRQLPKI

SEQ ID NO: 754222 - protein, 494 aa, Homo sapiens [sequence omitted]

SEQ ID NO: 754223 - protein, 760 aa, Homo sapiens
MDSLPDEFFVRHPAVEDQRKEETENKLEKSSGQLNKQENDIPTDLVPVNLLLEVKKLLNAINTLPKGVVPHIKKFLQEDFSFQTMQREVAANSQNGEEIVPALTLRFLITQLEAALRNIQAGNYTAHQINIGYYLTLLFLYGVALTERGKKEDYTEAENKFLVMKMMIQENEICENFMSLVYFGRGLLRCAQKRYNGGLLEFHKSLQEIGDKNDHWFDIDPTEDEDLPTTFKDLLNNFIKTTESNIMKQTICSYLDCERSCEADILKNTSYKGFFQLMCSKSCCVYFHKICWKKFKNLKYPGENDQSFSGKKCLKEGCTGDMVRMLQCDVPGIVKILFEVVRKDEYITIENLGASYRKLISLKITDTDIRPKISLKFNTKDEMPIFKLDYNYFYHLLHIIIISGTDIVRQIFDEAMPPPLLKKELLIHKNVLESYYNHLWTNHPLGGSWHLLYPPNKELPQSKQFDLCLLLALIKHLNVFPAPKKGWNMEPPSSDISKSADILRLCKYRDILLSEILMNGLTESQFNSIWKKVSDILLRLGMMQEDIDKVKENPIENISLDYHQLSVYLGIPVPEIIQRMLSCYQQGIALQSITGSQRIEIEELQNEEEELSPPLMEYNINVKSHPEIQFAEINKDGTSIPSESSTESLKDLQEVKSKQRKKKKTKNKKNKDSKEDQVPYVVEKEEQLRKEQANPHSVSRLIKDDASDVQEDSAMEDKFYSLDELHILDMIEQVSMIREGACLLLLLSGFSCDSLNSITL

SEQ ID NO: 754224 - protein, 426 aa, Homo sapiens [sequence omitted]

SEQ ID NO: 754225 - protein, 314 aa, Homo sapiens
MSDRNLESLQLKAAVDSWNAIVADVRNKIAFLRTQYNEQINKVKQGFALSTLPPVQLPPPPPSPEILMQQFLGRPLVKESFFRPILTVPQMPAVCPGVVSATGQPRAPLMTGIAWALPAPVGDAVPPSAGLRSDPSIMNWERITDRLKTAFPQQTRKELTDFLRKLKDAYGKSLSELTFDEIVCKISQFIDPKKSQSQGKSVSNVNCVSPSHSPSQPDAAQPPKPAWRPLTSQGPATWEGASNPDEEEEEEEPCVICHENLSPENLSVLPCAHKFHAQCIRPWLMQQGTCPTCRLHVLLPEEFPGHPSRQLPKI

SEQ ID NO: 754226 - protein, 588 aa, Homo sapiens
MDSLPDEFFVRHPAVEDQRKEETENKLEKSSGQLNKQENDIPTDLVPVNLLLEVKKLLNAINTLPKGVVPHIKKFLQEDFSFQTMQREVAANSQNGEEIVPALTLRFLITQLEAALRNIQAGNYTAHQINIGYYLTLLFLYGVALTERGKKEDYTEAENKFLVMKMMIQENEICENFMSLVYFGRGLLRCAQKRYNGGLLEFHKSLQEIGDKNDHWFDIDPTEDEDLPTTFKDLLNNFIKTTESNIMKQTICSYLDCERSCEADILKNTSYKGFFQLMCSKSCCVYFHKICWKKFKNLKYPGENDQSFSGKKCLKEGCTGDMVRMLQCDVPGIVKILFEVVRKDEYITIENLGASYRKLISLKITDTDIRPKISLKFNTKDEMPIFKLDYNYFYHLLHIIIISGTDIVRQIFDEAMPPPLLKKELLIHKNVLESYYNHLWTNHPLGGSWHLLYPPNKELPQSKQFDLCLLLALIKHLNVFPAPKKGWNMEPPSSDISKSADILRLCKYRDILLSEILMNGLTESQFNSIWKKVSDILLRLGMMQEDIDKVKENPIENISLDYHQLSVYLGIPVPEIIQRMLSCYQQGY

SEQ ID NO: 754227 - protein, 386 aa, Homo sapiens
MDSLPDEFFVRHPAVEDQRKEETENKLEKSSGQLNKQENDIPTDLVPVNLLLEVKKLLNAINTLPKGVVPHIKKFLQEDFSFQTMQREVAANSQNGEEIVPALTLRFLITQLEAALRNIQAGNYTAHQINIGYYLTLLFLYGVALTERGKKEDYTEAENKFLVMKMMIQENEICENFMSLVYFGRGLLRCAQKRYNGGLLEFHKSLQEIGDKNDHWFDIDPTEDEDLPTTFKDLLNNFIKTTESNIMKQTICSYLDCERSCEADILKNTSYKGFFQLMCSKSCCVYFHKICWKKFKNLKYPGENDQSFSGKKCLKEGCTGDMVRMLQCDVPGIVKILFEVVRKDEYITIENLGASYRKLISLKITDTDIRPKISLKFNTKELLYSQ

SEQ ID NO: 754228 - protein, 1208 aa, Homo sapiens; identical to SEQ ID NO: 754214

SEQ ID NO: 754229 - protein, 279 aa, Homo sapiens
MENSEKTEVVLLACGSFNPITNMHLRLFELAKDYMNGTGRYTVVKGIISPVGDAYKKKGLIPAYHRVIMAELATKNSKWVEVDTWESLQKEWKETLKVLRHHQEKLEASDCDHQQNSPTLERPGRKRKWTETQDSSQKKSLEPKTKAVPKVKLLCGADLLESFAVPNLWKSEDITQIVANYGLICVTRAGNDAQKFIYESDVLWKHRSNIHVVNEWIANDISSTKIRRALRRGQSIRYLVPDLVQEYIEKHNLYSSESEDRNAGVILAPLQRNTAEAKT

SEQ ID NO: 754230 - protein, 279 aa, Homo sapiens; identical to SEQ ID NO: 754229

SEQ ID NO: 754231 - protein, 124 aa, Homo sapiens
MENSEKTEVVLLACGSFNPITNMHLRLFELAKDYMNGTGRYTVVKGIISPVGDAYKKKGLIPAYHRVIMAELATKNSKWVEVDTWESLQKEWKETLKVLSCAKGQAAVWGRFIGVLCCSQFVEE

SEQ ID NO: 754232 - protein, 160 aa, Homo sapiens
MENSEKTEVVLLACGSFNPITNMHLRLFELAKDYMNGTGRYTVVKGIISPVGDAYKKKGLIPAYHRVIMAELATKNSKWVEVDTWESLQKEWKETLKVLRHHQEKLEASDCDHQQNSPTLERPGRKRKWTETQDSSQKKSLEPKTKDGVSLYHPGWSAVA

SEQ ID NO: 754233 - protein, 148 aa, Homo sapiens
MENSEKTEVVLLACGSFNPITNMHLRLFELAKDYMNGTGRYTVVKGIISPVGDAYKKKGLIPAYHRVIMAELATKNSKWVEVDTWESLQKEWKETLKVLRHHQEKLEASDCDHQQNSPTLERPGRKRKWTETQDSSQKKSLEPKTKGL

SEQ ID NO: 754234 - protein, 153 aa, Homo sapiens
MENSEKTEVVLLACGSFNPITNMHLRLFELAKDYMNGTGRYTVVKGIISPVGDAYKKKGLIPAYHRVIMAELATKNSKWVEVDTWESLQKEWKETLKVLRHHQEKLEASDCDHQQNSPLHSSLGKKAKLHLKEKKKKDRVWWLTPVIPALWEA

SEQ ID NO: 754235 - protein, 107 aa, Homo sapiens
LHPKACWGCFKILKTDFGILIPQSRLLIHIHAQKHPRTHERLFGLQQVGDTDKWTRGWIIHDPIKDSKEVTLDCGQGSSTTCLETLRAFPKGILESPLLPFRGLGIL

SEQ ID NO: 754236 - protein, 66 aa, Homo sapiens
PSLRGRLCSSASHSDWTFFSTASGRGFLPGAQWSRTDAASKLFHWVPVCSSHALEPLKLLGERRSS

SEQ ID NO: 754237 - protein, 137 aa, Homo sapiens
FGQKVTLIRHQRTHTGEKPYLCPKCGRAFGFKSLLTRHQRTHSEEELYVDRVCGQGLGQKSHLISDQRTHSGEKPCICDECGRGFGFKSALIRHQRTHSGEKPYVCRECGRGFSQKSHLHRHRRTKSGHQLLPQEVF

SEQ ID NO: 754238 - protein, 295 aa, Homo sapiens
RKCSELLYVFQTQLALKLLQCLKVTDAPHFYGLPSLERTLRGMANLTAFPGWSSHSPLTKPLDICVKYLSGLLEVITSFYVERGGNAMSFMGKGVTKSTILCLLHLSHEMMAQAGSLEWMSLWFLPLGSHSEEHIPTQQGLAWLIPLWVDRDPEVRFTSLGLGSALTTLETGCVALANSCQNISGGLWGTVVNILLDQSECSMVRREAAFILQNLLVIPMPTEIIKDYTWQGPCVHDEDSGLSLIGKPALQALLYHCHFYEHLNQMVKHCYLGRCMFDLNFSAFDRNSESNDLNG

SEQ ID NO: 754239 - protein, 83 aa, Homo sapiens
DIANRWSFEGMDRWIKKIEEHAPGVPKILVGNRLHLAFKRQVPREQAQAYAERLGVTFFEVSPLCNFNIIESFTELARIVLLR

SEQ ID NO: 754240 - protein, 411 aa, Homo sapiens
NDAYKEKSSSHTSLFSGSSSSTKYDPDILKAEISTTRLRVKKLKRELSQMKQELLYKEQGFETLQQIDKKMSGGQSGYELSEAKAILTELKSIRKAISSGEKEKQDLMQSLAKLQERFHLDQNIGRSEPDLRCSPVNSHLCLSRQTLDAGSQTSISGDIGVRSRSNLAEKVRLSLQYEEAKRSMANLKIELSKLDSEAWPGALDIEKEKLMLINEKEELLKELQFVTPQKRTQDELERLEAERQRLEEELLSVRGTPSRALAERLRLEERRKELLQKLEETTKLTTYLHSQLKSLSASTLSMSSGSSLGSLASSRGSLNTSSRGSLNSLSSTELYYSSQSDQIDVDYQYKLDFLLQEKSGYIPSGPITTIHENEVVKSPSQPGQSGLCGVAAAATGHTPPLAEAPKSVASL

SEQ ID NO: 754241 - protein, 220 aa, Homo sapiens
MDLLFGRRKTPEELLRQNQRALNRAMRELDRERQKLETQEKKIIADIKKMAKQGQMDAVRIMAKDLVRTRRYVRKFVLMRANIQAVSLKIQTLKSNNSMAQAMKGVTKAMGTMNRQLKLPQIQKIMMEFERQAEIMDMKEEMMNDAIDDAMGDEEDEEESDAVVSQVLDELGLSLTDELSNSLMGLAKCGAGEKARRARLCSVDWGGYGGGACPTGAVHR

SEQ ID NO: 754242 - protein, 222 aa, Homo sapiens
MDLLFGRRKTPEELLRQNQRALNRAMRELDRERQKLETQEKKIIADIKKMAKQGQMDAVRIMAKDLVRTRRYVRKFVLMRANIQAVSLKIQTLKSNNSMAQAMKGVTKAMGTMNRQLKLPQIQKIMMEFERQAEIMDMKEEMMNDAIDDAMGDEEDEEESDAVVSQVLDELGLSLTDELSNLPSTGGSLSVAAGGKKAEAAASALADADADLEERLKNLRRD

SEQ ID NO: 754243 - protein, 222 aa, Homo sapiens; identical to SEQ ID NO: 754242

SEQ ID NO: 754244 - protein, 222 aa, Homo sapiens; identical to SEQ ID NO: 754242

SEQ ID NO: 754245 - protein, 222 aa, Homo sapiens; identical to SEQ ID NO: 754242

SEQ ID NO: 754246 - protein, 222 aa, Homo sapiens; identical to SEQ ID NO: 754242

SEQ ID NO: 754247 - protein, 222 aa, Homo sapiens; identical to SEQ ID NO: 754242

SEQ ID NO: 754248 - protein, 222 aa, Homo sapiens; identical to SEQ ID NO: 754242

SEQ ID NO: 754249 - protein, 222 aa, Homo sapiens; identical to SEQ ID NO: 754242

SEQ ID NO: 754250 - protein, 222 aa, Homo sapiens; identical to SEQ ID NO: 754242

SEQ ID NO: 754251 - protein, 208 aa, Homo sapiens
LGTLTRPDSKKTKTKFFGLPARQTQEKKIIADIKKMAKQGQMDAVRIMAKDLVRTRRYVRKFVLMRANIQAVSLKIQTLKSNNSMAQAMKGVTKAMGTMNRQLKLPQIQKIMMEFERQAEIMDMKEEMMNDAIDDAMGDEEDEEESDAVVSQVLDELGLSLTDELSNLPSTGGSLSVAAGGKKAEAAASALADADADLEERLKNLRRD

SEQ ID NO: 754252 - protein, 101 aa, Homo sapiens
GVDSRGFRMSRAEIMDMKEEMMNDAIDDAMGDEEDEEESDAVVSQVLDELGLSLTDELSNLPSTGGSLSVAAGGKKAEAAASALADADADLEERLKNLRRD

SEQ ID NO: 754253 - protein, 803 aa, Homo sapiens
MKKQFNRMKQLANQTVGRAEKTEVLSEDLLQIERRLDTVRSICHHSHKRLVACFQGQHGTDAERRHKKLPLTALAQNMQEASTQLEDSLLGKMLETCGDAENQLALELSQHEVFVEKEIVDPLYGIAEVEIPNIQKQRKQLARLVLDWDSVRARWNQAHKSSGTNFQGLPSKIDTLKEEMDEAGNKVEQCKDQLAADMYNFMAKEGEYGKFFVTLLEAQADYHRKALAVLEKTLPEMRAHQDKWAEKPAFGTPLEEHLKRSGREIALPIEACVMLLLETGMKEEGLFRIGAGASKLKKLKAALDCSTSHLDEFYSDPHAVAGALKSYLRELPEPLMTFNLYEEWTQVASVQDQDKKLQDLWRTCQKLPPQNFVNFRYLIKFLAKLAQTSDVNKMTPSNIAIVLGPNLLWARNEGTLAEMAAATSVHVVAVIEPIIQHADWFFPEEVEFNVSEAFVPLTTPSSNHSFHTGNDSDSGTLERKRPASMAVMEGDLVKKESPPKPKDPVSAAVPAPGRNNSQIASGQNQPQAAAGSHQLSMGQPHNAAGPSPHTLRRAVKKPAPAPPKPGNPPPGHPGGQSSSGTSQHPPSLSPKPPTRSPSPPTQHTGQPPGQPSAPSQLSAPRRYSSSLSPIQAPNHPPPQPPTQATPLMHTKPNSQGPPNPMALPSEHGLEQPSHTPPQTPTPPSTPPLGKQNPSLPAPQTLAGGNPETAQPHAGTLPRPRPVPKPRNRPSVPPPPQPPGVHSAGDSSLTNTAPTASKIVTDSNSRVSEPHRSIFPEMHSDSASKDVPGRILLDIDNDTESTAL

SEQ ID NO: 754254 - protein, 124 aa, Homo sapiens
TLEDPQRGTITSATSVHVVAVIEPIIQHADWFFPEEVEFNVSEAFVPLTTPSSNHSFHTGNDSDSGTLERKRPASMAVMEGDLVKKERYDLTVHFQTSSKYVVRPVVSGIAQWTWDLRVVAIHP

SEQ ID NO: 754255 - protein, 113 aa, Homo sapiens
RSVGTVWVSLKQCVNYLFNKMRSLCKSPTLCYLDVHSYVLGGRLRSFRLAAESFCIMYGLCLPSPLRTMPMDGDCWLCHLIKLDVTHAASLDCRNVDRNVLFFFFFLNNVIAT

SEQ ID NO: 754256 - protein, 108 aa, Homo sapiens [sequence omitted]

SEQ ID NO: 754257 - protein, 803 aa, Homo sapiens; identical to SEQ ID NO: 754253

SEQ ID NO: 754258 - protein, 881 aa, Homo sapiens
MKKQFNRMKQLANQTVGRAEKTEVLSEDLLQIERRLDTVRSICHHSHKRLVACFQGQHGTDAERRHKKLPLTALAQNMQEASTQLEDSLLGKMLETCGDAENQLALELSQHEVFVEKEIVDPLYGIAEVEIPNIQKQRKQLARLVLDWDSVRARWNQAHKSSGTNFQGLPSKIDTLKEEMDEAGNKVEQCKDQLAADMYNFMAKEGEYGKFFVTLLEAQADYHRKALAVLEKTLPEMRAHQDKWAEKPAFGTPLEEHLKRSGREIALPIEACVMLLLETGMKEEGLFRIGAGASKLKKLKAALDCSTSHLDEFYSDPHAVAGALKSYLRELPEPLMTFNLYEEWTQVASVQDQDKKLQDLWRTCQKLPPQNFVNFRYLIKFLAKLAQTSDVNKMTPSNIAIVLGPNLLWARNEGTLAEMAAATSVHVVAVIEPIIQHADWFFPEEVEFNVSEAFVPLTTPSSNHSFHTGNDSDSGTLERKRPASMAVMEGDLVKKESFGVKLMDFQAHRRGGTLNRKHISPAFQPPLPPTDGSTVVPAGPEPPPQSSRAESSSGGGTVPSSAGILEQGPSPGDGSPPKPKDPVSAAVPAPGRNNSQIASGQNQPQAAAGSHQLSMGQPHNAAGPSPHTLRRAVKKPAPAPPKPGNPPPGHPGGQSSSGTSQHPPSLSPKPPTRSPSPPTQHTGQPPGQPSAPSQLSAPRRYSSSLSPIQAPNHPPPQPPTQATPLMHTKPNSQGPPNPMALPSEHGLEQPSHTPPQTPTPPSTPPLGKQNPSLPAPQTLAGGNPETAQPHAGTLPRPRPVPKPRNRPSVPPPPQPPGVHSAGDSSLTNTAPTASKIVTDSNSRVSEPHRSIFPEMHSDSASKDVPGRILLDIDNDTESTAL

SEQ ID NO: 754259 - protein, 854 aa, Homo sapiens
MKKQFNRMKQLANQTVGRAEKTEVLSEDLLQIERRLDTVRSICHHSHKRLVACFQGQHGTDAERRHKKLPLTALAQNMQEASTQLEDSLLGKMLETCGDAENQLALELSQHEVFVEKEIVDPLYGIAEVEIPNIQKQRKQLARLVLDWDSVRARWNQAHKSSGTNFQGLPSKIDTLKEEMDEAGNKVEQCKDQLAADMYNFMAKEGEYGKFFVTDKWAEKPAFGTPLEEHLKRSGREIALPIEACVMLLLETGMKEEGLFRIGAGASKLKKLKAALDCSTSHLDEFYSDPHAVAGALKSYLRELPEPLMTFNLYEEWTQVASVQDQDKKLQDLWRTCQKLPPQNFVNFRYLIKFLAKLAQTSDVNKMTPSNIAIVLGPNLLWARNEGTLAEMAAATSVHVVAVIEPIIQHADWFFPEEVEFNVSEAFVPLTTPSSNHSFHTGNDSDSGTLERKRPASMAVMEGDLVKKESFGVKLMDFQAHRRGGTLNRKHISPAFQPPLPPTDGSTVVPAGPEPPPQSSRAESSSGGGTVPSSAGILEQGPSPGDGSPPKPKDPVSAAVPAPGRNNSQIASGQNQPQAAAGSHQLSMGQPHNAAGPSPHTLRRAVKKPAPAPPKPGNPPPGHPGGQSSSGTSQHPPSLSPKPPTRSPSPPTQHTGQPPGQPSAPSQLSAPRRYSSSLSPIQAPNHPPPQPPTQATPLMHTKPNSQGPPNPMALPSEHGLEQPSHTPPQTPTPPSTPPLGKQNPSLPAPQTLAGGNPETAQPHAGTLPRPRPVPKPRNRPSVPPPPQPPGVHSAGDSSLTNTAPTASKIVTDSNSRVSEPHRSIFPEMHSDSASKDVPGRILLDIDNDTESTAL

SEQ ID NO: 754260 - protein, 693 aa, Homo sapiens
NKTYLSVPPKPGKGEQIIGPKIFIVTLLEAQADYHRKALAVLEKTLPEMRAHQDKWAEKPAFGTPLEEHLKRSGREIALPIEACVMLLLETGMKEEGLFRIGAGASKLKKLKAALDCSTSHLDEFYSDPHAVAGALKSYLRELPEPLMTFNLYEEWTQVASVQDQDKKLQDLWRTCQKLPPQNFVNFRYLIKFLAKLAQTSDVNKMTPSNIAIVLGPNLLWARNEGTLAEMAAATSVHVVAVIEPIIQHADWFFPEEVEFNVSEAFVPLTTPSSNHSFHTGNDSDSGTLERKRPASMAVMEGDLVKKESFGVKLMDFQAHRRGGTLNRKHISPAFQPPLPPTDGSTVVPAGPEPPPQSSRAESSSGGGTVPSSAGILEQGPSPGDGSPPKPKDPVSAAVPAPGRNNSQIASGQNQPQAAAGSHQLSMGQPHNAAGPSPHTLRRAVKKPAPAPPKPGNPPPGHPGGQSSSGTSQHPPSLSPKPPTRSPSPPTQHTGQPPGQPSAPSQLSAPRRYSSSLSPIQAPNHPPPQPPTQATPLMHTKPNSQGPPNPMALPSEHGLEQPSHTPPQTPTPPSTPPLGKQNPSLPAPQTLAGGNPETAQPHAGTLPRPRPVPKPRNRPSVPPPPQPPGVHSAGDSSLTNTAPTASKIVTDSNSRVSEPHRSIFPEMHSDSASKDVPGRILLDIDNDTESTAL

SEQ ID NO: 754261 - protein, 608 aa, Homo sapiens
MLLLETGMKEEGLFRIGAGASKLKKLKAALDCSTSHLDEFYSDPHAVAGALKSYLRELPEPLMTFNLYEEWTQVASVQDQDKKLQDLWRTCQKLPPQNFVNFRYLIKFLAKLAQTSDVNKMTPSNIAIVLGPNLLWARNEGTLAEMAAATSVHVVAVIEPIIQHADWFFPEEVEFNVSEAFVPLTTPSSNHSFHTGNDSDSGTLERKRPASMAVMEGDLVKKESFGVKLMDFQAHRRGGTLNRKHISPAFQPPLPPTDGSTVVPAGPEPPPQSSRAESSSGGGTVPSSAGILEQGPSPGDGSPPKPKDPVSAAVPAPGRNNSQIASGQNQPQAAAGSHQLSMGQPHNAAGPSPHTLRRAVKKPAPAPPKPGNPPPGHPGGQSSSGTSQHPPSLSPKPPTRSPSPPTQHTGQPPGQPSAPSQLSAPRRYSSSLSPIQAPNHPPPQPPTQATPLMHTKPNSQGPPNPMALPSEHGLEQPSHTPPQTPTPPSTPPLGKQNPSLPAPQTLAGGNPETAQPHAGTLPRPRPVPKPRNRPSVPPPPQPPGVHSAGDSSLTNTAPTASKIVTDSNSRVSEPHRSIFPEMHSDSASKDVPGRILLDIDNDTESTAL

SEQ ID NO: 754262 - protein, 410 aa, Homo sapiens
DAVYSDCIVLGPNLSWARNEGTLAEMAAATSVHVVAVIEPIIQHADWFFPEEVEFNVSEAFVPLTTPSSNHSFHTGNDSDSGTLERKRPASMAVMEGDLVKKESPPKPKDPVSAAVPAPGRNNSQIASGQNQPQAAAGSHQLSMGQPHNAAGPSPHTLRRAVKKPAPAPPKPGNPPPGHPGGQSSSGTSQHPPSLSPKPPTRSPSPPTQHTGQPPGQPSAPSQLSAPRRYSSSLSPIQAPNHPPPQPPTQATPLMHTKPNSQGPPNPMALPSEHGLEQPSHTPPQTPTPPSTPPLGKQNPSLPAPQTLAGGNPETAQPHAGTLPRPRPVPKPRNRPSVPPPPQPPGVHSAGDSSLTNTAPTASKIVTDSNSRVSEPHRSIFPEMHSDSASKDVPGRILLDIDNDTESTAL

SEQ ID NO: 754263 - protein, 840 aa, Homo sapiens
MKKQFNRMKQLANQTVGRAEKTEVLSEDLLQIERRLDTVRSICHHSHKRLVACFQGQHGTDAERRHKKLPLTALAQNMQEASTQLEDSLLGKMLETCGDAENQLALELSQHEVFVEKEIVDPLYGIAEVEIPNIQKQRKQLARLVLDWDSVRARWNQAHKSSGTNFQGLPSKIDTLKEEMDEAGNKVEQCKDQLAADMYNFMAKEGEYGKFFVTLLEAQADYHRKALAVLEKTLPEMRAHQDKWAEKPAFGTPLEEHLKRSGREIALPIEACVMLLLETGMKEEGLFRIGAGASKLKKLKAALDCSTSHLDEFYSDPHAVAGALKSYLRELPEPLMTFNLYEEWTQVASVQDQDKKLQDLWRTCQKLPPQNFVNFRYLIKFLAKLAQTSDVNKMTPSNIAIVLGPNLLWARNEGTLAEMAAATSVHVVAVIEPIIQHADWFFPEEVEFNVSEAFVPLTTPSSNHSFHTGNDSDSGTLERKRPASMAVMEGDLVKKESFGVKLMDFQAHRRGGTLNRKHISPAFQPPLPPTDGSTVVPAGPEPPPQSSRAESSSGGGTVPSSAGILEQGPSPGDGSPPKPKDPVSAAVPAPGRNNSQIASGQNQPQAAAGSHQLSMGQPHNAAGPSPHTLRRAVKKPAPAPPKPGNPPPGHPGGQSSSGTSQHPPSLSPKPPTRSPSPPTQHTGQPPGQPSAPSQLSAPRRYSSSLSPIQAPNHPPPQPPTQATPLMHTKPNSQGPPNPMALPSEHGLEQPSHTPPQTPTPPSTPPLGKQNPSLPAPQTLAGGNPETAQPHAGTLPRPRPVPKPRNRPSVPPPPQPPGVHSAGDSSLTNTAPTASKIVTDV

SEQ ID NO: 754264 - protein, 374 aa, Homo sapiens
DSRGSPRYADWPTSEEVEFNVSEAFVPLTTPSSNHSFHTGNDSDSGTLERKRPASMAVMEGDLVKKESPPKPKDPVSAAVPAPGRNNSQIASGQNQPQAAAGSHQLSMGQPHNAAGPSPHTLRRAVKKPAPAPPKPGNPPPGHPGGQSSSGTSQHPPSLSPKPPTRSPSPPTQHTGQPPGQPSAPSQLSAPRRYSSSLSPIQAPNHPPPQPPTQATPLMHTKPNSQGPPNPMALPSEHGLEQPSHTPPQTPTPPSTPPLGKQNPSLPAPQTLAGGNPETAQPHAGTLPRPRPVPKPRNRPSVPPPPQPPGVHSAGDSSLTNTAPTASKIVTDSNSRVSEPHRSIFPEMHSDSASKDVPGRILLDIDNDTESTAL

SEQ ID NO: 754265 - protein, 371 aa, Homo sapiens
PRGVIADWFFPEKVEFNVSEAFVPLTTPSSNHSFHTGNDSDSGTLERKRPASMAVMEGDLVKKESPPKPKDPVSAAVPAPGRNNSQIASGQNQPQAAAGSHQLSMGQPHNAAGPSPHTLRRAVKKPAPAPPKPGNPPPGHPGGQSSSGTSQHPPSLSPKPPTRSPSPPTQHTGQPPGQPSAPSQLSAPRRYSSSLSPIQAPNHPPPQPPTQATPLMHTKPNSQGPPNPMALPSEHGLEQPSHTPPQTPTPPSTPPLGKQNPSLPAPQTLAGGNPETAQPHAGTLPRPRPVPKPRNRPSVPPPPQPPGVHSAGDSSLTNTAPTASKIVTDSNSRVSEPHRSIFPEMHSDSASKDVPGRILLDIDNDTESTAL

SEQ ID NO: 754266 - protein, 326 aa, Homo sapiens
MFRFSSWDCLTSNLTFTPLSPPKPKDPVSAAVPAPGRNNSQIASGQNQPQAAAGSHQLSMGQPHNAAGPSPHTLRRAVKKPAPAPPKPGNPPPGHPGGQSSSGTSQHPPSLSPKPPTRSPSPPTQHTGQPPGQPSAPSQLSAPRRYSSSLSPIQAPNHPPPQPPTQATPLMHTKPNSQGPPNPMALPSEHGLEQPSHTPPQTPTPPSTPPLGKQNPSLPAPQTLAGGNPETAQPHAGTLPRPRPVPKPRNRPSVPPPPQPPGVHSAGDSSLTNTAPTASKIVTDSNSRVSEPHRSIFPEMHSDSASKDVPGRILLDIDNDTESTAL

SEQ ID NO: 754267 - protein, 156 aa, Homo sapiens
MHTKPNSQGPPNPMALPSEHGLEQPSHTPPQTPTPPSTPPLGKQNPSLPAPQTLAGGNPETAQPHAGTLPRPRPVPKPRNRPSVPPPPQPPGVHSAGDSSLTNTAPTASKIVTDSNSRVSEPHRSIFPEMHSDSASKDVPGRILLDIDNDTESTAL

SEQ ID NO: 754268 - protein, 853 aa, Homo sapiens
MKKQFNRMKQLANQTVGRAEKTEVLSEDLLQIERRLDTVRSICHHSHKRLVACFQGQHGTDAERRHKKLPLTALAQNMQEASTQLEDSLLGKMLETCGDAENQLALELSQHEVFVEKEIVDPLYGIAEVEIPNIQKQRKQLARLVLDWDSVRARWNQAHKSSGTNFQGLPSKIDTLKEEMDEAGNKVEQCKDQLAADMYNFMAKEGEYGKFFVTLLEAQADYHRKALAVLEKTLPEMRAHQDKWAEKPAFGTPLEEHLKRSGREIALPIEACVMLLLETGMKEEGLFRIGAGASKLKKLKAALDCSTSHLDEFYSDPHAVAGALKSYLRELPEPLMTFNLYEEWTQVASVQDQDKKLQDLWRTCQKLPPQNFVNFRYLIKFLAKLAQTSDVNKMTPSNIAIVLGPNLLWARNEGTLAEMAAATSVHVVAVIEPIIQHADWFFPEEVEFNVSEAFVPLTTPSSNHSFHTGNDSDSGTLERKRPASMAVMEGDLVKKESFGVKLMDFQAHRRGGTLNRKHISPAFQPPLPPTDGSTVVPAGPEPPPQSSRAESSSGGGTVPSSAGILEQGPSPGDGSPPKPKDPVSAAVPAPGRNNSQIASGQNQPQAAAGSHQLSMGQPHNAAGPSPHTLRRAVKKPAPAPPKPGNPPPGHPGGQSSSGTSQHPPSLSPKPPTRSPSPPTQHTGQPPGQPSAPSQLSAPRRYSSSLSPIQAPNHPPPQPPTQATPLMHTKPNSQGPPNPMALPSEHGLEQPSHTPPQTPTPPSTPPLGKQNPSLPAPQTLAGGNPETAQPHAGTLPRPRPVPKPRNRPSVPPPPQPPGVHSAGDSSLTNTAPTASKIVTDALPSALTGGEGFQD

SEQ ID NO: 754269 - protein, 106 aa, Homo sapiens
MSKKQCVNYLFNKMRSLCKSPTLCYLDVHSYVLGGRLRSFRLAAESFCIMYGLCLPSPLRTMPMDGDCWLCHLIKLDVTHAASLDCRNVDRNVLFFFFFLNNVIAT

SEQ ID NO: 754270 - protein, 106 aa, Homo sapiens; identical to SEQ ID NO: 754269

SEQ ID NO: 754271 - protein, 803 aa, Homo sapiens; identical to SEQ ID NO: 754253

SEQ ID NO: 754272 - protein, 853 aa, Homo sapiens; identical to SEQ ID NO: 754268

SEQ ID NO: 754273 - protein, 840 aa, Homo sapiens
MKKQFNRMKQLANQTVGRAEKTEVLSEDLLQIERRLDTVRSICHHSHKRLVACFQGQHGTDAERRHKKLPLTALAQNMQEASTQLEDSLLGKMLETCGDAENQLALELSQHEVFVEKEIVDPLYGIAEVEIPNIQKQRKQLARLVLDWDSVRARWNQAHKSSGTNFQGLPSKIDTLKEEMDEAGNKVEQCKDQLAADMYNFMAKEGEYGKFFVTLLEAQADYHRKALAVLEKTLPEMRAHQDKWAEKPAFGTPLEEHLKRSGREIALPIEACVMLLLETGMKEEGLFRIGAGASKLKKLKAALDCSTSHLDEFYSDPHAVAGALKSYLRELPEPLMTFNLYEEWTQVASVQDQDKKLQDLWRTCQKLPPQNFVNFRYLIKFLAKLAQTSDVNKMTPSNIAIVLGPNLLWARNEGTLAEMAAATSVHVVAVIEPIIQHADWFFPEEVEFNVSEAFVPLTTPSSNHSFHTGNDSDSGTLERKRPASMAVMEGDLVKKESFGVKLMDFQAHRRGGTLNRKHISPAFQPPLPPTDGSTVVPAGPEPPPQSSRAESSSGGGTVPSSAGILEQGPSPGDGSPPKPKDPVSAAVPAPGRNNSQIASGQNQPQAAAGSHQLSMGQPHNAAGPSPHTLRRAVKKPAPAPPKPGNPPPGHPGGQSSSGTSQHPPSLSPKPPTRSPSPPTQHTGQPPGQPSAPSQLSAPRRYSSSLSPIQAPNHPPPQPPTQATPLMHTKPNSQGPPNPMALPSEHGLEQPSHTPPQTPTPPSTPPLGKQNPSLPAPQTLAGGNPETAQPHAGTLPRPRPVPKPRNRPSVPPPPQPPGVHSAGDSSLTNTAPTASKIVTGK

SEQ ID NO: 754274 - protein, 587 aa, Homo sapiens
MKKQFNRMKQLANQTVGRAEKTEVLSEDLLQIERRLDTVRSICHHSHKRLVACFQGQHGTDAERRHKKLPLTALAQNMQEASTQLEDSLLGKMLETCGDAENQLALELSQHEVFVEKEIVDPLYGIAEVEIPNIQKQRKQLARLVLDWDSVRARWNQAHKSSGTNFQGLPSKIDTLKEEMDEAGNKVEQCKDQLAADMYNFMAKEGEYGKFFVTDKWAEKPAFGTPLEEHLKRSGREIALPIEACVMLLLETGMKEEGLFRIGAGASKLKKLKAALDCSTSHLDEFYSDPHAVAGALKSYLRELPEPLMTFNLYEEWTQVASVQDQDKKLQDLWRTCQKLPPQNFVNFRYLIKFLAKLAQTSDVNKMTPSNIAIVLGPNLLWARNEGTLAEMAAATSVHVVAVIEPIIQHADWFFPEEVEFNVSEAFVPLTTPSSNHSFHTGNDSDSGTLERKRPASMAVMEGDLVKKESPPKPKDPVSAAVPAPGRNNSQIASGQNQPQAAAGSHQLSMGQPHNAAGPSPHTLRRAVKKPAPAPPKPGNPPPGHPGGQSSSGTSQHPPSLSPKLLPVRLIPRTLPSPATFSSSRHE

SEQ ID NO: 754275 - protein, 128 aa, Homo sapiens
GALGVPAPPRITGGGQHLQQLGMSKKQCVNYLFNKMRSLCKSPTLCYLDVHSYVLGGRLRSFRLAAESFCIMYGLCLPSPLRTMPMDGDCWLCHLIKLDVTHAASLDCRNVDRNVLFFFFFLNNVIAT

SEQ ID NO: 754276 - protein, 226 aa, Homo sapiens
MKKQFNRMKQLANQTVGRAEKTEVLSEDLLQIERRLDTVRSICHHSHKRLVACFQGQHGTDAERRHKKLPLTALAQNMQEASTQLEDSLLGKMLETCGDAENQLALELSQHEVFVEKEIVDPLYGIAEVEIPNIQKQRKQLARLVLDWDSVRARWNQAHKSSGTNFQGLPSKIDTLKEEMDEAGNKVEQCKDQLAADMYNFMAKEGEYGKFFVTISGRKNQPLGLP

SEQ ID NO: 754277 - protein, 575 aa, Homo sapiens
MKKQFNRMKQLANQTVGRAEKTEVLSEDLLQIERRLDTVRSICHHSHKRLVACFQGQHGTDAERRHKKLPLTALAQNMQEASTQLEDSLLGKMLETCGDAENQLALELSQHEVFVEKEIVDPLYGIAEVEIPNIQKQRKQLARLVLDWDSVRARWNQAHKSSGTNFQGLPSKIDTLKEEMDEAGNKVEQCKDQLAADMYNFMAKEGEYGKFFVTLLEAQADYHRKALAVLEKTLPEMRAHQDKWAEKPAFGTPLEEHLKRSGREIALPIEACVMLLLETGMKEEGLFRIGAGASKLKKLKAALDCSTSHLDEFYSDPHAVAGALKSYLRELPEPLMTFNLYEEWTQVASVQDQDKKLQDLWRTCQKLPPQNFVNFRYLIKFLAKLAQTSDVNKMTPSNIAIVLGPNLLWARNEGTLAEMAAATSVHVVAVIEPIIQHADWFFPEEVEFNVSEAFVPLTTPSSNHSFHTGNDSDSGTLERKRPASMAVMEGDLVKKESFGVKLMDFQAHRRGGTLNRKHISPAFQPPLPPTDGSTVVPAGPEPPPQSSRAESSSGGGTVPSSAGILEQGPSPGDGR

SEQ ID NO: 754278 - protein, 226 aa, Homo sapiens; identical to SEQ ID NO: 754276

SEQ ID NO: 754279 - protein, 135 aa, Homo sapiens [sequence omitted]

SEQ ID NO: 754280 - protein, 183 aa, Homo sapiens
MFIFIKHGDNQQFLVNTNCAVVVLLYYIRSKVKLPKTNTIDLCEQTGKMKMLFLMKPNHAEYASKYLTARSTYYVCKVERGPPGTRLENAYRAFVPLLKNPEPWLLVALRIQCDALERRRIQMLKMKEAKKVVIIEPPASVPSKQSGRSDKKKSTRKSPTFRNRPDFRKNKGRQLNKTTKQKK

SEQ ID NO: 754281 - protein, 107 aa, Homo sapiens
  misc_feature (8)..(8): Xaa can be any naturally occurring amino acid
PCARMTRXFVKRSIFLSLVLRGAGAFSLFLVALRIQCDALERRRIQMLKMKEAKKVVIIEPPASVPSKQSGRSDKKKSTRKSPTFRNRPDFRKNKGRQLNKTTKQKK

SEQ ID NO: 754282 - protein, 110 aa, Homo sapiens
RVLLGVSEGTGCADAMELVLVFLCSLLAPMVLASAAEKEKEMDPFHYDYQTLRIGGLVFAVVLFSVGILLILSRRCKCSFNQKPRAPGDEEAQVENLITANATEPQKAEN

SEQ ID NO: 754283 - protein, 187 aa, Homo sapiens
MPDYSVHILSDVQFVKITRQQYQNALTACHMDSSPQSPDMEAFTDGDSTKAPTTRGTPQTPKDDPAITLLNNRNSLPCSRSDGLRSPSEVVYLRMEELAFTQEEMTDFEEHSTQQLTLSPAAVPTRAASDSECCNINLDTETSPCSSDFEENVGKKLLRTLSGQKRKRSPEGERTSEDNSNLTPLIT

SEQ ID NO: 754284 - protein, 655 aa, Homo sapiens
LAGWLYTSLPPGFGGTGEDYSEEGIHFPWLPALVCTGAVFLGAEICPYSVCSRHGLAIASHSVCLTRLLMAAAFPVCYPLGRLLDWALRQEISTFYTREKLLETLRAADPYSDLVKEELNIIQGALELRTKVVEEVLTPLGDCFMLRSDAVLDFATVSEILRSGYTRIPVYEGDQRHNIVDILFVKDLAFVDPDDCTPLLTVTRFYNRPLHCVFNDTRLDTVLEEFKKGKSHLAIVQRVNNEGEGDPFYEVMGIVTLEDIIEEIIKSEILDETDLYTDNRKKQRVPQRERKRHDFSLFKLSDTEMRVKISPQLLLATHRFMATEVEPFKSLYLSEKILLRLLKHPNVIQELKFDEKNKKAPEHYLYQRNRPVDYFVLLLQGKVEVEVGKEGLRFENGAFTYYGVPAIMTTACSDNDVRKVGSLAGSSVFLNRSPSRCSGLNRSESPNRERSDFGGSNTQLYSSSNNLYMPDYSVHILSDVQFVKITRQQYQNALTACHMDSSPQSPDMEAFTDGDSTKAPTTRGTPQTPKDDPAITLLNNRNSLPCSRSDGLRSPSEVVYLRMEELAFTQEEMTDFEEHSTQQLTLSPAAVPTRAASDSECCNINLDTETSPCSSDFEENVGKKLLRTLSGQKRKRSPEGERTSEDNSNLTPLIT

SEQ ID NO: 754285 - protein, 760 aa, Homo sapiens
MESASEGQEAHREVAGGAAVGLSPPAPAPFPLEPGDAATAAARVSGEEGAVAAAAAGAAADQVQLHSELLGRHHHAAAAAAQTPLAFSPDHVACVCEALQQGGNLDRLARFLWSLPQSDLLRGNESLLKARALVAFHQGIYPELYSILESHSFESANHPLLQQLWYKARYTEAERARGRPLGAVDKYRLRRKFPLPRTIWDGEETVYCFKEKSRNALKELYKQNRYPSPAEKRHLAKITGLSLTQVSNWFKNRRQRDRNPSETQSKSESDGNPSTEDESSKGHEDLSPHPLSSSSDGITNLSLSSHMEPVYMQQIGNAKISLSSSGVLLNGSLVPASTSPVFLNGNSFIQGPSGVILNGLNVGNTQAVALNPPKMSSNIVSNGISMTDILGSTSQDVKEFKVLQSSANSATTTSYSPSVPVSFPGLIPSTEVKREGIQTVASQDGGSVVTFTTPVQINQYGIVQIPNSGANSQFLNGSIGFSPLQLPPVSVAASQGNISVSSSTSDGSTFTSESTTVQQGKVFLSSLAPSAVVYTVPNTGQTIGSVKQEGLERSLVFSQLMPVNQNAQVNANLSSENISGSGLPPLASSLVNVSPTHNFSLSPSTLLNPTELNRDIADSQPMSAPVASKSTVTSVSNTNYATLQNCSLITGQDLLSVPMTQAALGEIVPTAEDQVGHPSPAVHQDFVQEHRLVLQSVANMKENFLSNSESKATSSLMMLDSKSKYVLDGMVDTVCEDLETDKKELAKLQTVQLDEDMQDL

SEQ ID NO: 754286 - protein, 517 aa, Homo sapiens
MEGPVLTLGLLAALAVCGSWGLNEEERLIRHLFQEKGYNKELRPVAHKEESVDVALALTLSNLISLKEVEETLTTNVWIEHGWTDNRLKWNAEEFGNISVLRLPPDMVWLPEIVLENNNDGSFQISYSCNVLVYHYGFVYWLPPAIFRSSCPISVTYFPFDWQNCSLKFSSLKYTAKEITLSLKQDAKENRTYPVEWIIIDPEGFTENGEWEIVHRPARVNVDPRAPLDSPSRQDITFYLIIRRKPLFYIINILVPCVLISFMVNLVFYLPADSGEKTSVAISVLLAQSVFLLLISKRLPATSMAIPLIGKFLLFGMVLVTMVVVICVIVLNIHFRTPSTHVLSEGVKKLFLETLPELLHMSRPAEDGPSPGALVRRSSSLGYISKAEEYFLLKSRSDLMFEKQSERHGLARRLTTARRPPASSEQAQQELFNELKPAVDGANFIVNHMRDQNNYNEEKDSWNRVARTVDRLCLFVVTPVMVVGTAWIFLQGVYNQPPPQPFPGDPYSYNVQDKRFI

SEQ ID NO: 754287 - protein, 413 aa, Homo sapiens
MEGPVLTLGLLAALAVCGSWGLNEEERLIRHLFQEKGYNKELRPVAHKEESVDVALALTLSNLISLKEVEETLTTNVWIEHGWTDNRLKWNAEEFGNISVLRLPPDMVWLPEIVLENNNDGSFQISYSCNVLVYHYGFVYWLPPAIFRSSCPISVTYFPFDGRTAPSSSGGEKTSVAISVLLAQSVFLLLISKRLPATSMAIPLIGKFLLFGMVLVTMVVVICVIVLNIHFRTPSTHVLSEGVKKLFLETLPELLHMSRPAEDGPSPGALVRRSSSLGYISKAEEYFLLKSRSDLMFEKQSERHGLARRLTTARRPPASSEQAQQELFNELKPAVDGANFIVNHMRDQNNYNEEKDSWNRVARTVDRLCLFVVTPVMVVGTAWIFLQGVYNQPPPQPFPGDPYSYNVQDKRFI

SEQ ID NO: 754288 - protein, 480 aa, Homo sapiens
MEGPVLTLGLLAALAVCGSWGLNEEERLIRHLFQEKGYNKELRPVAHKEESVDVALALTLSNLISLKEVEETLTTNVWIEHGWTDNRLKWNAEEFGNISVLRLPPDMVWLPEIVLENNNDGSFQISYSCNVLVYHYGFVYWLPPAIFRSSCPISVTYFPFDGRTAPSSSENGEWEIVHRPARVNVDPRAPLDSPSRQDITFYLIIRRKPLFYIINILVPCVLISFMVNLVFYLPADSGEKTSVAISVLLAQSVFLLLISKRLPATSMAIPLIGKFLLFGMVLVTMVVVICVIVLNIHFRTPSTHVLSEGVKKLFLETLPELLHMSRPAEDGPSPGALVRRSSSLGYISKAEEYFLLKSRSDLMFEKQSERHGLARRLTTARRPPASSEQAQQELFNELKPAVDGANFIVNHMRDQNNYNEEKDSWNRVARTVDRLCLFVVTPVMVVGTAWIFLQGVYNQPPPQPFPGDPYSYNVQDKRFI

SEQ ID NO: 754289 - protein, 106 aa, Homo sapiens
LGLLLLLGGKPLCTLLLASGGAACRACFLPCEQQVRASWSQGRLWGFPVKGPVSPSLASSEALESPGETAHCPSTQRSRASSKWTGLSYFLSNTKMQYAHYKRPKQ

SEQ ID NO: 754290 - protein, 55 aa, Homo sapiens
RRTSQEEAEKLWKLLFLMKSQGWLPQEGSVRRILCADPCCQICNVMALEIKQLLA

SEQ ID NO: 754291 - protein, 1035 aa, Homo sapiens
MSTENVEGKPSNLGERGRARSSTFLRVVQPMFNHSIFTSAVSPAAERIRFILGEEDDSPAPPQLFTELDELLAVDGQEMEWKETARWIKFEEKVEQGGERWSKPHVATLSLHSLFELRTCMEKGSIMLDREASSLPQLVEMIVDHQIETGLLKPELKDKVTYTLLRKHRHQTKKSNLRSLADIGKTVSSASRMFTNPDNGSPAMTHRNLTSSSLNDISDKPEKDQLKNKFMKKLPRDAEASNVLVGEVDFLDTPFIAFVRLQQAVMLGALTEVPVPTRFLFILLGPKGKAKSYHEIGRAIATLMSDEVFHDIAYKAKDRHDLIAGIDEFLDEVIVLPPGEWDPAIRIEPPKSLPSSDKRKNMYSGGENVQMNGDTPHDGGHGGGGHGDCEELQRTGRFCGGLIKDIKRKAPFFASDFYDALNIQALSAILFIYLATVTNAITFGGLLGDATDNMQGVLESFLGTAVSGAIFCLFAGQPLTILSSTGPVLVFERLLFNFSKDNNFDYLEFRLWIGLWSAFLCLILVATDASFLVQYFTRFTEEGFSSLISFIFIYDAFKKMIKLADYYPINSNFKVGYNTLFSCTCVPPDPANISISNDTTLAPEYLPTMSSTDMYHNTTFDWAFLSKKECSKYGGNLVGNNCNFVPDITLMSFILFLGTYTSSMALKKFKTSPYFPTTARKLISDFAIILSILIFCVIDALVGVDTPKLIVPSEFKPTSPNRGWFVPPFGENPWWVCLAAAIPALLVTILIFMDQQITAVIVNRKEHKLKKGAGYHLDLFWVAILMVICSLMALPWYVAATVISIAHIDSLKMETETSAPGEQPKFLGVREQRVTGTLVFILTGLSVFMAPILKFIPMPVLYGVFLYMGVASLNGVQFMDRLKLLLMPLKHQPDFIYLRHVPLRRVHLFTFLQVLCLALLWILKSTVAAIIFPVMILALVAVRKGMDYLFSQHDLSFLDDVIPEKDKKKKEDEKKKKKKKGSLDSDNDDSDCPYSEKVPSIKIPMDIMEQQPFLSDSKPSDRERSPTFLERHTSC

SEQ ID NO: 754292 - protein, 132 aa, Homo sapiens
AAAAAVAAKAAAAAAVAVAAAAPHSAAKLEERRKPDPRRMEDEAVLDRGASFLKHVCDEEEVEGHHTIYIGVHVPKSYRRRRRHKRKTGHKEKKEKERISENYSDKSDIENADESSSSILKPLSEYSLSVGA

SEQ ID NO: 754293 - protein, 1118 aa, Homo sapiens
AAAAAVAAKAAAAAAVAVAAAAPHSAAKLEERRKPDPRRMEDEAVLDRGASFLKHVCDEEEVEGHHTIYIGVHVPKSYRRRRRHKRKTGHKEKKEKERISENYSDKSDIENADESSSSILKPLISPAAERIRFILGEEDDSPAPPQLFTELDELLAVDGQEMEWKETARWIKFEEKVEQGGERWSKPHVATLSLHSLFELRTCMEKGSIMLDREASSLPQLVEMIVDHQIETGLLKPELKDKVTYTLLRKHRHQTKKSNLRSLADIGKTVSSASRMFTNPDNGSPAMTHRNLTSSSLNDISDKPEKDQLKNKFMKKLPRDAEASNVLVGEVDFLDTPFIAFVRLQQAVMLGALTEVPVPTRFLFILLGPKGKAKSYHEIGRAIATLMSDEVFHDIAYKAKDRHDLIAGIDEFLDEVIVLPPGEWDPAIRIEPPKSLPSSDKRKNMYSGGENVQMNGDTPHDGGHGGGGHGDCEELQRTGRFCGGLIKDIKRKAPFFASDFYDALNIQALSAILFIYLATVTNAITFGGLLGDATDNMQGVLESFLGTAVSGAIFCLFAGQPLTILSSTGPVLVFERLLFNFSKDNNFDYLEFRLWIGLWSAFLCLILVATDASFLVQYFTRFTEEGFSSLISFIFIYDAFKKMIKLADYYPINSNFKVGYNTLFSCTCVPPDPANISISNDTTLAPEYLPTMSSTDMYHNTTFDWAFLSKKECSKYGGNLVGNNCNFVPDITLMSFILFLGTYTSSMALKKFKTSPYFPTTARKLISDFAIILSILIFCVIDALVGVDTPKLIVPSEFKPTSPNRGWFVPPFGENPWWVCLAAAIPALLVTILIFMDQQITAVIVNRKEHKLKKGAGYHLDLFWVAILMVICSLMALPWYVAATVISIAHIDSLKMETETSAPGEQPKFLGVREQRVTGTLVFILTGLSVFMAPILKFIPMPVLYGVFLYMGVASLNGVQFMDRLKLLLMPLKHQPDFIYLRHVPLRRVHLFTFLQVLCLALLWILKSTVAAIIFPVMILALVAVRKGMDYLFSQHDLSFLDDVIPEKDKKKKEDEKKKKKKKGSLDSDNDDSDCPYSEKVPSIKIPMDIMEQQPFLSDSKPSDRERSPTFLERHTSC

SEQ ID NO: 754294 - protein, 1118 aa, Homo sapiens; identical to SEQ ID NO: 754293

SEQ ID NO: 754295 - protein, 218 aa, Homo sapiens
MTVAATYHGRAMREQRVTGTLVFILTGLSVFMAPILKFIPMPVLYGVFLYMGVASLNGVQFMDRLKLLLMPLKHQPDFIYLRHVPLRRVHLFTFLQVLCLALLWILKSTVAAIIFPVMILALVAVRKGMDYLFSQHDLSFLDDVIPEKDKKKKEDEKKKKKKKGSLDSDNDDSDCPYSEKVPSIKIPMDIMEQQPFLSDSKPSDRERSPTFLERHTSC

SEQ ID NO: 754296 - protein, 1118 aa, Homo sapiens; identical to SEQ ID NO: 754293

SEQ ID NO: 754297 - protein, 66 aa, Homo sapiens
GGGRGGSEGGGGGGSGSGRCSPTLRRQTGGATEARPQEGLEEEFGWSASPSLLSPLRATGRLYEDC

SEQ ID NO: 754298 - protein, 1093 aa, Homo sapiens
EKSEHSFFLFYYYRMEDEAVLDRGASFLKHVCDEEEVEGHHTIYIGVHVPKSYRRRRRHKRKTGHKEKKEKERISENYSDKSDIENADESSSSILKPLISPAAERIRFILGEEDDSPAPPQLFTELDELLAVDGQEMEWKETARWIKFEEKVEQGGERWSKPHVATLSLHSLFELRTCMEKGSIMLDREASSLPQLVEMIVDHQIETGLLKPELKDKVTYTLLRKHRHQTKKSNLRSLADIGKTVSSASRMFTNPDNGSPAMTHRNLTSSSLNDISDKPEKDQLKNKFMKKLPRDAEASNVLVGEVDFLDTPFIAFVRLQQAVMLGALTEVPVPTRFLFILLGPKGKAKSYHEIGRAIATLMSDEVFHDIAYKAKDRHDLIAGIDEFLDEVIVLPPGEWDPAIRIEPPKSLPSSDKRKNMYSGGENVQMNGDTPHDGGHGGGGHGDCEELQRTGRFCGGLIKDIKRKAPFFASDFYDALNIQALSAILFIYLATVTNAITFGGLLGDATDNMQGVLESFLGTAVSGAIFCLFAGQPLTILSSTGPVLVFERLLFNFSKDNNFDYLEFRLWIGLWSAFLCLILVATDASFLVQYFTRFTEEGFSSLISFIFIYDAFKKMIKLADYYPINSNFKVGYNTLFSCTCVPPDPANISISNDTTLAPEYLPTMSSTDMYHNTTFDWAFLSKKECSKYGGNLVGNNCNFVPDITLMSFILFLGTYTSSMALKKFKTSPYFPTTARKLISDFAIILSILIFCVIDALVGVDTPKLIVPSEFKPTSPNRGWFVPPFGENPWWVCLAAAIPALLVTILIFMDQQITAVIVNRKEHKLKKGAGYHLDLFWVAILMVICSLMALPWYVAATVISIAHIDSLKMETETSAPGEQPKFLGVREQRVTGTLVFILTGLSVFMAPILKFIPMPVLYGVFLYMGVASLNGVQFMDRLKLLLMPLKHQPDFIYLRHVPLRRVHLFTFLQVLCLALLWILKSTVAAIIFPVMILALVAVRKGMDYLFSQHDLSFLDDVIPEKDKKKKEDEKKKKKKKGSLDSDNDDSDCPYSEKVPSIKIPMDIMEQQPFLSDSKPSDRERSPTFLERHTSC

SEQ ID NO: 754299 - protein, 1034 aa, Homo sapiens
AAAAAVAAKAAAAAAVAVAAAAPHSAAKLEERRKPDPRRMEDEAVLDRGASFLKHVCDEEEVEGHHTIYIGVHVPKSYRRRRRHKRKTGHKEKKEKERISENYSDKSDIENADESSSSILKPLISPAAERIRFILGEEDDSPAPPQLFTELDELLAVDGQEMEWKETARWIKFEEKVEQGGERWSKPHVATLSLHSLFELRTCMEKGSIMLDREASSLPQLVEMIVDHQIETGLLKPELKDKVTYTLLRKHRHQTKKSNLRSLADIGKTVSSASRMFTNPDNGSPAMTHRNLTSSSLNDISDKPEKDQLKNKFMKKLPRDAEASNVLVGEVDFLDTPFIAFVRLQQAVMLGALTEVPVPTRFLFILLGPKGKAKSYHEIGRAIATLMSDEVFHDIAYKAKDRHDLIAGIDEFLDEVIVLPPGEWDPAIRIEPPKSLPSSDKRKNMYSGGENVQMNGDTPHDGGHGGGGHGDCEELQRTGRFCGGLIKDIKRKAPFFASDFYDALNIQALSAILFIYLATVTNAITFGGLLGDATDNMQGVLESFLGTAVSGAIFCLFAGQPLTILSSTGPVLVFERLLFNFSKDNNFDYLEFRLWIGLWSAFLCLILVATDASFLVQYFTRFTEEGFSSLISFIFIYDAFKKMIKLADYYPINSNFKVGYNTLFSCTCVPPDPANISISNDTTLAPEYLPTMSSTDMYHNTTFDWAFLSKKECSKYGGNLVGNNCNFVPDITLMSFILFLGTYTSSMALKKFKTSPYFPTTARKLISDFAIILSILIFCVIDALVGVDTPKLIVPSEFKPTSPNRGWFVPPFGENPWWVCLAAAIPALLVTILIFMDQQITAVIVNRKEHKLKFIPMPVLYGVFLYMGVASLNGVQFMDRLKLLLMPLKHQPDFIYLRHVPLRRVHLFTFLQVLCLALLWILKSTVAAIIFPVMILALVAVRKGMDYLFSQHDLSFLDDVIPEKDKKKKEDEKKKKKKKGSLDSDNDDSDCPYSEKVPSIKIPMDIMEQQPFLSDSKPSDRERSPTFLERHTSC

SEQ ID NO: 754300 - protein, 929 aa, Homo sapiens
MASVWQRLGFYASLLKRQLNGGPDVIKWERRVIPGCTRSIYSATGKWTKEYTLQTRKDVEKWWHQRIKEQASKISEADKSKPKFYVLSMFPYPSGKLHMGHVRVYTISDTIARFQKMRGMQVINPMGWDAFGLPAENAAVERNLHPQSWTQSNIKHMRKQLDRLGLCFSWDREITTCLPDYYKWTQYLFIKLYEAGLAYQKEALVNWDPVDQTVLANEQVDEHGCSWRSGAKVEQKYLRQWFIKTTAYAKAMQDALADLPEWYGIKGMQAHWIGDCVGCHLDFTLKVHGQATGEKLTAYTATPEAIYGTSHVAISPSHRLLHGHSSLKEALRMALVPGKDCLTPVMAVNMLTQQEVPVVILAKADLEGSLDSKIGIPSTSSEDTILAQTLGLAYSEVIETLPDGTERLSSSAEFTGMTRQDAFLALTQKARGKRVGGDVTSDKLKDWLISRQRYWGTPIPIVHCPVCGPTPVPLEDLPVTLPNIASFTGKGGPPLAMASEWVNCSCPRCKGAAKRETDTMDTFVDSAWYYFRYTDPHNPHSPFNTAVADYWMPVDLYIGGKEHAVMHLFYARFFSHFCHDQKMVKHREPFHKLLAQGLIKGQTFRLPSGQYLQREEVDLTGSVPVHAKTKEKLEVTWEKMSKSKHNGVDPEEVVEQYGIDTIRLYILFAAPPEKDILWDVKTDALPGVLRWQQRLWTLTTRFIEARASGKSPQPQLLSNKEKAEARKLWEYKNSVISQVTTHFTEDFSLNSAISQLMGLSNALSQASQSVILHSPEFEDALCALMVMAAPLAPHVTSEIWAGLALVPRKLCAHYTWDASVLLQAWPAVDPEFLQQPEVVQMAVLINNKACGKIPVPQQVARDQDKVHEFVLQSELGVRLLQGRSIKKSFLSPRPSDPMGSHQRHCWWEQEGAVPLEQPGSLRIWEMALP

SEQ ID NO: 754301 - protein, 89 aa, Homo sapiens
TDNPDNPNHTTANKYVEAGGYRGDVCWPRGREKTNVLTVDLGPVADCSQQCASVVWPGAGVKVSWAKEKYELLRRGLDILPLTPHPHCR

SEQ ID NO: 754302 - protein, 830 aa, Homo sapiens
  misc_feature (828)..(828): Xaa can be any naturally occurring amino acid
MASVWQRLGFYASLLKRQLNGGPDVIKWERRVIPGCTRSIYSATGKWTKEYTLQTRKDVEKWWHQRIKEQASKISEADKSKPKFYVLSMFPYPSGKLHMGHVRVYTISDTIARFQKMRGMQVINPMGWDAFGLPAENAAVERNLHPQSWTQSNIKHMRKQLDRLGLCFSWDREITTCLPDYYKWTQYLFIKLYEAGLAYQKEALVNWDPVDQTVLANEQVDEHGCSWRSGAKVEQKYLRQWFIKTTAYAKAMQDALADLPEWYGIKGMQAHWIGDCVGCHLDFTLKVHGQATGEKLTAYTATPEAIYGTSHVAISPSHRLLHGHSSLKEALRMALVPGKDCLTPVMAVNMLTQQEVPVVILAKADLEGSLDSKIGIPSTSSEDTILAQTLGLAYSEVIETLPDGTERLSSSAEFTGMTRQDAFLALTQKARGKRVGGDVTSDKLKDWLISRQRYWGTPIPIVHCPVCGPTPVPLEDLPVTLPNIASFTGKGGPPLAMASEWVNCSCPRCKGAAKRETDTMDTFVDSAWYYFRYTDPHNPHSPFNTAVADYWMPVDLYIGGKEHAVMHLFYARFFSHFCHDQKMVKHREPFHKLLAQGLIKGQTFRLPSGQYLQREEVDLTGSVPVHAKTKEKLEVTWEKMSKSKHNGVDPEEVVEQYGIDTIRLYILFAAPPEKDILWDVKTDALPGVLRWQQRLWTLTTRFIEARASGKSPQPQLLSNKEKAEARKLWEYKNSVISQVTTHFTEDFSLNSAISQLMGLSNALSQASQSVILHSPEFEDALCALMVMAAPLAPHVTSEIWAGILYNCHTEVLEIFRCNWVTGQATQDXAY

SEQ ID NO: 754303 - protein, 903 aa, Homo sapiens
MASVWQRLGFYASLLKRQLNGGPDVIKWERRVIPGCTRSIYSATGKWTKEYTLQTRKDVEKWWHQRIKEQASKISEADKSKPKFYVLSMFPYPSGKLHMGHVRVYTISDTIARFQKMRGMQVINPMGWDAFGLPAENAAVERNLHPQSWTQSNIKHMRKQLDRLGLCFSWDREITTCLPDYYKWTQYLFIKLYEAGLAYQKEALVNWDPVDQTVLANEQVDEHGCSWRSGAKVEQKYLRQWFIKTTAYAKAMQDALADLPEWYGIKGMQAHWIGDCVGCHLDFTLKVHGQATGEKLTAYTATPEAIYGTSHVAISPSHRLLHGHSSLKEALRMALVPGKDCLTPVMAVNMLTQQEVPVVILAKADLEGSLDSKIGIPSTSSEDTILAQTLGLAYSEVIETLPDGTERLSSSAEFTGMTRQDAFLALTQKARGKRVGGDVTSDKLKDWLISRQRYWGTPIPIVHCPVCGPTPVPLEDLPVTLPNIASFTGKGGPPLAMASEWVNCSCPRCKGAAKRETDTMDTFVDSAWYYFRYTDPHNPHSPFNTAVADYWMPVDLYIGGKEHAVMHLFYARFFSHFCHDQKMVKHREPFHKLLAQGLIKGQTFRLPSGQYLQREEVDLTGSVPVHAKTKEKLEVTWEKMSKSKHNGVDPEEVVEQYGIDTIRLYILFAAPPEKDILWDVKTDALPGVLRWQQRLWTLTTRFIEARASGKSPQPQLLSNKEKAEARKLWEYKNSVISQVTTHFTEDFSLNSAISQLMGLSNALSQASQSVILHSPEFEDALCALMVMAAPLAPHVTSEIWAGLALVPRKLCAHYTWDASVLLQAWPAVDPEFLQQPEVVQMAVLINNKACGKIPVPQQVARDQDKVHEFVLQSELGVRLLQGRSIKKSFLSPRTALINFLVQD

SEQ ID NO: 754304 - protein, 903 aa, Homo sapiens; identical to SEQ ID NO: 754303

SEQ ID NO: 754305 - protein, 903 aa, Homo sapiens; identical to SEQ ID NO: 754303

SEQ ID NO: 754306 - protein, 94 aa, Homo sapiens
IEKEGNHSRSCCEGCCCRQETLASWDSKEHSESPQSLWQRRTHNFLHPCRVAKKAPMASFAGSLETGSHCFSPHTHLLIISGIKQHWLLGLGLM

SEQ ID NO: 754307 - protein, 107 aa, Homo sapiens
REDSYHVRSRSSYDDRSSDRRVYDRRYCGSYRRNDYSRDRGDAYYDTDYRHSYEYQRENSSYRSQRSSRRKHRRRRRRSRTFSRSSSVSASPGPSSPHSSAGPLGLW

SEQ ID NO: 754308 - protein, 104 aa, Homo sapiens
RGLIGSQFCRLYRKHGTGISPASGEASGSFYPWQKTNRKQASHRRKQAQEHLWGRGHTFKHPDPMRTYSVSPGQNQAMRDLPHDPNTPHQAPPPILGITIQHEI

SEQ ID NO: 754309 - protein, 89 aa, Homo sapiens
AQETYNSQENTIREKARSPHQHFAFKTVGLMEGQWTEPSQTSRACWIVNISCTQVSAKVRGQEVLQGRAQVKQRLHIVGDGHSTTKLKT

SEQ ID NO: 754310 - protein, 149 aa, Homo sapiens
MLEEIRGVGTPKKLWEQHTAVEEYEQEFIAKWRSLDLDVLLVPVLGSAFYIGSSSLASESQSYVTLYNLLDFPAGVVPVTIVTLQDEEELAFYKGCYGDSSDKNFSEAVRGSVGVLVTVQCIALPWEEELCLRFMKEVDTLVKNQRGPK

SEQ ID NO: 754311 - protein, 78 aa, Homo sapiens
WALLAERGSILGMGTDTGDSICIPASFCGVYGLWTTGSRLSYTGIASAIKGKKIGDHGGWPHGPGRGEPGAVPASPAE

SEQ ID NO: 754312 - protein, 140 aa, Homo sapiens
MLEEIRGVGTPKKLWEQHTAVEEYEQEFIAKWRSLDLDVLLVPVLGSAFYIGSSSLASESQSYVTLYNLLDFPAGVVPVTIVTLQDEEELAFYKGCYGDSSDKNFSEPPYKEVQAILLEATCKRTEASQLTASTNCRACE

SEQ ID NO: 754313 - protein, 168 aa, Homo sapiens
CSFPRVIHLQDECSSLFLPVPWSLPVSPLLAQHLPPASLFPYAFTKPCLPPCSPEPLLSFPLVPPGWDSAETLLLAGRPVPVPFPAALSDCVCAVSGAAWPILPASGGWWPQVLLPLSLCSIHFPFPWALFIHLVTHGLQFSSQSEDPLWPHQCVLPTLVSQTPGIKN

SEQ ID NO: 754314 - protein, 1016 aa, Homo sapiens
KQHQNTTYFMADIISDMSVALKSWFHDMKQHQNTTYFLAQHLNKDSLLARKDLPFRIQSCAAQAVLTAPYSLGRPDPNPSLQPIATGQSPGPPGARRKLPQSEGQVQGERTYSLAVHPALSPQLSEQKNLSLLSPVPEDKGPGHTRAGLEMSLRAATSSLSEEQVSELRDNLPKEVRLSPKLILDPKSSVTPAIISAALQQVVHNKSLVTAGGALGNPPSRGERRLEASMGRPEVSMMSSSASKNLKFKISPSAPETSWNSQHQLGAEVSSSPRAPTGSRADSLHLSQQEDSLPVQNFPPKSYLLRTSRESVGKQATGEVAGKGGPVGGKPTLQKQGTISSQGEKAQLESTPKRSKLEETSLVPRATYPMALQSPSCQSRSHSPSCQPHGHSPSSQSRGQSPSCQPRGQSPLRSQAASRQVSTMPSRKLETTLNGAHSTSEGPAKPKSSRGPFRLRNLFSATFPTRQKKETDERQAQLQKVKQYELEFLEELLKPPSQGELPGTEYLQPPAPGRCSCQLRSSPVQQGPGMSREQRRSCDCKRICRGGRPQATQTPVPSLRGRERDRVLPSQRQPEAGPGVSLSSPINVQRIRSTSLESRECRSDPESGVSCLTTCASGGECLGAPNYRKLMRRYSISELDQGDRASLTSDVYPHPPLGMLPREAKEVEASLPIALGPKSRSLESPTLGDPSYVQVAPETKGPRQMAVFSLPEEVYRKPAELDEDSESSKCCSIRYCFYYRKCDMADDASDGKDELSYSIPMKILPGMKLDEQVVPVVSRTLQVLDAATCSSSSPEASRTQEIDLRVSTFEGSLAKINALRAHAYGLPDGFLAARLDTNELLTVLRQCVASPEARAPKPYVSQISEYKLELALKFKELRASCRRVANVDKSPTHMLAAITGSFQVLSSLIETFVRLVFIVRSEAQRQELLAKVEEVVRNYTFLLRAAEESTARNLNQQQQQQQQQQQQQQQQQQQQQQQQQQQVAAAAGAATEHPPGSPTSATVMSTFTHSLKTLIK

SEQ ID NO: 754315 - protein, 1016 aa, Homo sapiens; identical to SEQ ID NO: 754314

SEQ ID NO: 754316 - protein, 1016 aa, Homo sapiens; identical to SEQ ID NO: 754314

SEQ ID NO: 754317 - protein, 140 aa, Homo sapiens
VLETYLEPPPSDTMVNSCCGSVCSDQGCDQGLCQETCCRPSCCQTTCCCPSCVVSSCCRPSCSQTTCCQTTCCRPSCCRPVCCQTTCRPSCGVSSCCRPLCCQTTCRPSCGVSSCCRPLCCQTTCCRTTCCRPSCCGSSC

SEQ ID NO: 754318 - protein, 102 aa, Homo sapiens
MSFRFGQHLIKPSVVFLKTELSFALVNRKPVVPGHVLVCPLRPVERFHDLRPDEVADLFQTTQRVGTVVEKHFHGTSLTFSMQDGPEAGQTVKVSAYYVHTN

SEQ ID NO: 754319 - protein, 147 aa, Homo sapiens
MSFRFGQHLIKPSVVFLKTELSFALVNRKPVVPGHVLVCPLRPVERFHDLRPDEVADLFQTTQRVGTVVEKHFHGTSLTFSMQDGPEAGQTVKHVHVHVLPRKAGDFHRNDSIYEELQKHDKEDFPASWRSEEEMAAEAAALRVYFQ

SEQ ID NO: 754320 - protein, 147 aa, Homo sapiens; identical to SEQ ID NO: 754319

SEQ ID NO: 754321 - protein, 35 aa, Homo sapiens
KLRCTLFPTIPSGWAEVESPRFPSEGWEPITRSSN

SEQ ID NO: 754322 - protein, 45 aa, Homo sapiens
MNRCLVMISPRASAKECSPGYTFITACETESSRTSDLQNCKLIRG

SEQ ID NO: 754323 - protein, 443 aa, Homo sapiens
MDPLNLSWYDDDLERQNWSRPFNGSDGKADRPHYNYYATLLTLLIAVIVFGNVLVCMAVSREKALQTTTNYLIVSLAVADLLVATLVMPWVVYLEVVGEWKFSRIHCDIFVTLDVMMCTASILNLCAISIDRYTAVAMPMLYNTRYSSKRRVTVMISIVWVLSFTISCPLLFGLNNADQNECIIANPAFVVYSSIVSFYVPFIVTLLVYIKIYIVLRRRRKRVNTKRSSRAFRAHLRAPLKGNCTHPEDMKLCTVIMKSNGSFPVNRRRVEAARRAQELEMEMLSSTSPPERTRYSPIPPSHHQLTLPDPSHHGLHSTPDSPAKPEKNGHAKDHPKIAKIFEIQTMPNGKTRTSLKTMSRRKLSQQKEKKATQMLAIVLGVFIICWLPFFITHILNIHCDCNIPPVLYSAFTWLGYVNSAVNPIIYTTFNIEFRKAFLKILHC

SEQ ID NO: 754324 - protein, 414 aa, Homo sapiens
MDPLNLSWYDDDLERQNWSRPFNGSDGKADRPHYNYYATLLTLLIAVIVFGNVLVCMAVSREKALQTTTNYLIVSLAVADLLVATLVMPWVVYLEVVGEWKFSRIHCDIFVTLDVMMCTASILNLCAISIDRYTAVAMPMLYNTRYSSKRRVTVMISIVWVLSFTISCPLLFGLNNADQNECIIANPAFVVYSSIVSFYVPFIVTLLVYIKIYIVLRRRRKRVNTKRSSRAFRAHLRAPLKEAARRAQELEMEMLSSTSPPERTRYSPIPPSHHQLTLPDPSHHGLHSTPDSPAKPEKNGHAKDHPKIAKIFEIQTMPNGKTRTSLKTMSRRKLSQQKEKKATQMLAIVLGVFIICWLPFFITHILNIHCDCNIPPVLYSAFTWLGYVNSAVNPIIYTTFNIEFRKAFLKILHC

SEQ ID NO: 754325 - protein, 480 aa, Homo sapiens
MPGVGFFLETSARGPLTDTLCPFFLARAWPPSGSTALMDPLNLSWYDDDLERQNWSRPFNGSDGKADRPHYNYYATLLTLLIAVIVFGNVLVCMAVSREKALQTTTNYLIVSLAVADLLVATLVMPWVVYLEVVGEWKFSRIHCDIFVTLDVMMCTASILNLCAISIDRYTAVAMPMLYNTRYSSKRRVTVMISIVWVLSFTISCPLLFGLNNADQNECIIANPAFVVYSSIVSFYVPFIVTLLVYIKIYIVLRRRRKRVNTKRSSRAFRAHLRAPLKGNCTHPEDMKLCTVIMKSNGSFPVNRRRVEAARRAQELEMEMLSSTSPPERTRYSPIPPSHHQLTLPDPSHHGLHSTPDSPAKPEKNGHAKDHPKIAKIFEIQTMPNGKTRTSLKTMSRRKLSQQKEKKATQMLAIVLGVFIICWLPFFITHILNIHCDCNIPPVLYSAFTWLGYVNSAVNPIIYTTFNIEFRKAFLKILHC

SEQ ID NO: 754326 - protein, 502 aa, Homo sapiens
MLTACQNSVPTHPAPCLSVLLHGPLTPQSSACLLCCPPNPCVFVRSYARAWPPSGSTALMDPLNLSWYDDDLERQNWSRPFNGSDGKADRPHYNYYATLLTLLIAVIVFGNVLVCMAVSREKALQTTTNYLIVSLAVADLLVATLVMPWVVYLEVVGEWKFSRIHCDIFVTLDVMMCTASILNLCAISIDRYTAVAMPMLYNTRYSSKRRVTVMISIVWVLSFTISCPLLFGLNNADQNECIIANPAFVVYSSIVSFYVPFIVTLLVYIKIYIVLRRRRKRVNTKRSSRAFRAHLRAPLKGNCTHPEDMKLCTVIMKSNGSFPVNRRRVEAARRAQELEMEMLSSTSPPERTRYSPIPPSHHQLTLPDPSHHGLHSTPDSPAKPEKNGHAKDHPKIAKIFEIQTMPNGKTRTSLKTMSRRKLSQQKEKKATQMLAIVLGVFIICWLPFFITHILNIHCDCNIPPVLYSAFTWLGYVNSAVNPIIYTTFNIEFRKAFLKILHC

SEQ ID NO: 754327 - protein, 279 aa, Homo sapiens
MDPLNLSWYDDDLERQNWSRPFNGSDGKADRPHYNYYATLLTLLIAVIVFGNVLVCMAVSREKALQTTTNYLIVSLAVADLLVATLVMPWVVYLEVVGEWKFSRIHCDIFVTLDVMMCTASILNLCAISIDRYTAVAMPMLYNTRYSSKRRVTVMISIVWVLSFTISCPLLFGLNNADQNECIIANPAFVVYSSIVSFYVPFIVTLLVYIKIYIVLRRRRKRVNTKRSSRAFRAHLRAPLKVSRHPPTNSKGPHLTITKRAHLMLRWGLGKPQQGLGLG

SEQ ID NO: 754328 - protein, 105 aa, Homo sapiens
GSRPGPPLSSAGPWLPEGRPRVDAAGAGSLKQPAPSLPRGALWLEGKHRPDGAAGDSVSRGEEEGPPRGARPGPEVCAATPGRLLGSARLGSGSAWAPRRAGAEG

SEQ ID NO: 754329 - protein, 443 aa, Homo sapiens; identical to SEQ ID NO: 754323

SEQ ID NO: 754330 - protein, 443 aa, Homo sapiens; identical to SEQ ID NO: 754323

SEQ ID NO: 754331 - protein, 272 aa, Homo sapiens
MLTACQNSVPTHPAPCLSVLLHGPLTPQSSACLLCCPPNPCVFVRSYARAWPPSGSTALMDPLNLSWYDDDLERQNWSRPFNGSDGKADRPHYNYYATLLTLLIAVIVFGNVLVCMAVSREKALQTTTNYLIVSLAVADLLVATLVMPWVVYLEVVGEWKFSRIHCDIFVTLDVMMCTASILNLCAISIDRPERVHHCQPGLRGLLLHRLLLRALHCHPAGLHQDLHCPPQTPQASQHQTQQPSFQGPPEGSTKGQLYSPRGHETLHRYHEV

SEQ ID NO: 754332 - protein, 111 aa, Homo sapiens
MPGSPNLFPPWKLLLSTSLPLTHWNPTNGTSQAAKDHHPGKTLPENPAGFTSTATADSRALLQAYIDGHSVVIFSRSTCTRCTEVKKLFKSLCVPYFVLELDQTGKFLFNM

SEQ ID NO: 754333 - protein, 549 aa, Homo sapiens
MSCEDGRALEGTLSELAAETDLPVVFVKQRKIGGHGPTLKAYQEGRLQKLLKMNGPEDLPKSYDYDLIIIGGGSGGLAAAKEAAQYGKKVMVLDFVTPTPLGTRWGLGGTCVNVGCIPKKLMHQAALLGQALQDSRNYGWKVEETVKHDWDRMIEAVQNHIGSLNWGYRVALREKKVVYENAYGQFIGPHRIKATNNKGKEKIYSAERFLIATGERPRYLGIPGDKEYCISSDDLFSLPYCPGKTLVVGASYVALECAGFLAGIGLDVTVMVRSILLRGFDQDMANKIGEHMEEHGIKFIRQFVPIKVEQIEAGTPGRLRVVAQSTNSEEIIEGEYNTVMLAIGRDACTRKIGLETVGVKINEKTGKIPVTDEEQTNVPYIYAIGDILEDKVELTPVAIQAGRLLAQRLYAGSTVKCDYENVPTTVFTPLEYGACGLSEEKAVEKFGEENIEVYHSYFWPLEWTIPSRDNNKCYAKIICNTKDNERVVGFHVLGPNAGEVTQGFAAALKCGLTKKQLDSTIGIHPVCAEVFTTLSVTKRSGASILQAGC

SEQ ID NO: 754334 - protein, 497 aa, Homo sapiens
MNGPEDLPKSYDYDLIIIGGGSGGLAAAKEAAQYGKKVMVLDFVTPTPLGTRWGLGGTCVNVGCIPKKLMHQAALLGQALQDSRNYGWKVEETVKHDWDRMIEAVQNHIGSLNWGYRVALREKKVVYENAYGQFIGPHRIKATNNKGKEKIYSAERFLIATGERPRYLGIPGDKEYCISSDDLFSLPYCPGKTLVVGASYVALECAGFLAGIGLDVTVMVRSILLRGFDQDMANKIGEHMEEHGIKFIRQFVPIKVEQIEAGTPGRLRVVAQSTNSEEIIEGEYNTVMLAIGRDACTRKIGLETVGVKINEKTGKIPVTDEEQTNVPYIYAIGDILEDKVELTPVAIQAGRLLAQRLYAGSTVKCDYENVPTTVFTPLEYGACGLSEEKAVEKFGEENIEVYHSYFWPLEWTIPSRDNNKCYAKIICNTKDNERVVGFHVLGPNAGEVTQGFAAALKCGLTKKQLDSTIGIHPVCAEVFTTLSVTKRSGASILQAGC

SEQ ID NO: 754335 - protein, 657 aa, Homo sapiens
SVSSHRALCDMGCAEGKAVAAAAPTELQTKGKNGDGRRRSAKDHHPGKTLPENPAGFTSTATADSRALLQAYIDGHSVVIFSRSTCTRCTEVKKLFKSLCVPYFVLELDQTEDGRALEGTLSELAAETDLPVVFVKQRKIGGHGPTLKAYQEGRLQKLLKMNGPEDLPKSYDYDLIIIGGGSGGLAAAKEAAQYGKKVMVLDFVTPTPLGTRWGLGGTCVNVGCIPKKLMHQAALLGQALQDSRNYGWKVEETVKHDWDRMIEAVQNHIGSLNWGYRVALREKKVVYENAYGQFIGPHRIKATNNKGKEKIYSAERFLIATGERPRYLGIPGDKEYCISSDDLFSLPYCPGKTLVVGASYVALECAGFLAGIGLDVTVMVRSILLRGFDQDMANKIGEHMEEHGIKFIRQFVPIKVEQIEAGTPGRLRVVAQSTNSEEIIEGEYNTVMLAIGRDACTRKIGLETVGVKINEKTGKIPVTDEEQTNVPYIYAIGDILEDKVELTPVAIQAGRLLAQRLYAGSTVKCDYENVPTTVFTPLEYGACGLSEEKAVEKFGEENIEVYHSYFWPLEWTIPSRDNNKCYAKIICNTKDNERVVGFHVLGPNAGEVTQGFAAALKCGLTKKQLDSTIGIHPVCAEVFTTLSVTKRSGASILQAGC

SEQ ID NO: 754336 - protein, 585 aa, Homo sapiens
NRGHAVPAGPGRKPRPRRSSRLLAGEKHLTRSALLLCHTEDGRALEGTLSELAAETDLPVVFVKQRKIGGHGPTLKAYQEGRLQKLLKMNGPEDLPKSYDYDLIIIGGGSGGLAAAKEAAQYGKKVMVLDFVTPTPLGTRWGLGGTCVNVGCIPKKLMHQAALLGQALQDSRNYGWKVEETVKHDWDRMIEAVQNHIGSLNWGYRVALREKKVVYENAYGQFIGPHRIKATNNKGKEKIYSAERFLIATGERPRYLGIPGDKEYCISSDDLFSLPYCPGKTLVVGASYVALECAGFLAGIGLDVTVMVRSILLRGFDQDMANKIGEHMEEHGIKFIRQFVPIKVEQIEAGTPGRLRVVAQSTNSEEIIEGEYNTVMLAIGRDACTRKIGLETVGVKINEKTGKIPVTDEEQTNVPYIYAIGDILEDKVELTPVAIQAGRLLAQRLYAGSTVKCDYENVPTTVFTPLEYGACGLSEEKAVEKFGEENIEVYHSYFWPLEWTIPSRDNNKCYAKIICNTKDNERVVGFHVLGPNAGEVTQGFAAALKCGLTKKQLDSTIGIHPVCAEVFTTLSVTKRSGASILQAGC

SEQ ID NO: 754337 - protein, 497 aa, Homo sapiens; identical to SEQ ID NO: 754334

SEQ ID NO: 754338 - protein, 497 aa, Homo sapiens; identical to SEQ ID NO: 754334

SEQ ID NO: 754339 - protein, 397 aa, Homo sapiens [sequence omitted]

SEQ ID NO: 754340 - protein, 468 aa, Homo sapiens
MNGPEDLPKSYDYDLIIIGGGSGGLAAAKEAAQYGKKVMVLDFVTPTPLGTRWGLGGTCVNVGCIPKKLMHQAALLGQALQDSRNYGWKVEETVKHDWDRMIEAVQNHIGSLNWGYRVALREKKVVYENAYGQFIGPHRIKATNNKGKEKIYSAERFLIATGERPRYLGIPGDKEYCISSDDLFSLPYCPGKTLVVGASYVALECAGFLAGIGLDVTVMVRSILLRGFDQDMANKIGEHMEEHGIKFIRQFVPIKVEQIEAGTPGRLRVVAQSTNSEEIIEGEYNTVMLAIGRDACTRKIGLETVGVKINEKTGKIPVTDEEQTNVPYIYAIGDILEDKVELTPVAIQAGRLLAQRLYAGSTVKCDYENVPTTVFTPLEYGACGLSEEKAVEKFGEENIEVYHSYFWPLEWTIPSRDNNKCYAKIICNTKDNERVVGFHVLGPNAGEVTQGFAAALKCGLTKYSQHCL

SEQ ID NO: 754341 - protein, 276 aa, Homo sapiens
TIRSFSSEAWVADKIGEHMEEHGIKFIRQFVPIKVEQIEAGTPGRLRVVAQSTNSEEIIEGEYNTVMLAIGRDACTRKIGLETVGVKINEKTGKIPVTDEEQTNVPYIYAIGDILEDKVELTPVAIQAGRLLAQRLYAGSTVKCDYENVPTTVFTPLEYGACGLSEEKAVEKFGEENIEVYHSYFWPLEWTIPSRDNNKCYAKIICNTKDNERVVGFHVLGPNAGEVTQGFAAALKCGLTKKQLDSTIGIHPVCAEVFTTLSVTKRSGASILQAGC

SEQ ID NO: 754342 - protein, 497 aa, Homo sapiens; identical to SEQ ID NO: 754334

SEQ ID NO: 754343 - protein, 497 aa, Homo sapiens; identical to SEQ ID NO: 754334

SEQ ID NO: 754344 - protein, 497 aa, Homo sapiens; identical to SEQ ID NO: 754334

SEQ ID NO: 754345 - protein, 497 aa, Homo sapiens; identical to SEQ ID NO: 754334

SEQ ID NO: 754346 - protein, 76 aa, Homo sapiens
TSSRSRSRTDNERVVGFHVLGPNAGEVTQGFAAALKCGLTKKQLDSTIGIHPVCAEVFTTLSVTKRSGASILQAGC

SEQ ID NO: 754347 - protein, 497 aa, Homo sapiens; identical to SEQ ID NO: 754334

SEQ ID NO: 754348 - protein, 497 aa, Homo sapiens; identical to SEQ ID NO: 754334

SEQ ID NO: 754349 - protein, 180 aa, Homo sapiens [sequence omitted]

SEQ ID NO: 754350 - protein, 100 aa, Homo sapiens
  misc_feature (93)..(93): Xaa can be any naturally occurring amino acid
MSLWLCFQCPLGVSKSGKKRINLWSWCREVPQPIVKSFEKRPRSASTPETRTKFTQDICATPSASALDSANLWVLVDCILRDTSEDLGLQCDXMNLAFGR

SEQ ID NO: 754351 - protein, 217 aa, Homo sapiens
MDGAANSQLSTSQPSLRHKVNEHEQDGNELQTTPEFRAHVAKKLGALLDSFITISEAAKEPAKAKVQKVALEDDGFRLFFTSVPGGREKEESPQPRRKRQPSSSSSEDSDEEWRRCREAAVSASDILQESAIHSPGTVEKEAKKKRKLKKKAKKVASVDSAVAATTPTSMATVQKQKSGELNGDQVSLGTKKKKKAKKASETSPFPPAKSATAIPAN

SEQ ID NO: 754352 - protein, 270 aa, Homo sapiens
NPLRWFKMAAPSGTVSDSESSNSSSDAEELERCREAAMPAWGLEQRPHVAGKPRAGAANSQLSTSQPSLRHKVNEHEQDGNELQTTPEFRAHVAKKLGALLDSFITISEAAKEPAKAKVQKVALEDDGFRLFFTSVPGGREKEESPQPRRKRQPSSSSSEDSDEEWRRCREAAVSASDILQESAIHSPGTVEKEAKKKRKLKKKAKKVASVDSAVAATTPTSMATVQKQKSGELNGDQVSLGTKKKKKAKKASETSPFPPAKSATAIPAN

SEQ ID NO: 754353 - protein, 287 aa, Homo sapiens
MPGKHQHFQEPEVGCCGKYFLFGFNIVFWVLGALFLAIGLWAWGEKGVLSNISALTDLGGLDPVWLFVVVGGVMSVLGFAGCIGALRENTFLLKFFSVFLGLIFFLELATGILAFVFKDWIRDQLNLFINNNVKAYRDDIDLQNLIDFAQEYEDVLNTQCGYDVRLKLELEQQGFIHTKGCVGQFEKWLQDNLIVVAGVFMGIALLQIFGICLAQNLVSDIKAVKANWSKWNDDFENHWLTPTISEVLSTAGPQQNSLTGAPGPAPPSRHVFFGLGGLYPEPTFKNW

SEQ ID NO: 754354 - protein, 270 aa, Homo sapiens
MPGKHQHFQEPEVGCCGKYFLFGFNIVFWVLGALFLAIGLWAWGEKGVLSNISALTDLGGLDPVWLFVVVGGVMSVLGFAGCIGALRENTFLLKFFSVFLGLIFFLELATGILAFVFKDWIRDQLNLFINNNVKAYRDDIDLQNLIDFAQEYWSCCGARGPNDWNLNIYFNCTDLNPSRERCGVPFSCCVRDPAEDVLNTQCGYDVRLKLELEQQGFIHTKGCVGQFEKWLQDNLIVVAGVFMGIALLQIFGICLAQNLVSDIKAVKANW

SEQ ID NO: 754355 - protein, 291 aa, Homo sapiens
MPGKHQHFQEPEVGCCGKYFLFGFNIVFWVLGALFLAIGLWAWGEKGVLSNISALTDLGGLDPVWLFVVVGGVMSVLGFAGCIGALRENTFLLKFFSVFLGLIFFLELATGILAFVFKDWIRDQLNLFINNNVKAYRDDIDLQNLIDFAQEYWSCCGARGPNDWNLNIYFNCTDLNPSRERCGVPFSCCVRDPAEDVLNTQCGYDVRLKLELEQQGFIHTKGCVGQFEKWLQDNLIVVAGVFMGIALLQIFGICLAQNLVSDIKAVKANWANGMMTIDTTSLRPSRSRREL

SEQ ID NO: 754356 - protein, 202 aa, Homo sapiens
MPGKHQHFQEPEVGCCGKYFLFGFNIVFWVLGALFLAIGLWAWGEKGVLSNISALTDLGGLDPVWLFVVVGGVMSVLGFAGCIGALRENTFLLKFFSVFLGLIFFLELATGILAFVFKDWIRDQLNLFINNNVKAYRDDIDLQNLIDFAQEYWSCCGARGPNDWNLNIYFNCTDLNPSRERCGVPFSCCVRDPAVSGAGGGE

SEQ ID NO: 754357 - protein, 164 aa, Homo sapiens
RGSSPRQVVLFKDWIRDQLNLFINNNVKAYRDDIDLQNLIDFAQEYWSCCGARGPNDWNLNIYFNCTDLNPSRERCGVPFSCCVRDPAEDVLNTQCGYDVRLKLELEQQGFIHTKGCVGQFEKWLQDNLIVVAGVFMGIALLQIFGICLAQNLVSDIKAVKANW

SEQ ID NO: 754358 - protein, 141 aa, Homo sapiens
LATGILAFVFKDWIRDQLNLFINNNVKAYRDDIDLQNLIDFAQEYVSPVSSLDTCRRRLPGRRMREQVPCDGTISLPTWASGPQERDPGVSSSEESQPLLILMGPHLPSAIGPRPWETEGMGSTLAAPRPGPTTHGRMEEM

SEQ ID NO: 754359 - protein, 329 aa, Homo sapiens
MPGKHQHFQEPEVGCCGKYFLFGFNIVFWVLGALFLAIGLWAWGEKGVLSNISALTDLGGLDPVWLFVVVGGVMSVLGFAGCIGALRENTFLLKFFSVFLGLIFFLELATGILAFVFKDWIRDQLNLFINNNVKAYRDDIDLQNLIDFAQEYWSCCGARGPNDWNLNIYFNCTDLNPSRERCGVPFSCCVRDPAEDVLNTQCGYDVRLKLELEQQGFIHTKGCVGQFEKWLQDNLIVVAGVFMGIALLQIFGICLAQNLVSDIKAVKANWSKWNDDFENHWLTPTISEVLSTAGPQQNSLTGAPGPAPPSRHVFFGLGGLYPEPTFKNW

SEQ ID NO: 754360 - protein, 263 aa, Homo sapiens
MPGKHQHFQEPEVGCCGKYFLFGFNIVFWVLGALFLAIGLWAWGEKGVLSNISALTDLGGLDPVWLFVVVGGVMSVLGFAGCIGALRENTFLLKFFSVFLGLIFFLELATGILAFVFKDWIRDQLNLFINNNVKAYRDDIDLQNLIDFAQEYWSCCGARGPNDWNLNIYFNCTDLNPSRERCGVPFSCCVRDPAEDVLNTQCGYDVRLKLELEQQGFIHTKGCVGQFEKWLQDNLIVVAGVFMGIALLQIFGICLAQNLEQME

SEQ ID NO: 754361 - protein, 96 aa, Homo sapiens
GRGRGYSAEGALLLCVRNPAEDVLNTQCGYDVRLKLELEQQGFIHTKGCVGQFEKWLQDNLIVVAGVFMGIALLQIFGICLAQNLVSDIKAVKANW

SEQ ID NO: 754362 - protein, 1024 aa, Homo sapiens
MSNAKERKHAKKMRNQPTNVTLSSGFVADRGVKHHSGGEKPFQAQKQEPHPGTSRQRQTRVNPHSLPDPEVNEQSSSKGMFRKKGGWKAGPEGTSQEIPKYITASTFAQARAAEISAMLKAVTQKSSNSLVFQTLPRHMRRRAMSHNVKRLPRRLQEIAQKEAEKAVHQKKEHSKNKCHKARRCHMNRTLEFNRRQKKNIWLETHIWHAKRFHMVKKWGYCLGERPTVKSHRACYRAMTNRCLLQDLSYYCCLELKGKEEEILKALSGMCNIDTGLTFAAVHCLSGKRQGSLVLYRVNKYPREMLGPVTFIWKSQRTPGDPSESRQLWIWLHPTLKQDILEEIKAACQCVEPIKSAVCIADPLPTPSQEKSQTELPDEKIGKKRKRKDDGENAKPIKKIIGDGTRDPCLPYSWISPTTGIIISDLTMEMNRFRLIGPLSHSILTEAIKAASVHTVGEDTEETPHRWWIETCKKPDSVSLHCRQEAIFELLGGITSPAEIPAGTILGLTVGDPRINLPQKKSKALPNPEKCQDNEKVRQLLLEGVPVECTHSFIWNQDICKSVTENKISDQDLNRMRSELLVPGSQLILGPHESKIPILLIQQPGKVTGEDRLGWGSGWDVLLPKGWGMAFWIPFIYRGVRVGGLKESAVHSQYKRSPNVPGDFPDCPAGMLFAEEQAKNLLEKYKRRPPAKRPNYVKLGTLAPFCCPWEQLTQDWESRVQAYEEPSVASSPNGKESDLRRSEVPCAPMPKKTHQPSDEVGTSIEHPREAEEVMDAGCQESAGPERITDQEASENHVAATGSHLCVLRSRKLLKQLSAWCGPSSEDSRGGRRAPGRGQQGLTREACLSILGHFPRALVWVSLSLLSKGSPEPHTMICVPAKEDFLQLHEDWHYCGPQESKHSDPFRSKILKQKEKKKREKRQKPGRASSDGPAGEEPVAGQEALTLGLWSGPLPRVTLHCSRTLLGFVTQGDFSMAVGCGEALGFVSLTGLLDMLSSQPAAQRGLVLLRPPASLQYRFARIAIEV

SEQ ID NO: 754363 - protein, 945 aa, Homo sapiens
MFRKKGGWKAGPEGTSQEIPKYITASTFAQARAAEISAMLKAVTQKSSNSLVFQTLPRHMRRRAMSHNVKRLPRRLQEIAQKEAEKAVHQKKEHSKNKCHKARRCHMNRTLEFNRRQKKNIWLETHIWHAKRFHMVKKWGYCLGERPTVKSHRACYRAMTNRCLLQDLSYYCCLELKGKEEEILKALSGMCNIDTGLTFAAVHCLSGKRQGSLVLYRVNKYPREMLGPVTFIWKSQRTPGDPSESRQLWIWLHPTLKQDILEEIKAACQCVEPIKSAVCIADPLPTPSQEKSQTELPDEKIGKKRKRKDDGENAKPIKKIIGDGTRDPCLPYSWISPTTGIIISDLTMEMNRFRLIGPLSHSILTEAIKAASVHTVGEDTEETPHRWWIETCKKPDSVSLHCRQEAIFELLGGITSPAEIPAGTILGLTVGDPRINLPQKKSKALPNPEKCQDNEKVRQLLLEGVPVECTHSFIWNQDICKSVTENKISDQDLNRMRSELLVPGSQLILGPHESKIPILLIQQPGKVTGEDRLGWGSGWDVLLPKGWGMAFWIPFIYRGVRVGGLKESAVHSQYKRSPNVPGDFPDCPAGMLFAEEQAKNLLEKYKRRPPAKRPNYVKLGTLAPFCCPWEQLTQDWESRVQAYEEPSVASSPNGKESDLRRSEVPCAPMPKKTHQPSDEVGTSIEHPREAEEVMDAGCQESAGPERITDQEASENHVAATGSHLCVLRSRKLLKQLSAWCGPSSEDSRGGRRAPGRGQQGLTREACLSILGHFPRALVWVSLSLLSKGSPEPHTMICVPAKEDFLQLHEDWHYCGPQESKHSDPFRSKILKQKEKKKREKRQKPGRASSDGPAGEEPVAGQEALTLGLWSGPLPRVTLHCSRTLLGFVTQGDFSMAVGCGEALGFVSLTGLLDMLSSQPAAQRGLVLLRPPASLQYRFARIAIEV

SEQ ID NO: 754364 - protein, 1024 aa, Homo sapiens; identical to SEQ ID NO: 754362

SEQ ID NO: 754365 - protein, 827 aa, Homo sapiens
MSNAKERKHAKKMRNQPTNVTLSSGFVADRGVKHHSGGEKPFQAQKQEPHPGTSRQRQTRVNPHSLPDPEVNEQSSSKGMFRKKGGWKAGPEGTSQEIPKYITASTFAQARAAEISAMLKAVTQKSSNSLVFQTLPRHMRRRAMSHNVKRLPRRLQEIAQKEAEKAVHQKKEHSKNKCHKARRCHMNRTLEFNRRQKKNIWLETHIWHAKRFHMVKKWGYCLGERPTVKSHRACYRAMTNRCLLQDLSYYCCLELKGKEEEILKALSGMCNIDTGLTFAAVHCLSGKRQGSLVLYRVNKYPREMLGPVTFIWKSQRTPGDPSESRQLWIWLHPTLKQDILEEIKAACQCVEPIKSAVCIADPLPTPSQEKSQTELPDEKIGKKRKRKDDGENAKPIKKIIGDGTRDPCLPYSWISPTTGIIISDLTMEMNRFRLIGPLSHSILTEAIKAASVHTVGEDTEETPHRWWIETCKKPDSVSLHCRQEAIFELLGGITSPAEIPAGTILGLTVGDPRINLPQKKSKALPNPEKCQDNEKVRQLLLEGVPVECTHSFIWNQDICKSVTENKISDQDLNRMRSELLVPGSQLILGPHESKIPILLIQQPGKVTGEDRLGWGSGWDVLLPKGWGMAFWIPFIYRGVRVGGLKESAVHSQYKRSPNVPGDFPDCPAGMLFAEEQAKNLLEKYKRRPPAKRPNYVKLGTLAPFCCPWEQLTQDWESRVQAYEEPSVASSPNGKESDLRRSEVPCAPMPKKTHQPSDEVGTSIEHPREAEEVMDAGCQESAGPERITDQEASENHVAATGSHLCVLRSRKLLKQLSAWCGPSSEDCY

SEQ ID NO: 754366 - protein, 127 aa, Homo sapiens
MRSPARSPGALARWVLSRRLVILTRGFLTASGRLVVRGWCLPGCECRGNCMRRPPSRRPSPLFIVSLSDSADLFPCCLCPGPLSLVSHLLRPLRWSPLRQSFPFIAPPGGRPSWEWACIPSSATPND

SEQ ID NO: 754367 - protein, 1024 aa, Homo sapiens; identical to SEQ ID NO: 754362

SEQ ID NO: 754368 - protein, 1024 aa, Homo sapiens; identical to SEQ ID NO: 754362

SEQ ID NO: 754369 - protein, 261 aa, Homo sapiens
MPRKAPCLWRHVSPGLSQGPTIPTTVPCREDILCPSGQTDGDSPGPPPEVQQSPHCTTVPVGASVNITCSTSGGLRGIYLRQLGPQPQDIIYYEDGVVPTTDRRFRGRIDFSGSQDNLTITMHRLQLSDTGTYTCQAITEVNVYGSGTLVLVTEEQSQGWHRCSDAPPRASALPAPPTGSALPDPQTASALPDPPAASALPAALAVISFLLGLGLGVACVLARTQIKKLCSWRDKNSAACVVYEDMSHSRCNTLSSPNQYQ

SEQ ID NO: 754370 - protein, 162 aa, Homo sapiens
MAGPPRLLLLPLLLALARGLPGALAAQEVQQSPHCTTVPVGASVNITCSTSGGLRGIYLRQLGPQPQDIIYYEDGVVPTTDRRFRGRIDFSGSQDNLTITMHRLQLSDTGTYTCQAITEVNVYGSGTLVLVTGRECAHPRPPSQPQLLARLCSPSPCRGTLP

SEQ ID NO: 754371 - protein, 240 aa, Homo sapiens
MAGPPRLLLLPLLLALARGLPGALAAQEVQQSPHCTTVPVGASVNITCSTSGGLRGIYLRQLGPQPQDIIYYEDGVVPTTDRRFRGRIDFSGSQDNLTITMHRLQLSDTGTYTCQAITEVNVYGSGTLVLVTEEQSQGWHRCSDAPPRASALPAPPTGSALPDPQTASALPDPPAASALPAALAVISFLLGLGLGVACVLARTQIKKLCSWRDKNSAACVVYEDMSHSRCNTLSSPNQYQ

SEQ ID NO: 754372 - protein, 231 aa, Homo sapiens
MAGPPRLLLLPLLLALARGLPGALAAQEVQQSPHCTTVPVGASVNITCSTSGGLRGIYLRQLGPQPQDIIYYEDGVVPTTDRRFRGRIDFSGSQDNLTITMHRLQLSDTGTYTCQAITEVNVYGSGTLVLVTEEQSQGWHRCSDAPPRASALPAPPTASALPDPPAASALPAALAVISFLLGLGLGVACVLARTQIKKLCSWRDKNSAACVVYEDMSHSRCNTLSSPNQYQ

SEQ ID NO: 754373 - protein, 240 aa, Homo sapiens; identical to SEQ ID NO: 754371

SEQ ID NO: 754374 - protein, 268 aa, Homo sapiens
MAGPPRLLLLPLLLALARGLPGALAAQEVQQSPHCTTVPVGASVNITCSTSGGLRGIYLRQLGPQPQDIIYYEDGVVPTTDRRFRGRIDFSGSQDNLTITMHRLQLSDTGTYTCQAITEVNVYGSGTLVLVTEEQSQGWHRCSDAPPRASALPAPPTGSALPDPQTASALPDPPAASALPAALAVISFLLGLGLGVACVLARTQITNCARGGYDRPLCVSRLSRRGTAVSPPSVTCPPPLLPPPPPSPPPPPPPPPPPPPPPAPPPPP

SEQ ID NO: 754375 - protein, 267 aa, Homo sapiens
LSSERLRSPVCCSLWGPVDPERLSCTRPAGRAGCGEHGRASEAPAAAPASGAGSRPAWGPGCPRLMVTAQVLPEVQQSPHCTTVPVGASVNITCSTSGGLRGIYLRQLGPQPQDIIYYEDGVVPTTDRRFRGRIDFSGSQDNLTITMHRLQLSDTGTYTCQAITEVNVYGSGTLVLVTEEQSQGWHRCSDAPPRASALPAPPTGSALPDPQTASALPDPPAASALPAALAVISFLLGLGLGVACVLARTQVSVSPSCHLHPKDCSLS

SEQ ID NO: 754376 - protein, 1513 aa, Homo sapiens
ERRPERSEGGKMADRFSRFNEDRDFQGNHFDQYEEGHLEIEQASLDKPIESDNIGHRLLQKHGWKLGQGLGKSLQGRTDPIPIVVKYDVMGMGRMEMELDYAEDATERRRVLEVEKEDTEELRQKYKDYVDKEKAIAKALEDLRANFYCELCDKQYQKHQEFDNHINSYDHAHKQRLKDLKQREFARNVSSRSRKDEKKQEKALRRLHELAEQRKQAECAPGSGPMFKPTTVAVDEEGGEDDKDESATNSGTGATASCGLGSEFSTDKGGPFTAVQITNTTGLAQAPGLASQGISFGIKNNLGTPLQKLGVSFSFAKKAPVKLESIASVFKDHAEEGTSEDGTKPDEKSSDQGLQKVGDSDGSSNLDGKKEDEDPQDGGSLASTLSKLKRMKREEGAGATEPEYYHYIPPAHCKVKPNFPFLLFMRASEQMDGDNTTHPKNAPESKKGSSPKPKSCIKAAASQGAEKTVSEVSEQPKETSMTEPSEPGSKAEAKKALGGDVSDQSLESHSQKVSETQMCESNSSKETSLATPAGKESQEGPKHPTGPFFPVLSKDESTALQWPSELLIFTKAEPSISYSCNPLYFDFKLSRNKDARTKGTEKPKDIGSSSKDHLQGLDPGEPNKSKEVGGEKIVRSSGGRMDAPASGSACSGLNKQEPGGSHGSETEDTGRSLPSKKERSGKSHRHKKKKKHKKSSKHKRKHKADTEEKSSKAESGEKSKKRKKRKRKKNKSSAPADSERGPKPEPPGSGSPAPPRRRRRAQDDSQRRSLPAEEGSSGKKDEGGGGSSSQDHGGRKHKGELPPSSCQRRAGTKRSSRSSHRSQPSSGDEDSDDASSHRLHQKSPSQYSEEEEEEDSGSEHSRSRSRSGRRHSSHRSSRRSYSSSSDASSDQSCYSRQRSYSDDSYSDYSDRSRRHSKRSHDSDDSDYASSKHRSKRHKYSSSDDDYSLSCSQSRSRSRSHTRERSRSRGRSRSSSCSRSRSKRRSRSTTAHSWQRSRSYSRDRSRSTRSPSQRSGSRKRSWGHESPEERHSGRRDFIRSKIYRSQSPHYFRSGRGEGPGKKDDGRGDDSKATGPPSQNSNIGTGRGSEGDCSPEDKNSVTAKLLLEKIQSRKVERKPSVSEEVQATPNKAGPKLKDPPQGYFGPKLPPSLGNKPVLPLIGKLPATRKPNKKCEESGLERGEEQEQSETEEGPPGSSDALFGHQFPSEETTGPLLDPPPEESKSGEATADHPVAPLGTPAHSDCYPGDPTISHNYLPDPSDGDTLESLDSSSQPGPVESSLLPIAPDLEHFPSYAPPSGDPSIESTDGAEDASLAPLESQPITFTPEEMEKYSKLQQAAQQHIQQQLLAKQVKAFPASAALAPATPALQPIHIQQPATASATSITTVQHAILQHHAAAAAAAIGIHPHPHPQPLAQVHHIPQPHLTPISLSHLTHSIIPGHPATFLASHPIHIIPASAIHPGPFTFHPVPHAALYPTLLAPRPAAAAATALHLHPLLHPIFSGQDLQHPPSHGT

SEQ ID NO: 754377 - protein, 1495 aa, Homo sapiens
ERRPERSEGGKMADRFSRFNEDRDFQGNHFDQYEEGHLEIEQASLDKPIESDNIGHRLLQKHGWKLGQGLGKSLQGRTDPIPIVVKYDVMGMGRMEMELDYAEDATERRRVLEVEKEDTEELRQKYKDYVDKEKAIAKALEDLRANFYCELCDKQYQKHQEFDNHINSYDHAHKQRLKDLKQREFARNVSSRSRKDEKKQEKALRRLHELAEQRKQAECAPGSGPMFKPTTVAVDEEGGEDDKDESATNSGTGATASCGLGSEFSTDKGGPFTAVQITNTTGLAQAPGLASQGISFGIKNNLGTPLQKLGVSFSFAKKAPVKLESIASVFKDHAEEGTSEDGTKPDEKSSDQGLQKVGDSDGSSNLDGKKEDEDPQDGGSLASTLSKLYIPPAHCKVKPNFPFLLFMRASEQMDGDNTTHPKNAPESKKGSSPKPKSCIKAAASQGAEKTVSEVSEQPKETSMTEPSEPGSKAEAKKALGGDVSDQSLESHSQKVSETQMCESNSSKETSLATPAGKESQEGPKHPTGPFFPVLSKDESTALQWPSELLIFTKAEPSISYSCNPLYFDFKLSRNKDARTKGTEKPKDIGSSSKDHLQGLDPGEPNKSKEVGGEKIVRSSGGRMDAPASGSACSGLNKQEPGGSHGSETEDTGRSLPSKKERSGKSHRHKKKKKHKKSSKHKRKHKADTEEKSSKAESGEKSKKRKKRKRKKNKSSAPADSERGPKPEPPGSGSPAPPRRRRRAQDDSQRRSLPAEEGSSGKKDEGGGGSSSQDHGGRKHKGELPPSSCQRRAGTKRSSRSSHRSQPSSGDEDSDDASSHRLHQKSPSQYSEEEEEEDSGSEHSRSRSRSGRRHSSHRSSRRSYSSSSDASSDQSCYSRQRSYSDDSYSDYSDRSRRHSKRSHDSDDSDYASSKHRSKRHKYSSSDDDYSLSCSQSRSRSRSHTRERSRSRGRSRSSSCSRSRSKRRSRSTTAHSWQRSRSYSRDRSRSTRSPSQRSGSRKRSWGHESPEERHSGRRDFIRSKIYRSQSPHYFRSGRGEGPGKKDDGRGDDSKATGPPSQNSNIGTGRGSEGDCSPEDKNSVTAKLLLEKIQSRKVERKPSVSEEVQATPNKAGPKLKDPPQGYFGPKLPPSLGNKPVLPLIGKLPATRKPNKKCEESGLERGEEQEQSETEEGPPGSSDALFGHQFPSEETTGPLLDPPPEESKSGEATADHPVAPLGTPAHSDCYPGDPTISHNYLPDPSDGDTLESLDSSSQPGPVESSLLPIAPDLEHFPSYAPPSGDPSIESTDGAEDASLAPLESQPITFTPEEMEKYSKLQQAAQQHIQQQLLAKQVKAFPASAALAPATPALQPIHIQQPATASATSITTVQHAILQHHAAAAAAAIGIHPHPHPQPLAQVHHIPQPHLTPISLSHLTHSIIPGHPATFLASHPIHIIPASAIHPGPFTFHPVPHAALYPTLLAPRPAAAAATALHLHPLLHPIFSGQDLQHPPSHGT

SEQ ID NO: 754378 - protein, 1496 aa, Homo sapiens
ERRPERSEGGKMADRFSRFNEDRDFQGNHFDQYEEGHLEIEQASLDKPIESDNIGHRLLQKHGWKLGQGLGKSLQGRTDPIPIVVKYDVMGMGRMEMELDYAEDATERRRVLEVEKEDTEELRQKYKDYVDKEKAIAKALEDLRANFYCELCDKQYQKHQEFDNHINSYDHAHKQRLKDLKQREFARNVSSRSRKDEKKQEKALRRLHELAEQRKQAECAPGSGPMFKPTTVAVDEEGGEDDKDESATNSGTGATASCGLGSEFSTDKGGPFTAVQITNTTGLAQAPGLASQGISFGIKNNLGTPLQKLGVSFSFAKKAPVKLESIASVFKDHAEEGTSEDGTKPDEKSSDQGLQKVGDSDGSSNLDGKKEDEDPQDGGSLASTLSKLKRMKREEGAGATEPEYYHYIPPAHCKVKPNFPFLLFMRASEQMDGDNTTHPKNAPESKKGSSPKPKSCIKAAASQGAEKTVSEVSEQPKETSMTEPSEPGSKAEAKKALGGDVSDQSLESHSQKVSETQMCESNSSKETSLATPAGKESQEGPKHPTGPFFPVLSKDESTALQWPSELLIFTKAEPSISYSCNPLYFDFKLSRNKDARTKGTEKPKDIGSSSKDHLQGLDPGEPNKSKEVGGEKIVRSSGGRMDAPASGSACSGLNKQEPGGSHGSETEDTGRSLPSKKERSGKSHRHKKKKKHKKSSKHKRKHKADTEEKSSKAESGEKSKKRKKRKRKKNKSSAPADSERGPKPEPPGSGSPAPPRRRRRAQDDSQRRSLPAEEGSSGKKDEGGGGSSSQDHGGRKHKGELPPSSCQRRAGTKRSSRSSHRSQPSSGDEDSDDASSHRLHQKSPSQYSEEEEEEDSGSEHSRSRSRSGRRHSSHRSSRRSYSSSSDASSDQSCYSRQRSYSDDSYSDYSDRSRRHSKRSHDSDDSDYASSKHRSKRHKYSSSDDDYSLSCSQSRSRSRSHTRERSRSRGRSRSSSCSRSRSKRRSRSTTAHSWQRSRSYSRDRSRSTRSPSQRSGSRKRSWGHESPEERHSGRRDFIRSKIYRSQSPHYFRSGRGEGPGKKDDGRGDDSKATGPPSQNSNIGTGRGSEGDCSPEDKNSVTAKLLLEKIQSRKVERKPSVSEEVQATPNKAGPKLKDPPQGYFGPKLPPSLGNKPVLPLIGKLPATRKPNKKCEESGLERGEEQEQSETEEGPPGSSDALFGHQFPSEETTGPLLDPPPEESKSGEATADHPVAPLGTPAHSDCYPGDPTISHNYLPDPSDGDTLESLDSSSQPGPVESSLLPIAPDLEHFPSYASLAPLESQPITFTPEEMEKYSKLQQAAQQHIQQQLLAKQVKAFPASAALAPATPALQPIHIQQPATASATSITTVQHAILQHHAAAAAAAIGIHPHPHPQPLAQVHHIPQPHLTPISLSHLTHSIIPGHPATFLASHPIHIIPASAIHPGPFTFHPVPHAALYPTLLAPRPAAAAATALHLHPLLHPIFSGQDLQHPPSHGT

SEQ ID NO: 754379 - protein, 219 aa, Homo sapiens
ERRPERSEGGKMADRFSRFNEDRDFQGNHFDQYEEGHLEIEQASLDKPIESDNIGHRLLQKHGWKLGQGLGKSLQGRTDPIPIVVKYDVMGMGRMEMELDYAEDATERRRVLEVEKEDTEELRQKYKDYVDKEKAIAKALEDLRANFYCELCDKQYQKHQEFDNHINSYDHAHKQRLKDLKQREFARNVSSRSRKDEKKQEKALRRLHELAEQRKQAEW

SEQ ID NO: 754380 - protein, 1513 aa, Homo sapiens; identical to SEQ ID NO: 754376

SEQ ID NO: 754381 - protein, 1532 aa, Homo sapiens
MEQQTSQGTRKGDSMGQQGLKMTEAKVNCLGIEWVGSGLNEVPSSLYFLLSPLEGPNLTPEASPDPLPEPPLASVEVPDKPSGSPGQPPSPAPSPVPEPDAQAEDVAPPPTMAEEEEGTTGELRSAEPAPADSRHPLTYRKTTNFALDKFLDPARPYKCTVCKESFTQKNILLVHYNSVSHLHKMKKAAIDPSAPARGEAGAPPTTTAATDKPFKCTVCRVSYNQSSTLEIHMRSVLHQTRSRGTKTDSKIEGPERSQEEPKEGETEGEVGTEKKGPDTSGFISGLPFLSPPPPPLDLHRFPAPLFTPPVLPPFPLVPESLLKLQQQQLLLPFYLHDLKVGPKLTLAGPAPVLSLPAATPPPPPQPPKAELAEREWERPPMAKEGNEAGPSSPPDPLPNEAARTAAKALLENFGFELVIQYNEGKQAVPPPPTPPPPEALGGGDKLACGACGKLFSNMLILKTHEEHVHRRFLPFEALSRYAAQFRKSYDSLYPPLAEPPKPPDGSLDSPVPHLGPPFLVPEPEAGGTRAPEERSRAGGHWPIEEEESSRGNLPPLVPAGRRFSRTKFTEFQTQALQSFFETSAYPKDGEVERLASLLGLASRVVVVWFQNARQKARKNACEGGSMPTGGGTGGASGCRRCHATFSCVFELVRHLKKCYDDQTLEEEEEEAERGEEEEEVEEEEVEEEQGLEPPAGPEGPLPEPPDGEELSQAEATKAGGKEPEEKATPSPSPAHTCDQCAISFSSQDLLTSHRRLHFLPSLQPSAPPQLLDLPLLVFGERNPLVAATSPMPGPPLKRKHEDGSLSPTGSEAGGGGEGEPPRDKRLRTTILPEQLEILYRWYMQDSNPTRKMLDCISEEVGLKKRVVQVWFQNTRARERKGQFRSTPGGVPSPAVKPPATATPASLPKFNLLLGKVDDGTGREAPKREAPAFPYPTATLASGPQPFLPPGKEATTPTPEPPLPLLPPPPPSEEEGPEEPPKASPESEACSLSAGDLSDSSASSLAEPESPGAGGTSGGPGGGTGVPDGMGQRRYRTQMSSLQLKIMKACYEAYRTPTMQECEVLGEEIGLPKRVIQVWFQNARAKEKKAKLQGTAAGSTGGSSEGLLAAQRTDCPYCDVKYDFYVSCRGHLFSRQHLAKLKEAVRAQLKSESKCYDLAPAPEAPPALKAPPATTPASMPLGAAPTLPRLAPVLLSGPALAQPPLGNLAPFNSGPAASSGLLGLATSVLPTTTVVQTAGPGRPLPQRPMPDQTNTSTAGTTDPVPGPPTEPLGDKVSSERKPVAGPTSSSNDALKNLKALKTTVPALLGGQFLPFPLPPAGGTAPPLQGAYFQQLYGMKKGLFPMNPMIPQTLIGLLPNALLQPPPQPPEPTATAPPKPPELPAPGEGEAGEVDELLTGSTGISTVDVTHRYLCRQCKMAFDGEAPATAHQRSFCFFGRGSGGSMPPPLRVPICTYHCLACEVLLSGREALASHLRSSAHRRKAAPPQGGPPISITNAATAASAAVAFAKEEARLPHTDSNPKTTTTSTLLAL

SEQ ID NO: 754382 - protein, 1538 aa, Homo sapiens
MEQQTSQGTRKGDSMGQQGLKMTEAKVNCLGIEWVGSGLNEVPSSLYFLLSPLEGPNLTPEASPDPLPEPPLASVEVPDKPSGSPGQPPSPAPSPVPEPDAQAEDVAPPPTMAEEEEGTTGELRSAEPAPADSRHPLTYRKTTNFALDKFLDPARPYKCTVCKESFTQKNILLVHYNSVSHLHKMKKAAIDPSAPARGEAGAPPTTTAATDKPFKCTVCRVSYNQSSTLEIHMRSVLHQTRSRGTKTDSKIEGPERSQEEPKEGETEGEVGTEKKGPDTSGFISGLPFLSPPPPPLDLHRFPAPLFTPPVLPPFPLVPESLLKLQQQQLLLPFYLHDLKVGPKLTLAGPAPVLSLPAATPPPPPQPPKAELAEREWERPPMAKEGNEAGPSSPPDPLPNEAARTAAKALLENFGFELVIQYNEGKQAVPPPPTPPPPEALGGGDKLACGACGKLFSNMLILKTHEEHVHRRFLPFEALSRYAAQFRKSYDSLYPPLAEPPKPPDGSLDSPVPHLGPPFLVPEPEAGGTRAPEERSRAGGHWPIEEEESSRGNLPPLVPAGRRFSRTKFTEFQTQALQSFFETSAYPKDGEVERLASLLGLASRVVVVWFQNARQKARKNACEGGSMPTGGGTGGASGCRRCHATFSCVFELVRHLKKCYDDQTLEEEEEEAERGEEEEEVEEEEVEEEQGLEPPAGPEGPLPEPPDGEELSQAEATKAGGKEPEEKATPSPSPAHTCDQCAISFSSQDLLTSHRRLHFLPSLQPSAPPQLLDLPLLVFGERNPLVAATSPMPGPPLKRKHEDGSLSPTGSEAGGGGEGEPPRDKRLRTTILPEQLEILYRWYMQDSNPTRKMLDCISEEVGLKKRVVQVWFQNTRARERKGQFRSTPGGVPSPAVKPPATATPASLPKFNLLLGKVDDGTGREAPKREAPAFPYPTATLASGPQPFLPPGKEATTPTPEPPLPLLPPPPPSEEEGPEEPPKASPESEACSLSAGDLSDSSASSLAEPESPGAGGTSGGPGGGTGVPDGMGQRRYRTQMSSLQLKIMKACYEAYRTPTMQECEVLGEEIGLPKRVIQVWFQNARAKEKKAKLQGTAAGSTGGSSEGLLAAQRTDCPYCDVKYDFYVSCRGHLFSRQHLAKLKEAVRAQLKSESKCYDLAPAPEAPPALKAPPATTPASMPLGAAPTLPRLAPVLLSGPALAQPPLGNLAPFNSGPAASSGLLGLATSVLPTTTVVQTAGPGRPLPQRPMPDQTNTSTAGTTDPVPGPPTEPLGDKVSSERKPVAGPTSSSNDALKNLKALKTTVPALLGGQFLPFPLPPAGGTAPPAVFGPQLQGAYFQQLYGMKKGLFPMNPMIPQTLIGLLPNALLQPPPQPPEPTATAPPKPPELPAPGEGEAGEVDELLTGSTGISTVDVTHRYLCRQCKMAFDGEAPATAHQRSFCFFGRGSGGSMPPPLRVPICTYHCLACEVLLSGREALASHLRSSAHRRKAAPPQGGPPISITNAATAASAAVAFAKEEARLPHTDSNPKTTTTSTLLAL

SEQ ID NO: 754383 - protein, 1532 aa, Homo sapiens; identical to SEQ ID NO: 754381

SEQ ID NO: 754384 - protein, 1532 aa, Homo sapiens; identical to SEQ ID NO: 754381

SEQ ID NO: 754385 - protein, 122 aa, Homo sapiens
PPHRECLMRAFPMPGADGSPLATPSADTVIQLFSHPRDRPIVLKWLPRTWHKLPEGRTCLSCPLIGPLAKCLAYNRCSIAIYWMEGWMDGHTDREDPLYLENPRGIIIYDYFIMPISFIKIC

SEQ ID NO: 754386 - protein, 824 aa, Homo sapiens
RRSADRLHRAPLTLRPWTDRQSNGTETSLSPQARSVPPGKMQRLMMLLATSGACLGLLAVAAVAAAGANPAQRDTHSLLPTHRRQKRDWIWNQMHIDEEKNTSLPHHVGKIKSSVSRKNAKYLLKGEYVGKVFRVDAETGDVFAIERLDRENISEYHLTAVIVDKDTGENLETPSSFTIKVHDVNDNWPVFTHRLFNASVPESSAVGTSVISVTAVDADDPTVGDHASVMYQILKGKEYFAIDNSGRIITITKSLDREKQARYEIVVEARDAQGLRGDSGTATVLVTLQDINDNFPFFTQTKYTFVVPEDTRVGTSVGSLFVEDPDEPQNRMTKYSILRGDYQDAFTIETNPAHNEGIIKPMKPLDYEYIQQYSFIVEATDPTIDLRYMSPPAGNRAQVIINITDVDEPPIFQQPFYHFQLKENQKKPLIGTVLAMDPDAARHSIGYSIRRTSDKGQFFRVTKKGDIYNEKELDREVYPWYNLTVEAKELDSTGTPTGKESIVQVHIEVLDENDNAPEFAKPYQPKVCENAVHGQLVLQISAIDKDITPRNVKFKFTLNTENNFTLTDNHDNTANITVKYGQFDREHTKVHFLPVVISDNGMPSRTGTSTLTVAVCKCNEQGEFTFCEDMAAQVGVSIQAVVAILLCILTITVITLLIFLRRRLRKQARAHGKSVPEIHEQLVTYDEEGGGEMDTTSYDVSVLNSVRRGGAKPPRPALDARPSLYAQVQKPPRHAPGAHGGPGEMAAMIEVKKDEADHDGDGPPYDTLHIYGYEGSESIAESLSSLGTDSSDSDVDYDFLNDWGPRFKMLAELYGSDPREELLY

SEQ ID NO: 754387 - protein, 824 aa, Homo sapiens; identical to SEQ ID NO: 754386

SEQ ID NO: 754388 - protein, 824 aa, Homo sapiens; identical to SEQ ID NO: 754386

SEQ ID NO: 754389 - protein, 784 aa, Homo sapiens
MQRLMMLLATSGACLGLLAVAAVAAAGANPAQRDTHSLLPTHRRQKRDWIWNQMHIDEEKNTSLPHHVGKIKSSVSRKNAKYLLKGEYVGKVFRVDAETGDVFAIERLDRENISEYHLTAVIVDKDTGENLETPSSFTIKVHDVNDNWPVFTHRLFNASVPESSAVGTSVISVTAVDADDPTVGDHASVMYQILKGKEYFAIDNSGRIITITKSLDREKQARYEIVVEARDAQGLRGDSGTATVLVTLQDINDNFPFFTQTKYTFVVPEDTRVGTSVGSLFVEDPDEPQNRMTKYSILRGDYQDAFTIETNPAHNEGIIKPMKPLDYEYIQQYSFIVEATDPTIDLRYMSPPAGNRAQVIINITDVDEPPIFQQPFYHFQLKENQKKPLIGTVLAMDPDAARHSIGYSIRRTSDKGQFFRVTKKGDIYNEKELDREVYPWYNLTVEAKELDSTGTPTGKESIVQVHIEVLDENDNAPEFAKPYQPKVCENAVHGQLVLQISAIDKDITPRNVKFKFTLNTENNFTLTDNHDNTANITVKYGQFDREHTKVHFLPVVISDNGMPSRTGTSTLTVAVCKCNEQGEFTFCEDMAAQVGVSIQAVVAILLCILTITVITLLIFLRRRLRKQARAHGKSVPEIHEQLVTYDEEGGGEMDTTSYDVSVLNSVRRGGAKPPRPALDARPSLYAQVQKPPRHAPGAHGGPGEMAAMIEVKKDEADHDGDGPPYDTLHIYGYEGSESIAESLSSLGTDSSDSDVDYDFLNDWGPRFKMLAELYGSDPREELLY

SEQ ID NO: 754390 - protein, 784 aa, Homo sapiens; identical to SEQ ID NO: 754389

SEQ ID NO: 754391 - protein, 110 aa, Homo sapiens
MSKPTHDCMTEPSHVSLHLAVVTSQGTDPQAHLAEGKALPCPTSVVTHASSTGTFHCKHTLEKWHQSTERGREGDTKLTLRHGPRFPLWAKPLTLQGIVDNTDLFVLTNN

SEQ ID NO: 754392 - protein, 824 aa, Homo sapiens; identical to SEQ ID NO: 754386

SEQ ID NO: 754393 - protein, 824 aa, Homo sapiens; identical to SEQ ID NO: 754386

SEQ ID NO: 754394 - protein, 824 aa, Homo sapiens; identical to SEQ ID NO: 754386

SEQ ID NO: 754395 - protein, 796 aa, Homo sapiens
MCLLFPSVPPGKMQRLMMLLATSGACLGLLAVAAVAAAGANPAQRDTHSLLPTHRRQKRDWIWNQMHIDEEKNTSLPHHVGKIKSSVSRKNAKYLLKGEYVGKVFRVDAETGDVFAIERLDRENISEYHLTAVIVDKDTGENLETPSSFTIKVHDVNDNWPVFTHRLFNASVPESSAVGTSVISVTAVDADDPTVGDHASVMYQILKGKEYFAIDNSGRIITITKSLDREKQARYEIVVEARDAQGLRGDSGTATVLVTLQDINDNFPFFTQTKYTFVVPEDTRVGTSVGSLFVEDPDEPQNRMTKYSILRGDYQDAFTIETNPAHNEGIIKPMKPLDYEYIQQYSFIVEATDPTIDLRYMSPPAGNRAQVIINITDVDEPPIFQQPFYHFQLKENQKKPLIGTVLAMDPDAARHSIGYSIRRTSDKGQFFRVTKKGDIYNEKELDREVYPWYNLTVEAKELDSTGTPTGKESIVQVHIEVLDENDNAPEFAKPYQPKVCENAVHGQLVLQISAIDKDITPRNVKFKFTLNTENNFTLTDNHDNTANITVKYGQFDREHTKVHFLPVVISDNGMPSRTGTSTLTVAVCKCNEQGEFTFCEDMAAQVGVSIQAVVAILLCILTITVITLLIFLRRRLRKQARAHGKSVPEIHEQLVTYDEEGGGEMDTTSYDVSVLNSVRRGGAKPPRPALDARPSLYAQVQKPPRHAPGAHGGPGEMAAMIEVKKDEADHDGDGPPYDTLHIYGYEGSESIAESLSSLGTDSSDSDVDYDFLNDWGPRFKMLAELYGSDPREELLY

SEQ ID NO: 754396 - protein, 493 aa, Homo sapiens
MTKYSILRGDYQDAFTIETNPAHNEGIIKPMKPLDYEYIQQYSFIVEATDPTIDLRYMSPPAGNRAQVIINITDVDEPPIFQQPFYHFQLKENQKKPLIGTVLAMDPDAARHSIGYSIRRTSDKGQFFRVTKKGDIYNEKELDREVYPWYNLTVEAKELDSTGTPTGKESIVQVHIEVLDENDNAPEFAKPYQPKVCENAVHGQLVLQISAIDKDITPRNVKFKFTLNTENNFTLTDNHDNTANITVKYGQFDREHTKVHFLPVVISDNGMPSRTGTSTLTVAVCKCNEQGEFTFCEDMAAQVGVSIQAVVAILLCILTITVITLLIFLRRRLRKQARAHGKSVPEIHEQLVTYDEEGGGEMDTTSYDVSVLNSVRRGGAKPPRPALDARPSLYAQVQKPPRHAPGAHGGPGEMAAMIEVKKDEADHDGDGPPYDTLHIYGYEGSESIAESLSSLGTDSSDSDVDYDFLNDWGPRFKMLAELYGSDPREELLY

SEQ ID NO: 754397 - protein, 305 aa, Homo sapiens
RRSADRLHRAPLTLRPWTDRQSNGTETSLSPQARSVPPGKMQRLMMLLATSGACLGLLAVAAVAAAGANPAQRDTHSLLPTHRRQKRDWIWNQMHIDEEKNTSLPHHVGKIKSSVSRKNAKYLLKGEYVGKVFRVDAETGDVFAIERLDRENISEYHLTAVIVDKDTGENLETPSSFTIKVHDVNDNWPVFTHRLFNASVPESSAVGTSVISVTAVDADDPTVGDHASVMYQILKGKEYFAIDNSGRIITITKSLDREKQARYEIVVEARDAQGLRGDSGTATVLVTLQDINDNFPFFTQSEPLL

SEQ ID NO: 754398 - protein, 120 aa, Homo sapiens
CEQMQARWGCSRGRGQECPRRGRYRGRDSAGSEREARLRGMALWSGQGHDHRKPGKWKQTGACWSSWSFVWGTGGRRQALHPDLPLPRMRVFSACWMMCCPCSWRKRPPSHPLLPVALTC

SEQ ID NO: 754399 - protein, 120 aa, Homo sapiens; identical to SEQ ID NO: 754398

SEQ ID NO: 754400 - protein, 102 aa, Homo sapiens
TGRAWDQPGAFVYTSMGTINPAGHGPTSLCDRPDRSAIPTASRKATGRGPRWHGFLRPGICSQSRSRQPPLPLCDSVCTYACMCVPVWCGSQGHPWGWDNKR

SEQ ID NO: 754401 - protein, 63 aa, Homo sapiens
RRGAVFAKPPRVWELRASAADFHPAALQKVSSLPSAIPNKETPSQSHLRVEGKLEGWGASLRG

SEQ ID NO: 754402 - protein, 469 aa, Homo sapiens
MGPLTFTDVAIEFSLEEWQCLDTAQQNLYRNVMLENYRNLVFLGIAVSKPDLITCLEKEKEPCKMKRHEMVDEPPVVCSHFAEDFWPEQDIKDSFQKVTLRRYDKRGHENLQLRKGYKTVGDCKLYKGGYNGLNQCLTLTQSKMYHCDIYVKVFYAFSNADRYKTRHTGKKPFQCKKCGKSFCMLSQLTQHKKIHIRENTYRCKEFGNAFNQSSALTNHKRIYVGEKHYRCEECGKAFNHYSTLTNHKRIHSGEKPYKCDECGKTFSISSTFTKHKIIHTEEKPYKCKECGKAFNRSSTLTSHKRIHTGEKPYKCEECGKAFNWSSTLTKHKVIHTGEKPYKCEECGKAFNQSSRLTRHKKIHTGEEPYKFEKCGRVFTCSSTLTQDKKIHTGEKPYNCEECGKVFTYSSTLTRHKRIHTEEKPYKCNECGKAFNRSSHLTSHRRIHTGEKPYKCEECGKAFKQSSNLN

SEQ ID NO: 754403 - protein, 143 aa, Homo sapiens
MGPLTFTDVAIEFSLEEWQCLDTAQQNLYRNVMLENYRNLVFLGIAVSKPDLITCLEKEKEPCKMKRHEMVDEPPVVCSHFAEDFWPEQDIKDSFQKVTLRRYDKRGHENLQLRKGYKTVGDCKLYKGGYNGLNQCLTHSSHL

SEQ ID NO: 754404 - protein, 232 aa, Homo sapiens
TNHKRIYVGEKHYRCEECGKAFNHYSTLTNHKRIHTGEKPYKCKECGKAFSRYSTLTTHKRIHSGEKPYKCDECGKTFSISSTFTKHKIIHTEEKPYKCKECGKAFNRSSTLTSHKRIHTGEKPYKCEECGKAFNWSSTLTKHKVIHTGEKPYKCEECGKAFNQSSRLTRHKKIHTGEEPYKFEKCGRVFTCSSTLTQDKKIHTGEKPYNCEECGKVFTYSSTLTRHKRIHT

SEQ ID NO: 754405 - protein, 210 aa, Homo sapiens
FTLLETQLDPSPSDTMVNSCCGSVCSHQGCGQDLCQETCCRPSCCETTCCRTTYCRPSCCVSSCCRPQCCQSVCCQPTCCRPRCCISSCCRPSCCVSSCCKPQCCQSMCCQPTCCRPRCCISSCCRPSCCVSSCCRPQCCQSVCCQPTCCHPSCSISSCCRPSCCESSCCRPCCCLRPVCGGVSCHTTCYRPTCVISSCPRPLCCASSCC

SEQ ID NO: 754406 - protein, 103 aa, Homo sapiens
EEEGAVPAEHQVAMAAARALGDVTVLGSLLLQHLLHFSTPGLVLRSLGALTGPQLLSLAQSPAGSHVLDAILTSPSVTRKLRRRVLQNLKRDNMWLWPVVAMA

SEQ ID NO: 754407 - protein, 421 aa, Homo sapiens
MVEMLPTAILLVLAVSVVAKDNATCDGPCGLRFRQNPQGGVRIVGGKAAQHGAWPWMVSLQIFTYNSHRYHTCGGSLLNSRWVLTAAHCFVGKNNVHDWRLVFGAKEITYGNNKPVKAPLQERYVEKIIIHEKYNSATEGNDIALVEITPPISCGRFIGPGCLPHFKAGLPRGSQSCWVAGWGYIEEKAPRPSSILMEARVDLIDLDLCNSTQWYNGRVQPTNVCAGYPVGKIDTCQGDSGGPLMCKDSKESAYVVVGITSWGVGCARAKRPGIYTATWPYLNWIASKIGSNALRMIQSATPPPPTTRPPPIRPPFSHPISAHLPWYFQPPPRPLPPRPPAAQPRPPPSPPPPPPPPASPLPPPPPPPPPTPSSTTKLPQGLSFAKRLQQLIEVLKGKTYSDGKNHYDMETTELPELTSTS

SEQ ID NO: 754408 - protein, 212 aa, Homo sapiens
MVEMLPTAILLVLAVSVVAKDNATCDGPCGLRFRQNPQGGVRIVGGKAAQHGAWPWMVSLQIFTYNSHRYHTCGGSLLNSRWVLTAAHCFVGKNNVHDWRLVFGAKEITYGNNKPVKAPLQERYVEKIIIHEKYNSATEGNDIALVEITPPISCGRFIGPGCLPHFKAGLPRGSQSCWVAGWGYIEEKGFLECPAGTSPFKTGVAVALELCP

SEQ ID NO: 754409 - protein, 457 aa, Homo sapiens
MVEMLPTAILLVLAVSVVAKDNATCDGPCGLRFRQNPQGGVRIVGGKAAQHGAWPWMVSLQIFTYNSHRYHTCGGSLLNSRWVLTAAHCFVGKNNVHDWRLVFGAKEITYGNNKPVKAPLQERYVEKIIIHEKYNSATEGNDIALVEITPPISCGRFIGPGCLPHFKAGLPRGSQSCWVAGWGYIEEKAPRPSSILMEARVDLIDLDLCNSTQWYNGRVQPTNVCAGYPVGKIDTCQQETMSLWKLSSQSLPTPLGRGRVAQADSDLCVLLDKGDSGGPLMCKDSKESAYVVVGITSWGVGCARAKRPGIYTATWPYLNWIASKIGSNALRMIQSATPPPPTTRPPPIRPPFSHPISAHLPWYFQPPPRPLPPRPPAAQPRPPPSPPPPPPPPASPLPPPPPPPPPTPSSTTKLPQGLSFAKRLQQLIEVLKGKTYSDGKNHYDMETTELPELTSTS

SEQ ID NO: 754410 - protein, 421 aa, Homo sapiens; identical to SEQ ID NO: 754407

SEQ ID NO: 754411 - protein, 85 aa, Homo sapiens
  misc_feature (54)..(54): Xaa can be any naturally occurring amino acid
  misc_feature (57)..(57): Xaa can be any naturally occurring amino acid
NDVQLQVAVLTQGREVALLGGDSDTEELTQRQPEARGELQASVGLGVQSITETXGPXLLEHFPTHWRAVVPPRTPLRHVSLPGVS

SEQ ID NO: 754412 - protein, 115 aa, Homo sapiens
MSESSKVIHLTSFTDISECLKPQLDRRYAYTEEPRVKTVSDVGALGGSDMENLLQSLYVENRAGFFFTKFCEHSGNKLWKNSVYFWFDLQAYHQLFYQETLQPFKVCKQAQVRSK

SEQ ID NO: 754413 - protein, 1331 aa, Homo sapiens
AEWISDQAGFQRPFLPTSTLNSNLKCKPCTENEQRARNVLRLPVYNVGLGAVSHDFIYSKEIRFEGDNVIFCLVSEPPTITEEEFEDSLATDDFLVDYFNEFLSLPTFSEAIRFNADYGVFEVANDAPQFLEKQLKKILQNQQPRNPIYDVVRKGKNEVKPVQMNAPDEDETINVNYNIMCLSREEGIKWIKKERLPAFLESDCYFEYRLAKLVSQVRWSKSGMNFTVGSNFSPWIVKKPPSLPPPATEEDNLVIMKKFYVSLGEASYTQTKDWFALAKQSQQTVSTFSLPCCVPYNKLKSPAISSVSENFIFDDGVHPRTKKDPSKTNKLISEFEEEEGEEEEVSVSLQDTPSQALLRVYLEKKQDVDESLTMHFSTCEEFLSSYIYFILRGAIQQIVGKPVGETPDYINFNNITKVSFDDCFESIHGKNFLSELVQTTKERSEEIEQTSLSSKNESAGPESRADWCISHRTYDIGNRKEFERFKKFIKGTLGERYWWLWMDIERLKVLKDPGRHQRHLEKMKKCYLVSNGDYYLSAEILSKFKLLDGSQWNEEHLRNIQSEVLKPLLLYWAPRFCVTHSASTKYASAELKFWHLRQAKPRKDIDPFPQMATLLPLRPKSCIPQIPEIQKEEFSLSQPPKSPNKSPEVKTATQKPWKRELLYPGSSKDDVIEKGSKYMSESSKVIHLTSFTDISECLKPQLDRRYAYTEEPRVKTVSDVGALGGSDMENLLQSLYVENRAGFFFTKFCEHSGNKLWKNSVYFWFDLQAYHQLFYQETLQPFKVCKQAQYLFATYVAPSATLDIGLQQEKKKEIYMKIQPPFEDLFDTAEEYILLLLLEPWTKMVKSDQIAYKKVELVEETRQLDSTYFRKLQALHKETFSKKAEDTTCEIGTGILSLSNVSKRTEYWDNVPAEYKHFKFSDLLNNKLEFEHFRQFLETHSSSMDLMCWTDIEQFRRITYRDRNQRKAKSIYIKNKYLNKKYFFGPNSPASLYQQNQVMHLSGGWGKILHEQLDAPVLVEIQKHVQNRLENVWLPLFLASEQFAARQKIKVQMKDIAEELLLQKAEKKIGVWKPVESKWISSSCKIIAFRKALLNPVTSRQFQRFVALKGDLLENGLLFWQEVQKYKDLCHSHCDESVIQKKITTIINCFINSSIPPALQIDIPVEQAQKIIEHRKELGPYVFREAQMTIFGVLFKFWPQFCEFRKNLTDENIMSVLERRQEYNKQKKKLAVLEDEKSGKDGIKQYANTSVPAIKTALLSDSFLGLQPYGRQPTWCYSKYIEALEQERILLKIQEELEKKLFAGLQPLTNFKASSSTMSLKKNMSAHSSQK

SEQ ID NO: 754414 - protein, 1264 aa, Homo sapiens
MPEKRLTAEPPTITEEEFEDSLATDDFLVDYFNEFLSLPTFSEAIRFNADYGVFEVANDAPQFLEKQLKKILQNQQPRNPIYDVVRKGKNEVKPVQMNAPDEDETINVNYNIMCLSREEGIKWIKKERLPAFLESDCYFEYRLAKLVSQVRWSKSGMNFTVGSNFSPWIVKKPPSLPPPATEEDNLVIMKKFYVSLGEASYTQTKDWFALAKQSQQTVSTFSLPCCVPYNKLKSPAISSVSENFIFDDGVHPRTKKDPSKTNKLISEFEEEEGEEEEVSVSLQDTPSQALLRVYLEKKQDVDESLTMHFSTCEEFLSSYIYFILRGAIQQIVGKPVGETPDYINFNNITKVSFDDCFESIHGKNFLSELVQTTKERSEEIEQTSLSSKNESAGPESRADWCISHRTYDIGNRKEFERFKKFIKGTLGERYWWLWMDIERLKVLKDPGRHQRHLEKMKKCYLVSNGDYYLSAEILSKFKLLDGSQWNEEHLRNIQSEVLKPLLLYWAPRFCVTHSASTKYASAELKFWHLRQAKPRKDIDPFPQMATLLPLRPKSCIPQIPEIQKEEFSLSQPPKSPNKSPEVKTATQKPWKRELLYPGSSKDDVIEKGSKYMSESSKVIHLTSFTDISECLKPQLDRRYAYTEEPRVKTVSDVGALGGSDMENLLQSLYVENRAGFFFTKFCEHSGNKLWKNSVYFWFDLQAYHQLFYQETLQPFKVCKQAQYLFATYVAPSATLDIGLQQEKKKEIYMKIQPPFEDLFDTAEEYILLLLLEPWTKMVKSDQIAYKKVELVEETRQLDSTYFRKLQALHKETFSKKAEDTTCEIGTGILSLSNVSKRTEYWDNVPAEYKHFKFSDLLNNKLEFEHFRQFLETHSSSMDLMCWTDIEQFRRITYRDRNQRKAKSIYIKNKYLNKKYFFGPNSPASLYQQNQVMHLSGGWGKILHEQLDAPVLVEIQKHVQNRLENVWLPLFLASEQFAARQKIKVQMKDIAEELLLQKAEKKIGVWKPVESKWISSSCKIIAFRKALLNPVTSRQFQRFVALKGDLLENGLLFWQEVQKYKDLCHSHCDESVIQKKITTIINCFINSSIPPALQIDIPVEQAQKIIEHRKELGPYVFREAQMTIFGVLFKFWPQFCEFRKNLTDENIMSVLERRQEYNKQKKKLAVLEDEKSGKDGIKQYANTSVPAIKTALLSDSFLGLQPYGRQPTWCYSKYIEALEQERILLKIQEELEKKLFAGLQPLTNFKASSSTMSLKKNMSAHSSQK

SEQ ID NO: 754415 - protein, 579 aa, Homo sapiens
MDCGARGVEGAMETWQEDSLATDDFLVDYFNEFLSLPYLFATYVAPSATLDIGLQQEKKKEIYMKIQPPFEDLFDTAEEYILLLLLEPWTKMVKSDQIAYKKVELVEETRQLDSTYFRKLQALHKETFSKKAEDTTCEIGTGILSLSNVSKRTEYWDNVPAEYKHFKFSDLLNNKLEFEHFRQFLETHSSSMDLMCWTDIEQFRRITYRDRNQRKAKSIYIKNKYLNKKYFFGPNSPASLYQQNQVMHLSGGWGKILHEQLDAPVLVEIQKHVQNRLENVWLPLFLASEQFAARQKIKVQMKDIAEELLLQKAEKKIGVWKPVESKWISSSCKIIAFRKALLNPVTSRQFQRFVALKGDLLENGLLFWQEVQKYKDLCHSHCDESVIQKKITTIINCFINSSIPPALQIDIPVEQAQKIIEHRKELGPYVFREAQMTIFGVLFKFWPQFCEFRKNLTDENIMSVLERRQEYNKQKKKLAVLEDEKSGKDGIKQYANTSVPAIKTALLSDSFLGLQPYGRQPTWCYSKYIEALEQERILLKIQEELEKKLFAGLQPLTNFKASSSTMSLKKNMSAHSSQK

SEQ ID NO: 754416 - protein, 1252 aa, Homo sapiens
MPEKRLTAEPPTITEEEFEDSLATDDFLVDYFNEFLSLPTFSEAIRFNADYGVFEVANDAPQFLEKQLKKILQNQQPRNPIYDVVRKGKNEVKPVQMNAPDEDETINVNYNIMCLSREEGIKWIKKERLPAFLESDCYFEYRLAKLVSQVRWSKSGMNFTVGSNFSPWIVKKPPSLPPPATEEDNLASYTQTKDWFALAKQSQQTVSTFSLPCCVPYNKLKSPAISSVSENFIFDDGVHPRTKKDPSKTNKLISEFEEEEGEEEEVSVSLQDTPSQALLRVYLEKKQDVDESLTMHFSTCEEFLSSYIYFILRGAIQQIVGKPVGETPDYINFNNITKVSFDDCFESIHGKNFLSELVQTTKERSEEIEQTSLSSKNESAGPESRADWCISHRTYDIGNRKEFERFKKFIKGTLGERYWWLWMDIERLKVLKDPGRHQRHLEKMKKCYLVSNGDYYLSAEILSKFKLLDGSQWNEEHLRNIQSEVLKPLLLYWAPRFCVTHSASTKYASAELKFWHLRQAKPRKDIDPFPQMATLLPLRPKSCIPQIPEIQKEEFSLSQPPKSPNKSPEVKTATQKPWKRELLYPGSSKDDVIEKGSKYMSESSKVIHLTSFTDISECLKPQLDRRYAYTEEPRVKTVSDVGALGGSDMENLLQSLYVENRAGFFFTKFCEHSGNKLWKNSVYFWFDLQAYHQLFYQETLQPFKVCKQAQYLFATYVAPSATLDIGLQQEKKKEIYMKIQPPFEDLFDTAEEYILLLLLEPWTKMVKSDQIAYKKVELVEETRQLDSTYFRKLQALHKETFSKKAEDTTCEIGTGILSLSNVSKRTEYWDNVPAEYKHFKFSDLLNNKLEFEHFRQFLETHSSSMDLMCWTDIEQFRRITYRDRNQRKAKSIYIKNKYLNKKYFFGPNSPASLYQQNQVMHLSGGWGKILHEQLDAPVLVEIQKHVQNRLENVWLPLFLASEQFAARQKIKVQMKDIAEELLLQKAEKKIGVWKPVESKWISSSCKIIAFRKALLNPVTSRQFQRFVALKGDLLENGLLFWQEVQKYKDLCHSHCDESVIQKKITTIINCFINSSIPPALQIDIPVEQAQKIIEHRKELGPYVFREAQMTIFGVLFKFWPQFCEFRKNLTDENIMSVLERRQEYNKQKKKLAVLEDEKSGKDGIKQYANTSVPAIKTALLSDSFLGLQPYGRQPTWCYSKYIEALEQERILLKIQEELEKKLFAGLQPLTNFKASSSTMSLKKNMSAHSSQK

SEQ ID NO: 754417 - protein, 104 aa, Homo sapiens
MNAPDEDETINVNYNIMCLIVTQGITRGSHPHTHFQHFCETVIVTLTYSVTPHGSHTVRHWSQVRPAISTRTDQHFFSPDSVHKTRIPVLSKASLAQLATHRKL

SEQ ID NO: 754418 - protein, 1283 aa, Homo sapiens
AEWISDQAGFQRPFLPTSTLNSNLKCKPCTENEQRARNVLRLPVYNVGLGAVSHDFIYSKEIRFEGDNVIFCLVSEPPTITEEEFEDSLATDDFLVDYFNEFLSLPLGLWTHYGNKIDTPKLLLPFQEQALSNTTGYSRSSCLTFSEAIRFNADYGVFEVANDAPQFLEKQLKKILQNQQPRNPIYDVVRKGKNEVKPVQMNAPDEDETINVNYNIMASYTQTKDWFALAKQSQQTVSTFSLPCCVPYNKLKSPAISSVSENFIFDDGVHPRTKKDPSKTNKLISEFEEEEGEEEEVSVSLQDTPSQALLRVYLEKKQDVDESLTMHFSTCEEFLSSYIYFILRGAIQQIVGKPVGETPDYINFNNITKVSFDDCFESIHGKNFLSELVQTTKERSEEIEQTSLSSKNESAGPESRADWCISHRTYDIGNRKEFERFKKFIKGTLGERYWWLWMDIERLKVLKDPGRHQRHLEKMKKCYLVSNGDYYLSAEILSKFKLLDGSQWNEEHLRNIQSEVLKPLLLYWAPRFCVTHSASTKYASAELKFWHLRQAKPRKDIDPFPQMATLLPLRPKSCIPQIPEIQKEEFSLSQPPKSPNKSPEVKTATQKPWKRELLYPGSSKDDVIEKGSKYMSESSKVIHLTSFTDISECLKPQLDRRYAYTEEPRVKTVSDVGALGGSDMENLLQSLYVENRAGFFFTKFCEHSGNKLWKNSVYFWFDLQAYHQLFYQETLQPFKVCKQAQYLFATYVAPSATLDIGLQQEKKKEIYMKIQPPFEDLFDTAEEYILLLLLEPWTKMVKSDQIAYKKVELVEETRQLDSTYFRKLQALHKETFSKKAEDTTCEIGTGILSLSNVSKRTEYWDNVPAEYKHFKFSDLLNNKLEFEHFRQFLETHSSSMDLMCWTDIEQFRRITYRDRNQRKAKSIYIKNKYLNKKYFFGPNSPASLYQQNQVMHLSGGWGKILHEQLDAPVLVEIQKHVQNRLENVWLPLFLASEQFAARQKIKVQMKDIAEELLLQKAEKKIGVWKPVESKWISSSCKIIAFRKALLNPVTSRQFQRFVALKGDLLENGLLFWQEVQKYKDLCHSHCDESVIQKKITTIINCFINSSIPPALQIDIPVEQAQKIIEHRKELGPYVFREAQMTIFGVLFKFWPQFCEFRKNLTDENIMSVLERRQEYNKQKKKLAVLEDEKSGKDGIKQYANTSVPAIKTALLSDSFLGLQPYGRQPTWCYSKYIEALEQERILLKIQEELEKKLFAGLQPLTNFKASSSTMSLKKNMSAHSSQK

SEQ ID NO: 754419 - protein, 71 aa, Homo sapiens
CWGLFGHVKLCLVHSHIRKPLHGGPSQPEPHTWHRRLSQMGTRGASNAPHVLACVRFSWRNFTRCVLVEWG

SEQ ID NO: 754420 - protein, 484 aa, Homo sapiens
RLVLARVVMMTGLGRDVGAGARRAARCRAEAAAAVGTARSPALGMALLVLGLVSCTFFLAVNGLYSSSDDVIELTPSNFNREVIQSDSLWLVEFYAPWCGHCQRLTPEWKKAATALKDVVKVGAVDADKHHSLGGQYGVQGFPTIKIFGSNKNRPEDYQGGRTGEAIVDAALSALRQLVKDRLGGRSGGYSSGKQGRSDSSSKKDVIELTDDSFDKNVLDSEDVWMVEFYAPWCGHCKNLEPEWAAAASEVKEQTKGRVKLAAVDATVNQVLASRYGIRGFPTIKIFQKGESPVDYDGGRTRSDIVSRALDLFSDNAPPPELLEIINEDIAKRTCEEHQLCVVAVLPHILDTGAAGRNSYLEVLLKLADKYKKKMWGWLWTEAGAQSELETALGIGGFGYPAMAAINARKMKFALLKGSFSEQGINEFLRELSFGRGSTAPVGGGAFPTIVEREPWDGRDGELPVEDDIDLSDVELDDLGKDEL

SEQ ID NO: 754421 - protein, 645 aa, Homo sapiens
AEDCGKTFRCTCGCPYASRTALQSHIYRTGHEIPAEHRDPPSKKRKMENCAQNQKLSNKTIESLNNQPIPRPDTQELEASEIKLEPSFEDSCGSNTDKQTLTTPPRYPQKLLLPKPKVALVKLPVMQFSVMPVFVPTADSSAQPVVLGVDQGSATGAVHLMSLSVGTLILGLDSEACSLKESLPLFKIRAEAAAAVGTARSPALGMALLVLGLVSCTFFLAVNGLYSSSDDVIELTPSNFNREVIQSDSLWLVEFYAPWCGHCQRLTPEWKKAATALKDVVKVGAVDADKHHSLGGQYGVQGFPTIKIFGSNKNRPEDYQGGRTGEAIVDAALSALRQLVKDRLGGRSGGYSSGKQGRSDSSSKKDVIELTDDSFDKNVLDSEDVWMVEFYAPWCGHCKNLEPEWAAAASEVKEQTKGRVKLAAVDATVNQVLASRYGIRGFPTIKIFQKGESPVDYDGGRTRSDIVSRALDLFSDNAPPPELLEIINEDIAKRTCEEHQLCVVAVLPHILDTGAAGRNSYLEVLLKLADKYKKKMWGWLWTEAGAQSELETALGIGGFGYPAMAAINARKMKFALLKGSFSEQGINEFLRELSFGRGSTAPVGGGAFPTIVEREPWDGRDGELPVEDDIDLSDVELDDLGKDEL

SEQ ID NO: 754422 - protein, 246 aa, Homo sapiens
AASGPPPRGRPSDHRTGLGRDVGAGARRAARCRAEAAAAVGTARSPALGMALLVLGLVSCTFFLAVNGLYSSSDDVIELTPSNFNREVIQSDSLWLVEFYAPWCGHCQRLTPEWKKAATALKDVVKVGAVDADKHHSLGGQYGVQGFPTIKIFGSNKNRPEDYQGGRTGEAIVDAALSALRQLVKDRLGGRSGGYSSGKQGRSDSSSKKDVIELTDDSFDKNVLDSEDVWMVEFYAPWCGHCTQEQ

SEQ ID NO: 754423 - protein, 403 aa, Homo sapiens
LRIKGFNGCFVLSSPKRCGHCQRLTPEWKKAATALKDVVKVGAVDADKHHSLGGQYGVQGFPTIKIFGSNKNRPEDYQGGRTGEAIVDAALSALRQLVKDRLGGRSGGYSSGKQGRSDSSSKKDVIELTDDSFDKNVLDSEDVWMVEFYAPWCGHCKNLEPEWAAAASEVKEQTKGRVKLAAVDATVNQVLASRYGIRGFPTIKIFQKGESPVDYDGGRTRSDIVSRALDLFSDNAPPPELLEIINEDIAKRTCEEHQLCVVAVLPHILDTGAAGRNSYLEVLLKLADKYKKKMWGWLWTEAGAQSELETALGIGGFGYPAMAAINARKMKFALLKGSFSEQGINEFLRELSFGRGSTAPVGGGAFPTIVEREPWDGRDGELPVEDDIDLSDVELDDLGKDEL

SEQ ID NO: 754424 - protein, 489 aa, Homo sapiens
AASGPPPRGRPSDHRTGLGRDVGAGARRAARCRAEAAAAVGTARSPALGMALLVLGLVSCTFFLAVNGLYSSSDDVIELTPSNFNREVIQSDSLWLVEFYAPWCGHCQRLTPEWKKAATALKDVVKVGAVDADKHHSLGGQYGVQGFPTIKIFGSNKNRPEDYQGGRTGEAIVDAALSALRQLVKDRLGGRSGGYSSGKQGRSDSSSKKDVIELTDDSFDKNVLDSEDVWMVEFYAPWCGHCKNLEPEWAAAASEVKEQTKGRVKLAAVDATVNQVLASRYGIRGFPTIKIFQKGESPVDYDGGRTRSDIVSRALDLFSDNAPPPELLEIINEDIAKRTCEEHQLCVVAVLPHILDTGAAGRNSYLEVLLKLADKYKKKMWGWLWTEAGAQSELETALGIGGFGYPAMAAINARKMKFALLKGSFSEQGINEFLRELSFGRGSTAPVGGGAFPTIVEREPWDGRDGELPVEDDIDLSDVELDDLGKDEL

SEQ ID NO: 754425 - protein, 489 aa, Homo sapiens; identical to SEQ ID NO: 754424

SEQ ID NO: 754426 - protein, 259 aa, Homo sapiens
MVEFYAPWCGHCKNLEPEWAAAASEVKEQTKGRVKLAAVDATVNQVLASRYGIRGFPTIKIFQKGESPVDYDGGRTRSDIVSRALDLFSDNAPPPELLEIINEDIAKRTCEEHQLCVVAVLPHILDTGAAGRNSYLEVLLKLADKYKKKMWGWLWTEAGAQSELETALGIGGFGYPAMAAINARKMKFALLKGSFSEQGINEFLRELSFGRGSTAPVGGGAFPTIVEREPWDGRDGELPVEDDIDLSDVELDDLGKDEL

SEQ ID NO: 754427 - protein, 2990 aa, Homo sapiens
MAAQSSLYNDDRNLLRIREKERRNQEAHQEKEAFPEKIPLFGEPYKTAKGDELSSRIQNMLGNYEEVKEFLSTKSHTHRLDASENRLGKPKYPLIPDKGSSIPSSSFHTSVHHQSIHTPASGPLSVGNISHNPKMAQPRTEPMPSLHAKSCGPPDSQHLTQDRLGQEGFGSSHHKKGDRRADGDHCASVTDSAPERELSPLISLPSPVPPLSPIHSNQQTLPRTQGSSKVHGSSNNSKGYCPAKSPKDLAVKVHDKETPQDSLVAPAQPPSQTFPPPSLPSKSVAMQQKPTAYVRPMDGQDQAPSESPELKPLPEDYRQQTFEKTDLKVPAKAKLTKLKMPSQSVEQTYSNEVHCVEEILKEMTHSWPPPLTAIHTPSTAEPSKFPFPTKDSQHVSSVTQNQKQYDTSSKTHSNSQQGTSSMLEDDLQLSDSEDSDSEQTPEKPPSSSAPPSAPQSLPEPVASAHSSSAESESTSDSDSSSDSESESSSSDSEENEPLETPAPEPEPPTTNKWQLDNWLTKVSQPAAPPEGPRSTEPPRRHPESKGSSDSATSQEHSESKDPPPKSSSKAPRAPPEAPHPGKRSCQKSPAQQEPPQRQTVGTKQPKKPVKASARAGSRTSLQGEREPGLLPYGSRDQTSKDKPKVKTKGRPRAAASNEPKPAVPPSSEKKKHKSSLPAPSKALSGPEPAKDNVEDRTPEHFALVPLTESQGPPHSGSGSRTSGCRQAVVVQEDSRKDRLPLPLRDTKLLSPLRDTPPPQSLMVKITLDLLSRIPQPPGKGSRQRKAEDKQPPAGKKHSSEKRSSDSSSKLAKKRKGEAERDCDNKKIRLEKEIKSQSSSSSSSHKESSKTKPSRPSSQSSKKEMLPPPPVSSSSQKPAKPALKRSRREADTCGQDPPKSASSTKSNHKDSSIPKQRRVEGKGSRSSSEHKGSSGDTANPFPVPSLPNGNSKPGKPQVKFDKQQADLHMREAKKMKQKAELMTDRVGKAFKYLEAVLSFIECGIATESESQSSKSAYSVYSETVDLIKFIMSLKSFSDATAPTQEKIFAVLCMRCQSILNMAMFRCKKDIAIKYSRTLNKHFESSSKVAQAPSPCIASTGTPSPLSPMPSPASSVGSQSSAGSVGSSGVAATISTPVTIQNMTSSYVTITSHVLTAFDLWEQAEALTRKNKEFFARLSTNVCTLALNSSLVDLVHYTRQGFQQLQELTKTPEWSPRLIQCLGNYFCTLEASKTVQTFVSSGHQTLKKKHHEMARTFVHLNSQQQCDHWLDTVVYAEAEMRRLAPEMILPFLTKGQKCNLALNGCMNGLETFLFFFKTSRIQVANEMRRNSFNSESEFHVISVATLVHSQKEIFFFNNDFVVKGFVDDFFSFEFWEKYLFNNFYMAICKPEVMKDSTVPHFLPMNSGLIIPSIVVIYKIEGNPRSCRPQSPHCLERCTLTPALTSHYCAESQPTSEREEEPQHMGCHLEVCTGGLGAAISYPCHFPPLLQRKGLSNRAVTVDSILNFLPWGRREPTFIPDQMAKVLLKFCLRELEFEVLICGLQLCGNSCCPANSEFLSVNKKHEICFLEEAIFFCYKYFIFIAKLDFQSLDCLGEVNSLRGCRDLGWLIRLLKNSSPHAFTPECSQLDLIWLRRNCGPPEVIAIVYALNQVHFEMTYNEVTQSEIPCAHKHRFFFFIETLKVIIGNITLSAVFLKANSFLSLLEVEFAHFTTIEECHLYNFFSAFVPFCPWTCFLPSMFHIFLLVEEGEPYLFIMKTSKIPMMNAGTLLVVCKYTKGCVEGWERCLSLTVCVVCVRLFLQFFSRLFFGCHLSQRSGPSCLGESQRMTAVVISEHKTLMCDFLMTGFIYSCNKAKALVLFKLLVLKTCVEMNSNCLVEFGVCVALCVHLLYVKDKAPESGFISILKMLFNIFLFFLTPLAIPSPFVLSFPRTSHLSIVKGCVLYGRFYADCARACACSVGKPQCSLDRRHFQVDFSASSKTDCFFSGLTLCGFFFFSELDIKILFVPGKSNKCAEINLYYFGHWIFLILIALYLKESNYMVTFLIEYVKGVADESLTFIGSFCCYGCIERSEGFLKGFALFHCMLTIPKGKICTEVDHLKGLDYKIKPYSMESSYNNNSTHFRVRQMQSILRSENRVYILPLALQGVCVCVCCVSLVGNGRTLFYFLKCLMFLSFLWIIEFKSPAEIMKKHFTKIYQIILGSDCENIGHLVAVVRSGRAQQAFIRNRITIGGEFGCLILGFDYNTEWEKYLIFCNKKTFILSVLTKICSYFPYTDWTALISLVLYPLISGLRMFRKLKPPTPFWLKIALFGILHINVTSIRSLLFYYDSSSVIFRSKKKAIVSSTINKTYLWYTKGYKYIHLNREKEVDGIVPLSEPSFEIPLCLFRHGFRDATWLLHLLLLCFMKFELYLCILNRLRLEAGLSGFFVFCFVLFCFVFLYLNLLASYHRFFIFPNTTKKLLKLCHFICLHSLPLISSIYILQEYFVLSLETQEYRFFSLKSESYALQPWRDARINYGSTFFPLLFLSQLSLLFWVPLRINGCKVFSCAFILCHSIGRRCNGRIASCWGFSFKHCKWYCHHVNLKYAIQLCWFLGDLECSSLHEIVSTDHVLQFLIMVSGQIPTTAFLQVAINFLLSGGNDIIFCSTERQRSAGTVLGREVPILLYLRGQEGNPTAPCEPDILVYRPGEDKGIRPLIVRLAKLHWSDQAVADLRKQLALLKSRFFKQCLTQAAFTFVQAIDMYVLKLLHIPLRYQVYTVHVGVVCVYVCMYARMCPKSCFNFFFLNVIMFWIIPEQGCLFFIYYHYILYYIIYFLLSYNFGGKSNLGIIKIVLKRSKFSSLINENHWPMFNKFFFNYCGINVPAIINTMILYIGREAVMLSMGRCATQIKGNSMYFTYFSNGTATWGFVNENLAALYSRLKEYVICERIIVFFRRKICKRSFQRQCATDLLFSVMRINCCLNKNVIDSSLNSFLFIRGSSCKKTKKLIKISRN

SEQ ID NO: 754428 - protein, 192 aa, Homo sapiens
MGTWILFACLVGAAFAMPLPPHPGHPGYINFSYEVLTPLKWYQSMIRPPYSSYGYEPMGGWLHHQIIPVVSQQHPLTHTLQSHHHIPVVPAQQPRVRQQALMPVPGQQSMTPTQHHQPNLPLPAQQPFQPQPVQPQPHQPMQPQPPVQPMQPLLPQPPLPPMFPLRPLPPILPDLHLEAWPATDKTKQEEVD

SEQ ID NO: 754429 - protein, 597 aa, Homo sapiens
MFPVAPKPQDSSQPSDRLMTEKQQEEAEWESINVLLMMHGLKPLSLVKRTDLKDLIIFDKQSSQRMRQNLKLLVEETSCQQNMIQELIETNQQLRNELQLEQSRAANQEQRANDLEQIMESVKSKIGELEDESLNRACHQQNKIKDLQKEQKTLQVKCQHYKKKRTEQEETIASLQMEVCRLKKEEEDRIVTQNRVFAYLCKRVPHTVLDRQLLCLIDYYESKIRKIHTQRQYKEDESQSEEENDYRNLDASPTYKGLLMSLQNQLKESKSKIDALSSEKLNLQKDLETRPTQHELRLYKQQVKKLEKALKKNVKLQELINHKKAEDTEKKDEPSKYNQQQALIDQRYFQVLCSINSIIHNPRAPVIIYKQTKGGVQNFNKDLVQDCGFEHLVPVIEMWADQLTSLKDLYKSLKTLSAELVPWLNLKKQDENEGIKVEDLLFIVDTMLEEVENKEKDSNMPHFQTLQAIVPHFQKLFGVPSLNGVYPRMNEVYTRLGEMNNAVRNLQELLELDSSSSLCVLVSTVGKLCRLINEDVNEQVMQVLGPEDLQSIIYKLEEHEEFFPAFQAFTNDLLEILEIDDLDAIVPAVKKLKVLSY

SEQ ID NO: 754430 - protein, 547 aa, Homo sapiens
MFPVAPKPQDSSQPSDRLMTEKQQEEAEWESINVLLMMHGLKPLSLVKRTDLKDLIIFDKQSSQRMRQNLKLLVEETSCQQNMIQELIETNQQLRNELQLEQSRAANQEQRANDLEQIMESVKSKIGELEDESLNRACHQQNKIKDLQKEQKTLQVKCQHYKKKRTEQEETIASLQMEVCRLKKEEEDRIVTQNRVFAYLCKRVPHTVLDRQFATLIDYVARFMQYKEDESQSEEENDYRNLDASPTYKGLLMSLQNQLKESKSKIDALSSEKLNLQKDLETRPTQHELRLYKQQVKKLEKALKKNVKLQELINHKKAEDTEKKDEPSKYNQQQALIDQRYFQVLCSINSIIHNPRAPVIIYKQTKGGVQNFNKDLVQDCGFEHLVPVIEMWADQLTSLKDLYKSLKTLSAELVPWLNLKKQDENEGIKVEDLLFIVDTMLEEVENKEKDSNMPHFQTLQAIVPHFQKLFGVPSLNGVYPRMNEVYTRLGEMNNAVRNLQELLELDSSSSLCVLVSTVGKLCRLINEDVNEQVMQVLGPEDLQRYLF

SEQ ID NO: 754431 - protein, 617 aa, Homo sapiens
MFPVAPKPQDSSQPSDRLMTEKQQEEAEWESINVLLMMHGLKPLSLVKRTDLKDLIIFDKQSSQRMRQNLKLLVEETSCQQNMIQELIETNQQLRNELQLEQSRAANQEQRANDLEQIMESVKSKIGELEDESLNRACHQQNKIKDLQKEQKTLQVKCQHYKKKRTEQEETIASLQMEVCRLKKEEEDRIVTQNRVFAYLCKRVPHTVLDRQLLCLIDYYESKIRKIHTQRQYKEDESQSEEENDYRNLDASPTYKGLLMSLQNQLKESKSKIDALSSEKLNLQKDLETRPTQHELRLYKQQVKKLEKALKKNVKLQELINHKKAEDTEKKDEPSKYNQQQALIDQRYFQVLCSINSIIHNPRAPVIIYKQTKGGVQNFNKDLVQDCGFEHLVPVIEMWADQLTSLKSLEEKENTLIVSPKKGFAMVDLYKSLKTLSAELVPWLNLKKQDENEGIKVEDLLFIVDTMLEEVENKEKDSNMPHFQTLQAIVPHFQKLFGVPSLNGVYPRMNEVYTRLGEMNNAVRNLQELLELDSSSSLCVLVSTVGKLCRLINEDVNEQVMQVLGPEDLQSIIYKLEEHEEFFPAFQAFTNDLLEILEIDDLDAIVPAVKKLKVLSY

SEQ ID NO: 754432 - protein, 610 aa, Homo sapiens
MFPVAPKPQDSSQPSDRLMTEKQQEEAEWESINVLLMMHGLKPLSLVKRTDLKDLIIFDKQSSQRMRQNLKLLVEETSCQQNMIQELIETNQQLRNELQLEQSRAANQEQRANDLEQIMESVKSKIGELEDESLNRACHQQNKIKDLQKEQKTLQVKCQHYKKKRTEQEETIASLQMEVCRLKKEEEDRIVTQNRVFAYLCKRVPHTVLDRQFATLIDYVARFMQYKEDESQSEEENDYRNLDASPTYKGLLMSLQNQLKESKSKIDALSSEKLNLQKDLETRPTQHELRLYKQQVKKLEKALKKNVKLQELINHKKAEDTEKKDEPSKYNQQQALIDQRYFQVLCSINSIIHNPRAPVIIYKQTKGGVQNFNKDLVQDCGFEHLVPVIEMWADQLTSLKSLEEKENTLIVSPKKGFAMVDLYKSLKTLSAELVPWLNLKKQDENEGIKVEDLLFIVDTMLEEVENKEKDSNMPHFQTLQAIVPHFQKLFGVPSLNGVYPRMNEVYTRLGEMNNAVRNLQELLELDSSSSLCVLVSTVGKLCRLINEDVNEQVMQVLGPEDLQSIIYKLEEHEEFFPAFQAFTNDLLEILEIDDLDAIVPAVKKLKVLSY

SEQ ID NO: 754433 - protein, 597 aa, Homo sapiens
MTEQEEAEWESINVLLMMHGLKPLSLVKRTDLKDLIIFDKQSSQRMRQNLKLLVEETSCQQNMIQELIETNQQLRNELQLEQSRAANQEQRANDLEQIMESVKSKIGELEDESLNRACHQQNKIKDLQKEQKTLQVKCQHYKKKRTEQEETIASLQMEVCRLKKEEEDRIVTQNRVFAYLCKRVPHTVLDRQLLCLIDYYESKIRKIHTQRQYKEDESQSEEENDYRNLDASPTYKGLLMSLQNQLKESKSKIDALSSEKLNLQKDLETRPTQHELRLYKQQVKKLEKALKKNVKLQELINHKKAEDTEKKDEPSKYNQQQALIDQRYFQVLCSINSIIHNPRAPVIIYKQTKGGVQNFNKDLVQDCGFEHLVPVIEMWADQLTSLKSLEEKENTLIVSPKKGFAMVDLYKSLKTLSAELVPWLNLKKQDENEGIKVEDLLFIVDTMLEEVENKEKDSNMPHFQTLQAIVPHFQKLFGVPSLNGVYPRMNEVYTRLGEMNNAVRNLQELLELDSSSSLCVLVSTVGKLCRLINEDVNEQVMQVLGPEDLQSIIYKLEEHEEFFPAFQAFTNDLLEILEIDDLDAIVPAVKKLKVLSY

SEQ ID NO: 754434 - protein, 597 aa, Homo sapiens; identical to SEQ ID NO: 754429

SEQ ID NO: 754435 - protein, 617 aa, Homo sapiens; identical to SEQ ID NO: 754431

SEQ ID NO: 754436 - protein, 114 aa, Homo sapiens
MGHLCIPTTHRHFYYPPSGCQCINDSRIRRNQRSLLSPSHNQCRRVPRNKSRNPSIWVKTANLPSVTVHEVPLSPTYFGLTPSSFPFPVCRVAFLGLRQYAKRPKVRPWLKHCG

SEQ ID NO: 754437 - protein, 119 aa, Homo sapiens
HVYHLDSTTNILLYLLYHIPVHAAILCPSLAHLFLGVFQSQLQTSAYFPLTYFRIHVNQRAMLFVVLFFLFEAKFAFDEAHRSLAYYLMSLGTCTHLCNSQPYQDRKMPGMVAHACNSS

SEQ ID NO: 754438 - protein, 85 aa, Homo sapiens
AAAPPNAPGGPPGPQPAPSAAAPPPPAHALGGMDAELIDEEALTSLELELGLHRVRELPELFLGQSEFDCFSDLGSAPPAGSVSC

SEQ ID NO: 754439 - protein, 71 aa, Homo sapiens
  misc_feature (1)..(1): Xaa can be any naturally occurring amino acid
  misc_feature (6)..(6): Xaa can be any naturally occurring amino acid
  misc_feature (13)..(14): Xaa can be any naturally occurring amino acid
XQSRPXKRLTIGXXNSRPRRLGPARALREGGGGGCVRRARHRTGTLASLQALPPAGGQFGFTSLTPASAVK

SEQ ID NO: 754440 - protein, 122 aa, Homo sapiens
EHPYQFLLKYAKQLKGDKNKIQKLVQMAWTFVNDSLCTTLSLQWEPEIIAVAVMYLAGRLCKFEIQEWTSKPMYRRWWEQFVQDVPVDVLEDICHQILDLYSQGKQQMPHHTPHQLQTATIS

SEQ ID NO: 754441 - protein, 85 aa, Homo sapiens; identical to SEQ ID NO: 754438

SEQ ID NO: 754442 - protein, 136 aa, Homo sapiens
SFISFSFSCIYLIFISFSRPKSVLVYHCTSGNLNPCNRGKMGFQVLATFEIPIPFERALTRPYADFTTSNFRTQYWNAISQQAPAIIYDFYLWLTGRKPRQGQDGSKSNQPPLQPATSCWQDLFLHPVKSQGGTRA

SEQ ID NO: 754443 - protein, 168 aa, Homo sapiens
SFISFSFSCIYLIFISFSRPKSVLVYHCTSGNLNPCNRGKMGFQVLATFEIPIPFERALTRPYADFTTSNFRTQYWNAISQQAPAIIYDFYLWLTGRKPSFSQNLRSCYGKHTRSHVLKREHAHHRPRTFNLSIPRISKPGVSSLTCGKFVHLIMNQSAFHCVKIKSR

SEQ ID NO: 754444 - protein, 100 aa, Homo sapiens
SFISFSFSCIYLIFISFSRPKSVLVYHCTSGNLNPCNRGKMGFQVLATFEIPIPFERALTRPYADFTTSNFRTQYWNAISQQAPAIIYDFYLWLTGRKPR

SEQ ID NO: 754445 - protein, 75 aa, Homo sapiens
KHTRELEEQVLGHLLLPDLLCAAFVLEESGKRLKKTRKYDIITTPAERVEMAPLNEEDDEDEDSTVFDIKYRPEW

SEQ ID NO: 754446 - protein, 188 aa, Homo sapiens
RRIPRCRPPCWCGSWSSAARALPDPVPTHRTMRAVPLPAPLLPLLLLALLAAPAARASRAESVSAPRPEPERESRPPPGPGPGNTTRFGSGAAGGSGSSNSSGDALVTRISILLRDLPTLKAAVIVAFAFTTLLIACLLLRVFRSGKRLKKTRKYDIITTPAERVEMAPLNEEDDEDEDSTVFDIKYR

SEQ ID NO: 754447 - protein, 188 aa, Homo sapiens; identical to SEQ ID NO: 754446

SEQ ID NO: 754448 - protein, 188 aa, Homo sapiens; identical to SEQ ID NO: 754446

SEQ ID NO: 754449 - protein, 188 aa, Homo sapiens; identical to SEQ ID NO: 754446

SEQ ID NO: 754450 - protein, 188 aa, Homo sapiens; identical to SEQ ID NO: 754446

SEQ ID NO: 754451 - protein, 313 aa, Homo sapiens
MCDRGIQMLITTVGAFAAFSLMTIAVGTDYWLYSRGVCRTKSTSDNETSRKNEEVMTHSGLWRTCCLEGAFRGVCKKIDHFPEDADYEQDTAEYLLRAVRASSVFPILSVTLLFFGGLCVAASEFHRSRHNVILSAGIFFVSAGLSNIIGIIVYISANAGDPGQRDSKKSYSYGWSFYFGAFSFIIAEIVGVVAVHIYIEKHQQLRAKSHSEFLKKSTFARLPPYRYRFRRRSSSRSTEPRSRDLSPISKGFHTIPSTDISMFTLSRDPSKITMGTLLNSDRDHAFLQFHNSTPKEFKESLHNNPANRRTTPV

SEQ ID NO: 754452 - protein, 305 aa, Homo sapiens
  misc_feature (5)..(6): Xaa can be any naturally occurring amino acid
  misc_feature (15)..(15): Xaa can be any naturally occurring amino acid
FQVPXXSLFTSHREXPTVGTDYWLYSRGVCRTKSTSDNETSRKNEEVMTHSGLWRTCCLEGAFRGVCKKIDHFPEDADYEQDTAEYLLRAVRASSVFPILSVTLLFFGGLCVAASEFHRSRHNVILSAGIFFVSAGLSNIIGIIVYISANAGDPGQRDSKKSYSYGWSFYFGAFSFIIAEIVGVVAVHIYIEKHQQLRAKSHSEFLKKSTFARLPPYRYRFRRRSSSRSTEPRSRDLSPISKGFHTIPSTDISMFTLSRDPSKITMGTLLNSDRDHAFLQFHNSTPKEFKESLHNNPANRRTTPV

SEQ ID NO: 754453 - protein, 157 aa, Homo sapiens
MLLITSVKLAVSATKSGLLPPPPALPPRPCPSQSEQVSEAELLPQLSRAPSQAAESSPAKKDVLYSQPPSKPIRRKFRPENQATENQEPSTAASGPASAATMKPHPTVQKQSSKQKKAIQTAIRKNKEANAVLARLNSELQQQLKGGFIKERIWHLG

SEQ ID NO: 754454 - protein, 215 aa, Homo sapiens
MEAAAAAAAAAAAAAAAGGGCGSGPPPLLLSEGEQQCYSELFARCAGAAGGGPGSGPPEAARVAPGTATAAAGPVADLFRASQLPAETLHQITELCGAKRVGYFGPTQFYIALKLIAAAQSGLPVRIESIKCELPLPRFMMSKNDGEIRFGNPAELHGTKVQIPYLTTEKNSFKRMDDEDKQVNSLFRCVHLILTMKPHVAGPRIYCSASSKSHH

SEQ ID NO: 754455 - protein, 660 aa, Homo sapiens
MEAAAAAAAAAAAAAAAGGGCGSGPPPLLLSEGEQQCYSELFARCAGAAGGGPGSGPPEAARVAPGTATAAAGPVADLFRASQLPAETLHQITELCGAKRVGYFGPTQFYIALKLIAAAQSGLPVRIESIKCELPLPRFMMSKNDGEIRFGNPAELHGTKVQIPYLTTEKNSFKRMDDEDKQQETQSPTMSPLASPPSSPPHYQRVPLSHGYSKLRSSAEQMHPAPYEARQPLVQPEGSSSGGPGTKPLRHQASLIRSFSVERELQDNSSYPDEPWRITEEQREYYVNQFRSLQPDPSSFISGSVAKNFFTKSKLSIPELSYIWELSDADCDGALTLPEFCAAFHLIVARKNGYPLPEGLPPTLQPEYLQAAFPKPKWDCQLFDSYSESLPANQQPRDLNRMEKTSVKDMADLPVPNQDVTSDDKQALKSTINEALPKDVSEDPATPKDSNSLKARPRSRSYSSTSIEEAMKRGEDPPTPPPRPQKTHSRASSLDLNKVFQPSVPATKSGLLPPPPALPPRPCPSQSEQVSEAELLPQLSRAPSQAAESSPAKKDVLYSQPPSKPIRRKFRPENQATENQEPSTAASGPASAATMKPHPTVQKQSSKQKKAIQTAIRKNKEANAVLARLNSELQQQLKEVHQERIALENQLEQLRPVTVL

SEQ ID NO: 754456 - protein, 251 aa, Homo sapiens
MADLPVPNQDVTSDDKQALKSTINEALPKDVSEDPATPKDSNSLKARPRSRSYSSTSIEEAMKRGEDPPTPPPRPQKTHSRASSLDLNKVFQPSVPATKSGLLPPPPALPPRPCPSQSEQVSEAELLPQLSRAPSQAAESSPAKKDVLYSQPPSKPIRRKFRPENQATENQEPSTAASGPASAATMKPHPTVQKQSSKQKKAIQTAIRKNKEANAVLARLNSELQQQLKEVHQERIALENQLEQLRPVTVL

SEQ ID NO: 754457 - protein, 169 aa, Homo sapiens
RVREALPKDVSEDPATKSGLLPPPPALPPRPCPSQSEQVSEAELLPQLSRAPSQAAESSPAKKDVLYSQPPSKPIRRKFRPENQATENQEPSTAASGPASAATMKPHPTVQKQSSKQKKAIQTAIRKNKEANAVLARLNSELQQQLKEVHQERIALENQLEQLRPVTVL

SEQ ID NO: 754458 - protein, 650 aa, Homo sapiens
MEAAAAAAAAAAAAAAAGGGCGSGPPPLLLSEGEQQCYSELFARCAGAAGGGPGSGPPEAARVAPGTATAAAGPVADLFRASQLPAETLHQITELCGAKRVGYFGPTQFYIALKLIAAAQSGLPVRIESIKCELPLPRFMMSKNDGEIRFGNPAELHGTKVQIPYLTTEKNSFKRMDDEDKQQETQSPTMSPLASPPSSPPHYQRVPLSHGYSKLRSSAEQMHPAPYEARQPLVQPEGSSSGGPGTKPLRHQASLIRSFSVERELQDNSSYPDEPWRITEEQREYYVNQFRSLQPDPSSFISGSVAKNFFTKSKLSIPELSYIWELSDADCDGALTLPEFCAAFHLIVARKNGYPLPEGLPPTLQPEYLQAAFPKPKWDCQLFDSYSESLPANQQPRDLNRMEKTSVKDMADLPVPNQDVTSDDKQALKSTINEALPKDVSEDPATPKDSNSLKARPRSRSYSSTSIEEAMKRGEDPPTPPPRPQKTHSRASSLDLNKVFQPSVPATKSGLLPPPPALPPRPCPSQSEQVSEAELLPQLSRAPSQAAESSPAKKDVLYSQPPSKPIRRKFRPENQATENQEPSTAASGPASAATMKPHPTVQKQSSKQKKAIQTAIRKNKEANAVLARLNSELQQQLKGGFIKERIWHLG

SEQ ID NO: 754459 - protein, 164 aa, Homo sapiens
PAAASPSAASLCAASPPAATLAAASPAAAAPAAVCPAAASPSAASLCAASPPAATLAAASPAAAAPLAVNPAAAAPAAACVQSVAESPATPLAIAQPVSSPPVPAPCAAPPLAAEPTALAHLSLRRWSTNVDHSSVLNIRTHGVGLMSFSRVDLMYPMSPSPSR

SEQ ID NO: 754460 - protein, 931 aa, Homo sapiens
MSQSPAFGPRRGSSPRGAAGAAARRNESQDYLLMDSELGEDGCPQAPLPCYGYYPCFRGSDNRLAHRRQTVLREKGRRLANRGPAYMFSDRSTSLSIEEERFLDAAEYGNIPVVRKMLEECHSLNVNCVDYMGQNALQLAVANEHLEITELLLKKENLSRVGDALLLAISKGYVRIVEAILSHPAFAEGKRLATSPSQSELQQDDFYAYDEDGTRFSHDVTPIILAAHCQEYEIVHTLLRKGARIERPHDYFCKCNDCNQKQKHDSFSHSRSRINAYKGLASPAYLSLSSEDPVMTALELSNELAVLANIEKEFKNDYKKLSMQCKDFVVGLLDLCRNTEEVEAILNGDVETLQSGDHGRPNLSRLKLAIKYEVKKFVAHPNCQQQLLSIWYENLSGLRQQTMAVKFLVVLAVAIGLPFLALIYWFAPCSKMGKIMRGPFMKFVAHAASFTIFLGLLVMNAADRFEGTKLLPNETSTDNAKQLFRMKTSCFSWMEMLIISWVIGMIWAECKEIWTQGPKEYLFELWNMLDFGMLAIFAASFIARFMAFWHASKAQSIIDANDTLKDLTKVTLGDNVKYYNLARIKWDPSDPQIISEGLYAIAVVLSFSRIAYILPANESFGPLQISLGRTVKDIFKFMVIFIMVFVAFMIGMFNLYSYYIGAKQNEAFTTVEESFKTLFWAIFGLSEVKSVVINYNHKFIENIGYVLYGVYNVTMVIVLLNMLIAMINSSFQEIEDDADVEWKFARAKLWFSYFEEGRTLPVPFNLVPSPKSLFYLLLKLKKWISELFQGHKKGFQEDAEMNKINEEKKLGILGSHEDLSKLSLDKKQVGHNKQPSIRSSEDFHLNSFNNPPRQYQKIMKRLIKRYVLQAQIDKESDEVNEGELKEIKQDISSLRYELLEEKSQNTEDLAELIRELGEKLSMEPNQEETNR

SEQ ID NO: 754461 - protein, 931 aa, Homo sapiens; identical to SEQ ID NO: 754460

SEQ ID NO: 754462 - protein, 876 aa, Homo sapiens
MSQSPAFGPRRGSSPRGAAGAAARRNESQDYLLMDSELGEDGCPQAPLPCYGYYPCFRGSDNRLAHRRQTVLREKGRRLANRGPAYMFSDRSTSLSIEEERFLDAAEYGNIPVVRKMLEECHSLNVNCVDYMGQNALQLAVANEHLEITELLLKKENLSRVGDALLLAISKGYVRIVEAILSHPAFAEGKRLATSPSQSELQQDDFYAYDEDGTRFSHDVTPIILAAHCQEYEIVHTLLRKGARIERPHDYFCKCNDCNQKQKHDSFSHSRSRINAYKGLASPAYLSLSSEDPVMTALELSNELAVLANIEKEFKNDYKKLSMQCKDFVVGLLDLCRNTEEVEAILNGDVETLQSGDHGRPNLSRLKLAIKYEVKKMGKIMRGPFMKFVAHAASFTIFLGLLVMNAADRFEGTKLLPNETSTDNAKQLFRMKTSCFSWMEMLIISWVIGMIWAECKEIWTQGPKEYLFELWNMLDFGMLAIFAASFIARFMAFWHASKAQSIIDANDTLKDLTKVTLGDNVKYYNLARIKWDPSDPQIISEGLYAIAVVLSFSRIAYILPANESFGPLQISLGRTVKDIFKFMVIFIMVFVAFMIGMFNLYSYYIGAKQNEAFTTVEESFKTLFWAIFGLSEVKSVVINYNHKFIENIGYVLYGVYNVTMVIVLLNMLIAMINSSFQEIEDDADVEWKFARAKLWFSYFEEGRTLPVPFNLVPSPKSLFYLLLKLKKWISELFQGHKKGFQEDAEMNKINEEKKLGILGSHEDLSKLSLDKKQVGHNKQPSIRSSEDFHLNSFNNPPRQYQKIMKRLIKRYVLQAQIDKESDEVNEGELKEIKQDISSLRYELLEEKSQNTEDLAELIRELGEKLSMEPNQEETNR

SEQ ID NO: 754463 - protein, 815 aa, Homo sapiens
MSQSPAFGPRRGSSPRGAAGAAARRNESQDYLLMDSELGEDGCPQAPLPCYGYYPCFRGSDNRLAHRRQTVLREKGRRLANRGPAYMFSDRSTSLSIEEERFLDAAEYGNIPVVRKMLEECHSLNVNCVDYMGQNALQLAVANEHLEITELLLKKENLSRVGDALLLAISKGYVRIVEAILSHPAFAEGKRLATSPSQSELQQDDFYAYDEDGTRFSHDVTPIILAAHCQEYEIVHTLLRKGARIERPHDYFCKCNDCNQKQKHDSFSHSRSRINAYKGLASPAYLSLSSEDPVMTALELSNELAVLANIEKEFKMGKIMRGPFMKFVAHAASFTIFLGLLVMNAADRFEGTKLLPNETSTDNAKQLFRMKTSCFSWMEMLIISWVIGMIWAECKEIWTQGPKEYLFELWNMLDFGMLAIFAASFIARFMAFWHASKAQSIIDANDTLKDLTKVTLGDNVKYYNLARIKWDPSDPQIISEGLYAIAVVLSFSRIAYILPANESFGPLQISLGRTVKDIFKFMVIFIMVFVAFMIGMFNLYSYYIGAKQNEAFTTVEESFKTLFWAIFGLSEVKSVVINYNHKFIENIGYVLYGVYNVTMVIVLLNMLIAMINSSFQEIEDDADVEWKFARAKLWFSYFEEGRTLPVPFNLVPSPKSLFYLLLKLKKWISELFQGHKKGFQEDAEMNKINEEKKLGILGSHEDLSKLSLDKKQVGHNKQPSIRSSEDFHLNSFNNPPRQYQKIMKRLIKRYVLQAQIDKESDEVNEGELKEIKQDISSLRYELLEEKSQNTEDLAELIRELGEKLSMEPNQEETNR

SEQ ID NO: 754464 - protein, 394 aa, Homo sapiens
MSQSPAFGPRRGSSPRGAAGAAARRNESQDYLLMDSELGEDGCPQAPLPCYGYYPCFRGSDNRLAHRRQTVLREKGRRLANRGPAYMFSDRSTSLSIEEERFLDAAEYGNIPVVRKMLEECHSLNVNCVDYMGQNALQLAVANEHLEITELLLKKENLSRVGDALLLAISKGYVRIVEAILSHPAFAEGKRLATSPSQSELQQDDFYAYDEDGTRFSHDVTPIILAAHCQEYEIVHTLLRKGARIERPHDYFCKCNDCNQKQKHDSFSHSRSRINAYKGLASPAYLSLSSEDPVMTALELSNELAVLANIEKEFKNDYKKLSMQCKDFVVGLLDLCRNTEEVEAILNGDVETLQSGDHGRPNLSRLKLAIKYEVKKVRSGVKPVYIILVLVGAK

SEQ ID NO: 754465 - protein, 75 aa, Homo sapiens
ERKSFPSSVLTARLFVHGCVRLCPLPSPFNMLPCQGSCPYDVPDSFCTLACFLAPRCSQHPAALGQPLLAPYGCV

SEQ ID NO: 754466 - protein, 4327 aa, Homo sapiens
LGLGHTFWTLLASPKMEHKEVVLLLLLFLKSAAPEQSHVVQDCYHGDGQSYRGTYSTTVTGRTCQAWSSMTPHQHNRTTENYPNAGLIMNYCRNPDAVAAPYCYTRDPGVRWEYCNLTQCSDAEGTAVAPPTVTPVPSLEAPSEQAPTEQRPGVQECYHGNGQSYRGTYSTTVTGRTCQAWSSMTPHSHSRTPEYYPNAGLIMNYCRNPDAVAAPYCYTRDPGVRWEYCNLTQCSDAEGTAVAPPTVTPVPSLEAPSEQAPTEQRPGVQECYHGNGQSYRGTYSTTVTGRTCQAWSSMTPHSHSRTPEYYPNAGLIMNYCRNPDAVAAPYCYTRDPGVRWEYCNLTQCSDAEGTAVAPPTVTPVPSLEAPSEQAPTEQRPGVQECYHGNGQSYRGTYSTTVTGRTCQAWSSMTPHSHSRTPEYYPNAGLIMNYCRNPDAVAAPYCYTRDPGVRWEYCNLTQCSDAEGTAVAPPTVTPVPSLEAPSEQAPTEQRPGVQECYHGNGQSYRGTYSTTVTGRTCQAWSSMTPHSHSRTPEYYPNAGLIMNYCRNPDAVAAPYCYTRDPGVRWEYCNLTQCSDAEGTAVAPPTVTPVPSLEAPSEQAPTEQRPGVQECYHGNGQSYRGTYSTTVTGRTCQAWSSMTPHSHSRTPEYYPNAGLIMNYCRNPDAVAAPYCYTRDPGVRWEYCNLTQCSDAEGTAVAPPTVTPVPSLEAPSEQAPTEQRPGVQECYHGNGQSYRGTYSTTVTGRTCQAWSSMTPHSHSRTPEYYPNAGLIMNYCRNPDAVAAPYCYTRDPGVRWEYCNLTQCSDAEGTAVAPPTVTPVPSLEAPSEQAPTEQRPGVQECYHGNGQSYRGTYSTTVTGRTCQAWSSMTPHSHSRTPEYYPNAGLIMNYCRNPDAVAAPYCYTRDPGVRWEYCNLTQCSDAEGTAVAPPTVTPVPSLEAPSEQAPTEQRPGVQECYHGNGQSYRGTYSTTVTGRTCQAWSSMTPHSHSRTPEYYPNAGLIMNYCRNPDAVAAPYCYTRDPGVRWEYCNLTQCSDAEGTAVAPPTVTPVPSLEAPSEQAPTEQRPGVQECYHGNGQSYRGTYSTTVTGRTCQAWSSMTPHSHSRTPEYYPNAGLIMNYCRNPDAVAAPYCYTRDPGVRWEYCNLTQCSDAEGTAVAPPTVTPVPSLEAPSEQAPTEQRPGVQECYHGNGQSYRGTYSTTVTGRTCQAWSSMTPHSHSRTPEYYPNAGLIMNYCRNPDAVAAPYCYTRDPGVRWEYCNLTQCSDAEGTAVAPPTVTPVPSLEAPSEQAPTEQRPGVQECYHGNGQSYRGTYSTTVTGRTCQAWSSMTPHSHSRTPEYYPNAGLIMNYCRNPDAVAAPYCYTRDPGVRWEYCNLTQCSDAEGTAVAPPTVTPVPSLEAPSEQAPTEQRPGVQECYHGNGQSYRGTYSTTVTGRTCQAWSSMTPHSHSRTPEYYPNAGLIMNYCRNPDAVAAPYCYTRDPGVRWEYCNLTQCSDAEGTAVAPPTVTPVPSLEAPSEQAPTEQRPGVQECYHGNGQSYRGTYSTTVTGRTCQAWSSMTPHSHSRTPEYYPNAGLIMNYCRNPDAVAAPYCYTRDPGVRWEYCNLTQCSDAEGTAVAPPTVTPVPSLEAPSEQAPTEQRPGVQECYHGNGQSYRGTYSTTVTGRTCQAWSSMTPHSHSRTPEYYPNAGLIMNYCRNPDAVAAPYCYTRDPGVRWEYCNLTQCSDAEGTAVAPPTVTPVPSLEAPSEQAPTEQRPGVQECYHGNGQSYRGTYSTTVTGRTCQAWSSMTPHSHSRTPEYYPNAGLIMNYCRNPDAVAAPYCYTRDPGVRWEYCNLTQCSDAEGTAVAPPTVTPVPSLEAPSEQAPTEQRPGVQECYHGNGQSYRGTYSTTVTGRTCQAWSSMTPHSHSRTPEYYPNAGLIMNYCRNPDAVAAPYCYTRDPGVRWEYCNLTQCSDAEGTAVAPPTVTPVPSLEAPSEQAPTEQRPGVQECYHGNGQSYRGTYSTTVTGRTCQAWSSMTPHSHSRTPEYYPNAGLIMNYCRNPDAVAAPYCYTRDPGVRWEYCNLTQCSDAEGTAVAPPTVTPVPSLEAPSEQAPTEQRPGVQECYHGNGQSYRGTYSTTVTGRTCQAWSSMTPHSHSRTPEYYPNAGLIMNYCRNPDAVAAPYCYTRDPGVRWEYCNLTQCSDAEGTAVAPPTVTPVPSLEAPSEQAPTEQRPGVQECYHGNGQSYRGTYSTTVTGRTCQAWSSMTPHSHSRTPEYYPNAGLIMNYCRNPDAVAAPYCYTRDPGVRWEYCNLTQCSDAEGTAVAPPTVTPVPSLEAPSEQAPTEQRPGVQECYHGNGQSYRGTYSTTVTGRTCQAWSSMTPHSHSRTPEYYPNAGLIMNYCRNPDAVAAPYCYTRDPGVRWEYCNLTQCSDAEGTAVAPPTVTPVPSLEAPSEQAPTEQRPGVQECYHGNGQSYRGTYSTTVTGRTCQAWSSMTPHSHSRTPEYYPNAGLIMNYCRNPDAVAAPYCYTRDPGVRWEYCNLTQCSDAEGTAVAPPTVTPVPSLEAPSEQAPTEQRPGVQECYHGNGQSYRGTYSTTVTGRTCQAWSSMTPHSHSRTPEYYPNAGLIMNYCRNPDAVAAPYCYTRDPGVRWEYCNLTQCSDAEGTAVAPPTVTPVPSLEAPSEQAPTEQRPGVQECYHGNGQSYRGTYSTTVTGRTCQAWSSMTPHSHSRTPEYYPNAGLIMNYCRNPDAVAAPYCYTRDPGVRWEYCNLTQCSDAEGTAVAPPTVTPVPSLEAPSEQAPTEQRPGVQECYHGNGQSYRGTYSTTVTGRTCQAWSSMTPHSHSRTPEYYPNAGLIMNYCRNPDAVAAPYCYTRDPGVRWEYCNLTQCSDAEGTAVAPPTVTPVPSLEAPSEQAPTEQRPGVQECYHGNGQSYRGTYSTTVTGRTCQAWSSMTPHSHSRTPEYYPNAGLIMNYCRNPDAVAAPYCYTRDPGVRWEYCNLTQCSDAEGTAVAPPTVTPVPSLEAPSEQAPTEQRPGVQECYHGNGQSYRGTYSTTVTGRTCQAWSSMTPHSHSRTPEYYPNAGLIMNYCRNPDAVAAPYCYTRDPGVRWEYCNLTQCSDAEGTAVAPPTVTPVPSLEAPSEQAPTEQRPGVQECYHGNGQSYRGTYSTTVTGRTCQAWSSMTPHSHSRTPEYYPNAGLIMNYCRNPDAVAAPYCYTRDPGVRWEYCNLTQCSDAEGTAVAPPTVTPVPSLEAPSEQAPTEQRPGVQECYHGNGQSYRGTYSTTVTGRTCQAWSSMTPHSHSRTPEYYPNAGLIMNYCRNPDAVAAPYCYTRDPGVRWEYCNLTQCSDAEGTAVAPPTVTPVPSLEAPSEQAPTEQRPGVQECYHGNGQSYRGTYSTTVTGRTCQAWSSMTPHSHSRTPEYYPNAGLIMNYCRNPDPVAAPYCYTRDPSVRWEYCNLTQCSDAEGTAVAPPTITPIPSLEAPSEQAPTEQRPGVQECYHGNGQSYQGTYFITVTGRTCQAWSSMTPHSHSRTPAYYPNAGLIKNYCRNPDPVAAPWCYTTDPSVRWEYCNLTRCSDAEWTAFVPPNVILAPSLEAFFEQALTEETPGVQDCYYHYGQSYRGTYSTTVTGRTCQAWSSMTPHQHSRTPENYPNAGLTRNYCRNPDAEIRPWCYTMDPSVRWEYCNLTQCLVTESSVLATLTVVPDPSTEASSEEAPTEQSPGVQDCYHGDGQSYRGSFSTTVTGRTCQSWSSMTPHWHQRTTEYYPNGGLTRNYCRNPDAEISPWCYTMDPNVRWEYCNLTQCPVTESSVLATSTAVSEQAPTEQSPTVQDCYHGDGQSYRGSFSTTVTGRTCQSWSSMTPHWHQRTTEYYPNGGLTRNYCRNPDAEIRPWCYTMDPSVRWEYCNLTQCPVMESTLLTTPTVVPVPSTELPSEEAPTENSTGVQDCYRGDGQSYRGTLSTTITGRTCQSWSSMTPHWHRRIPLYYPNAGLTRNYCRNPDAEIRPWCYTMDPSVRWEYCNLTRCPVTESSVLTTPTVAPVPSTEAPSEQAPPEKSPVVQDCYHGDGRSYRGISSTTVTGRTCQSWSSMIPHWHQRTPENYPNAGLTENYCRNPDSGKQPWCYTTDPCVRWEYCNLTQCSETESGVLETPTVVPVPSMEAHSEAAPTEQTPVVRQCYHGNGQSYRGTFSTTVTGRTCQSWSSMTPHRHQRTPENYPNDGLTMNYCRNPDADTGPWCFTMDPSIRWEYCNLTRCSDTEGTVVAPPTVIQVPSLGPPSEQDCMFGNGKGYRGKKATTVTGTPCQEWAAQEPHRHSTFIPGTNKWAGLEKNYCRNPDGDINGPWCYTMNPRKLFDYCDIPLLCILFI

SEQ ID NO: 754467 - protein, 4327 aa, Homo sapiens; identical to SEQ ID NO: 754466

SEQ ID NO: 754468 - protein, 65 aa, Homo sapiens
MYNIKQSTDTKEAAAIEARRNREKERQNRFFNVRNRVMGVDVQALNNQVGDRKRREAAERSKEAA

SEQ ID NO: 754469 - protein, 68 aa, Homo sapiens
TRRKPPPRPPGTAPAAGLRSVHLLRIPYKEPLLVHQNYRGPSAQLPQTLAVGPPMAVGTSPVKPAKLD

SEQ ID NO: 754470 - protein, 1204 aa, Homo sapiens
MVGVLAMAAAAAPPPVKDCEIEPCKKRKKDDDTSTCKTITKYLSPLGKTRDRVFAPPKPSNILDYFRKTSPTNEKTQLGKECKIKSPESVPVDSNKDCTTPLEMFSNVEFKKKRKRVNLSHQLNNIKTENEAPIEISSDDSKEDYSLNNDFVESSTSVLRYKKQVEVLAENIQDTKSQPNTMTSLQNSKKVNPKQGTTKNDFKKLRKRKCRDVVDLSESLPLAEELNLLKKDGKDTKQMENTTSHANSRDNVTEAAQLNDSIITVSYEEFLKSHKENKVEEIPDSTMSICVPSETVDEIVKSGYISESENSEISQQVRFKTVTVLAQVHPIPPKKTGKIPRIFLKQKQFEMENSLSDPENEQTVQKRKSNVVIQEEELELAVLEAGSSEAVKPKCTLEERQQFMKAFRQPASDALKNGVKKSSDKQKDLNEKCLYEVGRDDNSKKIMENSGIQMVSKNGNLQLHTDKGSFLKEKDKKLKKKNKKTLDTGAIPGKNREGNTQKKETTFFLKEKQYQNRMSLRQRKTEFFKSSTLFNNESLVYEDIANDDLLKVSSLCNNNKLSRKTSIPVKDIKLTQSKAESEASLLNVSTPKSTRRSGRISSTPTTETIRGIDSDDVQDNSQLKASTQKAANLSEKHSLYTAELITVPFDSESPIRMKFTRISTPKKSKKKSNKRSEKSEATDGGFTSQIRKASNTSKNISKAKQLIEKAKALHISRSKVTEEIAIPLRRSSRHQTLPERKKLSETEDSVIIIDSSPTALKHPEKNQKKLQCLNDVLGKKLNTSTKNVPGKMKVAPLFLVRKAQKAADPVPSFDESSQDTSEKSQDCDVQCKAKRDFLMSGLPDLLKRQIAKKAAALDVYNAVSTSFQRVVHVQQKDDGCCLWHLKPPSCPLLTKFKELNTKVIDLSKCGIALGEFSTLNSKLKSGNSAAVFMRTRKEFTEEVRNLLLEEIRWSNPEFSLKKYFPLLLKKQIEHQVLSSECHSKQELEADVSHKETKRKLVEAENSKSKRKKPNEYSKNLEKTNRKSEELSKRNNSSGIKLDSSKDSGTEDMLWTEKYQPQTASELIGNELAIKKLHSWLKDWKRRAELEERQNLKGKRDEKHEDFSGGIDFKGSSDDEEESRLCNTVLITGPTGVGKTAAVYACAQELGFKIFEVNASSQRSGRQILSQLKEATQSHQVDKQGVNSQKPCFFNSYYIGKSPSK

SEQ ID NO: 754471 - protein, 548 aa, Homo sapiens
MKFTRISTPKKSKKKSNKRSEKSEATDGGFTSQIRKASNTSKNISKAKQLIEKAKALHISRSKVTEEIAIPLRRSSRHQTLPERKKLSETEDSVIIIDSSPTALKHPEKNQKKLQCLNDVLGKKLNTSTKNVPGKMKVAPLFLVRKAQKAADPVPSFDESSQDTSEKSQDCDVQCKAKRDFLMSGLPDLLKRQIAKKAAALDVYNAVSTSFQRVVHVQQKDDGCCLWHLKPPSCPLLTKFKELNTKVIDLSKCGIALGEFSTLNSKLKSGNSAAVFMRTRKEFTEEVRNLLLEEIRWSNPEFSLKKYFPLLLKKQIEHQVLSSECHSKQELEADVSHKETKRKLVEAENSKSKRKKPNEYSKNLEKTNRKSEELSKRNNSSGIKLDSSKDSGTEDMLWTEKYQPQTASELIGNELAIKKLHSWLKDWKRRAELEERQNLKGKRDEKHEDFSGGIDFKGSSDDEEESRLCNTVLITGPTGVGKTAAVYACAQELGFKIFEVNASSQRSGRQILSQLKEATQSHQVDKQGVNSQKPCFFNSYYIGKSPSK

SEQ ID NO: 754472 - protein, 88 aa, Homo sapiens
VKDIKLTQSKAESEASLLNVSTPKSTRRSGRISSTPTTETIRGIDSDDVQDNSQLKASTQKAANLSEKHSLYTAELITVPFDSESPIR

SEQ ID NO: 754473 - protein, 465 aa, Homo sapiens
MVGVLAMAAAAAPPPVKDCEIEPCKKRKKDDDTSTCKTITKYLSPLGKTRDRVFAPPKPSNILDYFRKTSPTNEKTQLGKECKIKSPESVPVDSNKDCTTPLEMFSNVEFKKKRKRVNLSHQLNNIKTENEAPIEISSDDSKEDYSLNNDFVESSTSVLRYKKQVEVLAENIQDTKSQPNTMTSLQNSKKVNPKQGTTKNDFKKLRKRKCRDVVDLSESLPLAEELNLLKKDGKDTKQMENTTSHANSRDNVTEAAQLNDSIITVSYEEFLKSHKENKVEEIPDSTMSICVPSETVDEIVKSGYISESENSEISQQVRFKTVTVLAQVHPIPPKKTGKIPRIFLKQKQFEMENSLSDPENEQTVQKRKSNVVIQEEELELAVLEAGSSEAVKPKCTLEERQQFMKAFRQPASDALKNGVKKSSDKQKDLNEKCLYEVGRDDNSKKIMENSGIQMVSKNGNLQFTH

SEQ ID NO: 754474 - protein, 228 aa, Homo sapiens
MVGVLAMAAAAAPPPVKDCEIEPCKKRKKDDDTSTCKTITKYLSPLGKTRDRVFAPPKPSNILDYFRKTSPTNEKTQLGKECKIKSPESVPVDSNKDCTTPLEMFSNVEFKKKRKRVNLSHQLNNIKTENEAPIEISSDDSKEDYSLNNDFVESSTSVLRYKKQVEVLAENIQDTKSQPNTMTSQSAGITGMSHRAQPHSVYIAFPKYAIDLFIYIALYRMSIPNPKI

SEQ ID NO: 754475 - protein, 228 aa, Homo sapiens
RGSLICVIAKAPAFYRLCSSSDTLLSEGEENQKPKKSDTKVDSSPRRKHSSSSNSQGSIHKSKEDVTVSPSQEINAPPDENKRTPSPGPVESKFLERAGDASAPRFNTEQIQYRDSREINAVVTPERRPTSSPRPTSSELLRSHSTDRRVYSRFEPFCKIESSIQPTSNMPNTSINRPEIKSATMGNSYGRSSPLLNYNTGVYRSYQPNENKFRGFMQKFGNFIHKNK

SEQ ID NO: 754476 - protein, 241 aa, Homo sapiens
GSQKLRSLLSLTPDKKENLSKNKAPAFYRLCSSSDTLLSEGEENQKPKKSDTKVDSSPRRKHSSSSNSQGSIHKSKEDVTVSPSQEINAPPDENKRTPSPGPVESKFLERAGDASAPRFNTEQIQYRDSREINAVVTPERRPTSSPRPTSSELLRSHSTDRRVYSRFEPFCKIESSIQPTSNMPNTSINRPEIKSATMGNSYGRSSPLLNYNTGVYRSYQPNENKFRGFMQKFGNFIHKNK

SEQ ID NO: 754477 - protein, 524 aa, Homo sapiens
ARAESRAGRGPRGVGQPERRPPIPGGRPRAPARAPASGRLAHATERPSGRRRSCPGPCCCCCRLRLLPQLGARLLHGVRRSCSLLSRQTTFLLASSPRMFRTKRSALVRRLWRSRAPGGEDEEEGAGGGGGGGELRGEGATDSRAHGAGGGGPGRAGCCLGKAVRGAKGHHHPHPPAAGAGAAGGAEADLKALTHSVLKKLKERQLELLLQAVESRGGTRTACLLLPGRLDCRLGPGAPAGAQPAQPPSSYSLPLLLCKVFRWPDLRHSSEVKRLCCCESYGKINPELVCCNPHHLSRLCELESPPPPYSRYPMDFLKPTADCPDAVPSSAETGGTNYLAPGGLSDSQLLLEPGDRSHWCVVAYWEEKTRVGRLYCVQEPSLDIFYDLPQGNGFCLGQLNSDNKSQLVQKVRSKIGCGIQLTREVDGVWVYNRSSYPIFIKSATLDNPDSRTLLVHKVFPGFSIKAFDYEKAYSLQRPNDHEFMQQPWTGFTVQISFVKGWGQCYTRQFISSCPCWLEVIFNSR

SEQ ID NO: 754478 - protein, 524 aa, Homo sapiens; identical to SEQ ID NO: 754477

SEQ ID NO: 754479 - protein, 219 aa, Homo sapiens [sequence omitted]

SEQ ID NO: 754480 - protein, 111 aa, Homo sapiens
MAGPLFSLAFLIYRVSPPSLLQIPIFIKSATLDNPDSRTLLVHKVFPGFSIKAFDYEKAYSLQRPNDHEFMQQPWTGFTVQISFVKGWGQCYTRQFISSCPCWLEVIFNSR

SEQ ID NO: 754481 - protein, 211 aa, Homo sapiens
MDFLKPTADCPDAVPSSAETGGTNYLAPGGLSDSQLLLEPGDRSHWCVVAYWEEKTRVGRLYCVQEPSLDIFYDLPQGNGFCLGQLNSDNKSQLVQKVRSKIGCGIQLTREVDGVWVYNRSSYPIFIKSATLDNPDSRTLLVHKVFPGFSIKAFDYEKAYSLQRPNDHEFMQQPWTGFTVQISFVKGWGQCYTRQFISSCPCWLEVIFNSR

SEQ ID NO: 754482 - protein, 134 aa, Homo sapiens
RATEPGPQAAPCQLSSSHSRSNRLLSPMARATLSAAPSNPRLLRVALLLLLLVAASRRAAGAPLATELRCQCLQTLQGIHLKNIQSVKVKSPGPHCAQTEVIATLKNGQKACLNPASPMVKKIIEKMLKNGKSN

SEQ ID NO: 754483 - protein, 72 aa, Homo sapiens
RATEPGPQAAPCQLSSSHSRSNRLLSPMARATLSAAPSNPRLLRVALLLLLLVAASRRAAASLFFPRSAPGH

SEQ ID NO: 754484 - protein, 167 aa, Homo sapiens
ESDRARATGSSLPALLLAQPLEPPAEPHGPRHALRRPQQSPAPAGGAAAPAPGGRQPARSRWVPAPWGPRAGRGWGGRPAPTAPLNQRVSSSLGAPLATELRCQCLQTLQGIHLKNIQSVKVKSPGPHCAQTEVIATLKNGQKACLNPASPMVKKIIEKMLKNGKSN

SEQ ID NO: 754485 - protein, 135 aa, Homo sapiens
ESDRARATGSSLPALLLAQPLEPPAEPHGPRHALRRPQQSPAPAGGAAAPAPGGRQPARSRWVPAPWGPRAGRGWGGRPAPTAPLNQRVSSSLGAPLATELRCQCLQTLQGIHLKNIQSVKVKSPGPHCAQTEVM

SEQ ID NO: 754486 - protein, 135 aa, Homo sapiens; identical to SEQ ID NO: 754485

SEQ ID NO: 754487 - protein, 135 aa, Homo sapiens; identical to SEQ ID NO: 754485

SEQ ID NO: 754488 - protein, 135 aa, Homo sapiens; identical to SEQ ID NO: 754485

SEQ ID NO: 754489 - protein, 155 aa, Homo sapiens
RATEPGPQAAPCQLSSSHSRSNRLLSPMARATLSAAPSNPRLLRVALLLLLLVAASRRAAGAPLATELRCQCLQTLQGIHLKNIQSVKVKSPGPHCAQTEVIATLKNGQKACLNPASPMVKKIIEKMLKNLKEALPLQEQKRKERHSCRGHLDCA

SEQ ID NO: 754490 - protein, 134 aa, Homo sapiens; identical to SEQ ID NO: 754482

SEQ ID NO: 754491 - protein, 134 aa, Homo sapiens
MDVFMKGLSMAKEGVVAAAEKTKQGVTEAAEKTKEGVLYVGSKTREGVVQGVASVAEKTKEQASHLGGAVFSGAGNIAAATGLVKREEFPTDLKPEEVAQEAAEEPLIEPLMEPEGESYEDPPQEEYQEYEPEA

SEQ ID NO: 754492 - protein, 134 aa, Homo sapiens; identical to SEQ ID NO: 754491

SEQ ID NO: 754493 - protein, 134 aa, Homo sapiens; identical to SEQ ID NO: 754491

SEQ ID NO: 754494 - protein, 167 aa, Homo sapiens
EYLEDPSRLADRLSLDSFSPITRSSFRSEATPSEPVLVSVHLSVLPARVQPRGMDRARVAVAAGSLAPPVLPPPIQRLRGCSMFYVFLNEDPSDGSSPIPDSGSPSGPRAAPEHPARLPLTSRTFFFLTKTRSQAVPCPPPPIPAGPVRTRASCVVIVAWRVPIPPM

SEQ ID NO: 754495 - protein, 710 aa, Homo sapiens
SAALPCAEARGPGTSAGSEQKERGPGPGQGSPGGGPGPRSLSGPEQGTACCELEEAQGQCQQEEAQREAASVPLRDSGHPGHAEGREGDFPAADLDSLWEDFSQSLARGNSELLAFLTSSGAGSQPEAQRELDVVLRTVIPKTSPHCPLTTPRREIVVQDVLNGTITFLPLEEDDEGNLKVKMSNVYQIQLSHSKEEWFISVLIFCPERWHSDGIVYPKPTWLGEELLAKLAKWSVENKKSDFKSTLSLISIMKYSKAYQELKEKYKEMVKVWPEVTDPEKFVYEDVAIAAYLLILWEEERAERGLTARQSFVDLGCGNGLLVHILSSEGHPGRGIDVRRRKIWDMYGPQTQLEEDAITPNDKTLFPDVDWLIGNHSDELTPWIPVIAARSSYNCRFFVLPCCFFDFIGRYSRRQSKKTQYREYLDFIKEVGFTCGFHVDEDCLRIPSTKRVCLVGKSRTYPSSREASVDEKRTQYIKSRRGCPVSPPGWELSPSPRWVAAGSAGHCDGQQALDARVGCVTRAWAAEHGAGPQAEGPWLPGFHPREKAERVRNCAALPRDFIDQVVLQVANLLLGGKQLNTRSSRNGSLKTWNGGESLSLAEVANELDTETLRRLKRECGGLQTLLRNSHQVFQVVNGRVHIRDWREETLWKTKQPEAKQRLLSEACKTRLCWFFMHHPDGCALSTDCCPFAHGPAELRPPRTTPRKKIS

SEQ ID NO: 754496 - protein, 710 aa, Homo sapiens; identical to SEQ ID NO: 754495

SEQ ID NO: 754497 - protein, 120 aa, Homo sapiens
MGEFTSATGERRHCGRQSNRKRNRDCSLKPAKPASAGSSCITLMAALCPRTAARLPMGLRSCGHPGPPRGRRFHELHPCQPRPGWGGQTKESFPSSRQCCGLCSGCVSAHLLPAFSTSSQ

SEQ ID NO: 754498 - protein, 120 aa, Homo sapiens; identical to SEQ ID NO: 754497

SEQ ID NO: 754499 - protein, 662 aa, Homo sapiens
SAALPCAEARGPGTSAGSEQKERGPGPGQGSPGGGPGPRSLSGPEQGTACCELEEAQGQCQQEEAQREAASVPLRDSGHPGHAEGREGDFPAADLDSLWEDFSQSLARGNSELLAFLTSSGAGSQPEAQRELDVVLRTVIPKTSPHCPLTTPRREIVVQERWHSDGIVYPKPTWLGEELLAKLAKWSVENKKSDFKSTLSLISIMKYSKAYQELKEKYKEMVKVWPEVTDPEKFVYEDVAIAAYLLILWEEERAERGLTARQSFVDLGCGNGLLVHILSSEGHPGRGIDVRRRKIWDMYGPQTQLEEDAITPNDKTLFPDVDWLIGNHSDELTPWIPVIAARSSYNCRFFVLPCCFFDFIGRYSRRQSKKTQYREYLDFIKEVGFTCGFHVDEDCLRIPSTKRVCLVGKSRTYPSSREASVDEKRTQYIKSRRGCPVSPPGWELSPSPRWVAAGSAGHCDGQQALDARVGCVTRAWAAEHGAGPQAEGPWLPGFHPREKAERVRNCAALPRDFIDQVVLQVANLLLGGKQLNTRSSRNGSLKTWNGGESLSLAEVANELDTETLRRLKRECGGLQTLLRNSHQVFQVVNGRVHIRDWREETLWKTKQPEAKQRLLSEACKTRLCWFFMHHPDGCALSTDCCPFAHGPAELRPPRTTPRKKIS

SEQ ID NO: 754500 - protein, 120 aa, Homo sapiens; identical to SEQ ID NO: 754497

SEQ ID NO: 754501 - protein, 605 aa, Homo sapiens
SAALPCAEARGPGTSAGSEQKERGPGPGQGSPGGGPGPRSLSGPEQGTACCELEEAQGQCQQEEAQREAASVPLRDSGHPGHAEGREGDFPAADLDSLWEDFSQSLARGNSELLAFLTSSGAGSQPEAQRELDVVLRTVIPKTSPHCPLTTPRREIVVQDVLNGTITFLPLEEDDEGNLKVKMSNVYQIQLSHSKEEWFISVLIFCPERWHSDGIVYPKPTWLGEELLAKLAKWSVENKKSDFKSTLSLISIMKYSKAYQELKEKYKEMVKVWPEVTDPEKFVYEDVAIAAYLLILWEEERAERGLTARQSFVDLGCGNGLLVHILSSEGHPGRGIDVRRRKIWDMYGPQTQLEEDAITPNDKTLFPDVDWLIGNHSDELTPWIPVIAARSSYNCRFFVLPCCFFDFIGRYSRRQSKKTQYREYLDFIKEVGFTCGFHVDEDCLRIPSTKRVCLVGKSRTYPSSREASVDEKRTQYIKSRRGCPVSPPGWELSPSPRWVAAGSAGHCDGQQALDARVGCVTRAWAAEHGAGPQAEGPWLPGFHPREKAERVRNCAALPRDFIDQVVLQVANLLLGGKQLNTRSSRNGSLKTWNGGGKLSTILGRG

SEQ ID NO: 754502 - protein, 1025 aa, Homo sapiens
MEPFTNDRLQLPRNMIENSMFEEEPDVVDLAKEPCLHPLEPDEVEYEPRGSRLLVRGLGEHEMEEDEEDYESSAKLLGMSFMNRSSGLRNSATGYRQSPDGACSVPSARTMVVCAFVIVVAVSVIMVIYLLPRCTFTKEGCHKKNQSIGLIQPFATNGKLFPWAQIRLPTAVVPLRYELSLHPNLTSMTFRGSVTISVQALQVTWNIILHSTGHNISRVTFMSAVSSQEKQAEILEYAYHGQIAIVAPEALLAGHNYTLKIEYSANISSSYYGFYGFSYTDESNEKKYFAATQFEPLAARSAFPCFDEPAFKATFIIKIIRDEQYTALSNMPKKSSVVLDDGLVQDEFSESVKMSTYLVAFIVGEMKNLSQDVNGTLVSIYAVPENIGQVHYALETTVKLLEFFQNYFEIQYPLKKLDLVAIPDFEAGAMENWGLLTFREETLLYDSNTSSMADRKLVTKIIAHELAHQWFGNLVTMKWWNDLWLNEGFATFMEYFSLEKIFKELSSYEDFLDARFKTMKKDSLNSSHPISSSVQSSEQIEEMFDSLSYFKGSSLLLMLKTYLSEDVFQHAVVLYLHNHSYASIQSDDLWDSFNEVTNQTLDVKRMMKTWTLQKGFPLVTVQKKGKELFIQQERFFLNMKPEIQPSDTSYLWHIPLSYVTEGRNYSKYQSVSLLDKKSGVINLTEEVLWVKVNINMNGYYIVHYADDDWEALIHQLKINPYVLSDKDRANLINNIFELAGLGKVPLKRAFDLINYLGNENHTAPITEALFQTDLIYNLLEKLGYMDLASRLVTRVFKLLQNQIQQQTWTDEGTPSMRELRSALLEFACTHNLGNCSTTAMKLFDDWMASNGTQSLPTDVMTTVFKVGAKTDKGWSFLLGKYISIGSEAEKNKILEALASSEDVRKLYWLMKSSLNGDNFRTQKLSFIIRTVGRHFPGHLLAWDFVKENWNKLVQKFPLGSYTIQNIVAGSTYLFSTKTHLSEVQAFFENQSEATFRLRCVQEALEVIQLNIQWMEKNLKSLTWWL

SEQ ID NO: 754503 - protein, 1025 aa, Homo sapiens; identical to SEQ ID NO: 754502

SEQ ID NO: 754504 - protein, 1025 aa, Homo sapiens; identical to SEQ ID NO: 754502

SEQ ID NO: 754505 - protein, 83 aa, Homo sapiens
GRMDTSTFRRENRRLDNLLVLSATLVPPSAVSEDEATLLLPELRRFGWGKTASSIEMVPSGVLYHTKYCCWINLPVFNKDTFI

SEQ ID NO: 754506 - protein, 1025 aa, Homo sapiens; identical to SEQ ID NO: 754502

SEQ ID NO: 754507 - protein, 854 aa, Homo sapiens
MEPFTNDRLQLPRNMIENSMFEEEPDVVDLAKEPCLHPLEPDEVEYEPRGSRLLVRGLGEHEMEEDEEDYESSAKLLGMSFMNRSSGLRNSATGYRQSPDGACSVPSARTMVVCAFVIVVAVSVIMVIYLLPRCTFTKEGCHKKNQSIGLIQPFATNGKLFPWAQIRLPTAVVPLRYELSLHPNLTSMTFRGSVTISVQALQVTWNIILHSTGHNISRVTFMSAVSSQEKQAEILEYAYHGQIAIVAPEALLAGHNYTLKIEYSANISSSYYGFYGFSYTDESNEKKYFAATQFEPLAARSAFPCFDEPAFKATFIIKIIRDEQYTALSNMPKKSSVVLDDGLVQDEFSESVKMSTYLVAFIVGEMKNLSQDVNGTLVSIYAVPENIGQVHYALETTVKLLEFFQNYFEIQYPLKKLDLVAIPDFEAGAMENWGLLTFREETLLYDSNTSSMADRKLVTKIIAHELAHQWFGNLVTMKWWNDLWLNEGFATFMEYFSLEKIFKELSSYEDFLDARFKTMKKDSLNSSHPISSSVQSSEQIEEMFDSLSYFKGSSLLLMLKTYLSEDVFQHAVVLYLHNHSYASIQSDDLWDSFNEVTNQTLDVKRMMKTWTLQKGFPLVTVQKKGKELFIQQERFFLNMKPEIQPSDTSYLWHIPLSYVTEGRNYSKYQSVSLLDKKSGVINLTEEVLWVKVNINMNGYYIVHYADDDWEALIHQLKINPYVLSDKDRANLINNIFELAGLGKVPLKRAFDLINYLGNENHTAPITEALFQTDLIYNLLEKLGYMDLASRLVTRVFKLLQNQIQQQTWTDEGTPSMRELRSALLEFACTHNLGNCSTTAMKLFDDWMASNGTQR

SEQ ID NO: 754508 - protein, 668 aa, Homo sapiens
MEPFTNDRLQLPRNMIENSMFEEEPDVVDLAKEPCLHPLEPDEVEYEPRGSRLLVRGLGEHEMEEDEEDYESSAKLLGMSFMNRSSGLRNSATGYRQSPDGACSVPSARTMVVCAFVIVVAVSVIMVIYLLPRCTFTKEGCHKKNQSIGLIQPFATNGKLFPWAQIRLPTAVVPLRYELSLHPNLTSMTFRGSVTISVQALQVTWNIILHSTGHNISRVTFMSAVSSQEKQAEILEYAYHGQIAIVAPEALLAGHNYTLKIEYSANISSSYYGFYGFSYTDESNEKKYFAATQFEPLAARSAFPCFDEPAFKATFIIKIIRDEQYTALSNMPKKSSVVLDDGLVQDEFSESVKMSTYLVAFIVGEMKNLSQDVNGTLVSIYAVPENIGQVHYALETTVKLLEFFQNYFEIQYPLKKLDLVAIPDFEAGAMENWGLLTFREETLLYDSNTSSMADRKLVTKIIAHELAHQWFGNLVTMKWWNDLWLNEGFATFMEYFSLEKIFKELSSYEDFLDARFKTMKKDSLNSSHPISSSVQSSEQIEEMFDSLSYFKGSSLLLMLKTYLSEDVFQHAVVLYLHNHSYASIQSDDLWDSFNEVTNQTLDVKRMMKTWTLQKGFPLVTVQKKGKELFIQQERFFLNMKPEIQPSDTRYMPSFFSCHLFCTLRWKYF

SEQ ID NO: 754509 - protein, 1011 aa, Homo sapiens
MIENSMFEEEPDVVDLAKEPCLHPLEPDEVEYEPRGSRLLVRGLGEHEMEEDEEDYESSAKLLGMSFMNRSSGLRNSATGYRQSPDGACSVPSARTMVVCAFVIVVAVSVIMVIYLLPRCTFTKEGCHKKNQSIGLIQPFATNGKLFPWAQIRLPTAVVPLRYELSLHPNLTSMTFRGSVTISVQALQVTWNIILHSTGHNISRVTFMSAVSSQEKQAEILEYAYHGQIAIVAPEALLAGHNYTLKIEYSANISSSYYGFYGFSYTDESNEKKYFAATQFEPLAARSAFPCFDEPAFKATFIIKIIRDEQYTALSNMPKKSSVVLDDGLVQDEFSESVKMSTYLVAFIVGEMKNLSQDVNGTLVSIYAVPENIGQVHYALETTVKLLEFFQNYFEIQYPLKKLDLVAIPDFEAGAMENWGLLTFREETLLYDSNTSSMADRKLVTKIIAHELAHQWFGNLVTMKWWNDLWLNEGFATFMEYFSLEKIFKELSSYEDFLDARFKTMKKDSLNSSHPISSSVQSSEQIEEMFDSLSYFKGSSLLLMLKTYLSEDVFQHAVVLYLHNHSYASIQSDDLWDSFNEVTNQTLDVKRMMKTWTLQKGFPLVTVQKKGKELFIQQERFFLNMKPEIQPSDTSYLWHIPLSYVTEGRNYSKYQSVSLLDKKSGVINLTEEVLWVKVNINMNGYYIVHYADDDWEALIHQLKINPYVLSDKDRANLINNIFELAGLGKVPLKRAFDLINYLGNENHTAPITEALFQTDLIYNLLEKLGYMDLASRLVTRVFKLLQNQIQQQTWTDEGTPSMRELRSALLEFACTHNLGNCSTTAMKLFDDWMASNGTQSLPTDVMTTVFKVGAKTDKGWSFLLGKYISIGSEAEKNKILEALASSEDVRKLYWLMKSSLNGDNFRTQKLSFIIRTVGRHFPGHLLAWDFVKENWNKLVQKFPLGSYTIQNIVAGSTYLFSTKTHLSEVQAFFENQSEATFRLRCVQEALEVIQLNIQWMEKNLKSLTWWL

SEQ ID NO: 754510 - protein, 717 aa, Homo sapiens
MTQVLVEQVFSLQRDLLEYKRVIILDFKKELEILSCGRNVYALEIYKSYECRNEISPVCSVNIKWLDILNCKKYQLHHKLGPSSILFYLSLFKGNFVVIVSAFMNFLTITGSTLIFLAICVSILWDISHHRNTRVVRRLLGVQSKSSCISIIGYQTESFLLGNKKSVKCWLGAVAYACNPSILGCQGGQPFEARSSKPVWPTWQNPISTKNIKISWAWWCTPVIPAPGRHENHLNPGGGGCSEPRLCHCTPAWVTKRDCLKKQKTKKKELSVDFVGLLQFVEMDFKKSLFKPKYLEPSSAIRLLNIHIIPMFHGASGKANTSEMSHLQGQHFLGCKTRCGFCYLGLSKNWGHGYDIAFLLTYAFVTFVFIGIKSLFKELPSPFIPFVFLKTKLYIYLLVFAFFYFVLHSLLCQLSTTCKVAVQKYGKSPPLTLLPVWVTANGKVDRFFSVVFLGVYTLKMYIHVFDSFYIISFCIFFFLMKSDISSYENFIYPSHFTCMGSSYRLVIWFPSLEEGGDVERRASYILLKVCTDVFAILCYFILYFIHPFCGRVDKTRWSKSMTDVPFAFLLIVRMDNNCQSSPSCCCFDLVLGLGLYIILSSVYKYCATFLYFILYLFPCMDAYILNENGGSEYDKSLFPFPYCLFEAIANRVVCFVLGCGGEWSMYLMYINKLATTLYYYIWFTLCPSHGCESTNEMWRSRCITVSHSPHPLLTAGQ

SEQ ID NO: 754511 - protein, 1025 aa, Homo sapiens; identical to SEQ ID NO: 754502

SEQ ID NO: 754512 - protein, 953 aa, Homo sapiens
MEPFTNDRLQLPRNMIENSMFEEEPDVVDLAKEPCLHPLEPDEVEYEPRGSRLLVRGLGEHEMEEDEEDYESSAKLLGMSFMNRSSGLRNSATGYRQSPDGACSVPSARTMVVCAFVIVVAVSVIMVIYLLPRCTFTKEGCHKKNQSIGLIQPFATNGKLFPWAQIRLPTAVVPLRYELSLHPNLTSMTFRGSVTISVQALQVTWNIILHSTGHNISRVTFMSAVSSQEKQAEILEYAYHGQIAIVAPEALLAGHNYTLKIEYSANISSSYYGFYGFSYTDESNEKKYFAATQFEPLAARSAFPCFDEPAFKATFIIKIIRDEQYTALSNMPKKSSVVLDDGLVQDEFSESVKMSTYLVAFIVGEMKNLSQDVNGTLVSIYAVPENIGQVHYALETTVKLLEFFQNYFEIQYPLKKLDLVAIPDFEAGAMENWGLLTFREETLLYDSNTSSMADRKLVTKIIAHELAHQWFGNLVTMKWWNDLWLNEGFATFMEYFSLEKIFKELSSYEDFLDARFKTMKKDSLNSSHPISSSVQSSEQIEEMFDSLSYFKGSSLLLMLKTYLSEDVFQHAVVLYLHNHSYASIQSDDLWDSFNEVTNQTLDVKRMMKTWTLQKGFPLVTVQKKGKELFIQQERFFLNMKPEIQPSDTSYLWHIPLSYVTEGRNYSKYQSVSLLDKKSGVINLTEEVLWVKVNINMNGYYIVHYADDDWEALIHQLKINPYVLSDKDRANLINNIFELAGLGKVPLKRAFDLINYLGNENHTAPITEALFQTDLIYNLLEKLGYMDLASRLVTRVFKLLQNQIQQQTWTDEGTPSMRELRSALLEFACTHNLGNCSTTAMKLFDDWMASNGTQSLPTDVMTTVFKVGAKTDKGWSFLLGKYISIGSEAEKNKILEALASSEDVRKLYWYEITEEYDIQKPKEYKHCALGQELIFEGISFPHFCYRPGLSWTVW

SEQ ID NO: 754513 - protein, 287 aa, Homo sapiens [sequence omitted]

SEQ ID NO: 754514 - protein, 1226 aa, Homo sapiens
MEPEWEAAFTLQMKLTHVISMMQDWCASDEKVLIEAYKKCLAVLMQCHGGYTDGEQPITLSICGHSVETIRYCVSQEKVSIHLPVSRLLAGLHVLLSKSEVAYKFPELLPLSELSPPMLIEHPLRCLVLCAQVHAGMWRRNGFSLVNQIYYYHNVKCRREMFDKDVVMLQTGVSMMDPNHFLMIMLSRFELYQIFSTPDYGKRFSSEITHKDVVQQNNTLIEEMLYLIIMLVGERFSPGVGQVNATDEIKREIIHQLSIKPMAHSELVKSLPEDENKETGMESVIEAVAHFKKPGLTGRGMYELKPECAKEFNLYFYHFSRAEQSKAEEAQRKLKRQNREDTALPPPVLPPFCPLFASLVNILQSDVMLCIMGTILQWAVEHNGYAWSESMLQRVLHLIGMALQEEKQHLENVTEEHVVTFTFTQKISKPGEAPKNSPSILAMLETLQNAPYLEVHKDMIRWILKTFNAVKKMRESSPTSPVAETEGTIMEESSRDKDKAERKRKAEIARLRREKIMAQMSEMQRHFIDENKELFQQTLELDASTSAVLDHSPVASDMTLTALGPTQTQVPEQRQFVTCILCQEEQEVKVESRAMVLAAFVQRSTVLSKNRSKFIQDPEKYDPLFMHPDLSCGTHTSSCGHIMHAHCWQRYFDSVQAKEQRRQQRLRLHTSYDVENGEFLCPLCECLSNTVIPLLLPPRNIFNNRLNFSDQPNLTQWIRTISQQIKALQFLRKEESTPNNASTKNSENVDELQLPEGFRPDFRPKIPYSESIKEMLTTFGTATYKVGLKVHPNEEDPRVPIMCWGSCAYTIQSIERILSDEDKPLFGPLPCRLDDCLRSLTRFAAAHWTVASVSVVQGHFCKLFASLVPNDSHEELPCILDIDMFHLLVGLVLAFPALQCQDFSGISLGTGDLHIFHLVTMAHIIQILLTSCTEENGMDQENPPCEEESAVLALYKTLHQYTGSALKEIPSGWHLWRSVRAGIMPFLKCSALFFHYLNGVPSPPDIQVPGTSHFEHLCSYLSLPNNLICLFQENSEIMNSLIESWCRNSEVKRYLEGERDAIRYPRESNKLINLPEDYSSLINQASNFSCPKSGGDKSRAPTLCLVCGSLLCSQSYCCQTELEGEDVGACTAHTYSCGSGVGIFLRVRECQVLFLAGKTKGCFYSPPYLDDYGETDQGLRRGNPLHLCKERFKKIQKLWHQHSVTEEIGHAQEANQTLVGIDWQHL

SEQ ID NO: 754515 - protein, 1257 aa, Homo sapiens
MLGESRGCAFDTKCMRMITTPITRQVGQHIEMEPEWEAAFTLQMKLTHVISMMQDWCASDEKVLIEAYKKCLAVLMQCHGGYTDGEQPITLSICGHSVETIRYCVSQEKVSIHLPVSRLLAGLHVLLSKSEVAYKFPELLPLSELSPPMLIEHPLRCLVLCAQVHAGMWRRNGFSLVNQIYYYHNVKCRREMFDKDVVMLQTGVSMMDPNHFLMIMLSRFELYQIFSTPDYGKRFSSEITHKDVVQQNNTLIEEMLYLIIMLVGERFSPGVGQVNATDEIKREIIHQLSIKPMAHSELVKSLPEDENKETGMESVIEAVAHFKKPGLTGRGMYELKPECAKEFNLYFYHFSRAEQSKAEEAQRKLKRQNREDTALPPPVLPPFCPLFASLVNILQSDVMLCIMGTILQWAVEHNGYAWSESMLQRVLHLIGMALQEEKQHLENVTEEHVVTFTFTQKISKPGEAPKNSPSILAMLETLQNAPYLEVHKDMIRWILKTFNAVKKMRESSPTSPVAETEGTIMEESSRDKDKAERKRKAEIARLRREKIMAQMSEMQRHFIDENKELFQQTLELDASTSAVLDHSPVASDMTLTALGPTQTQVPEQRQFVTCILCQEEQEVKVESRAMVLAAFVQRSTVLSKNRSKFIQDPEKYDPLFMHPDLSCGTHTSSCGHIMHAHCWQRYFDSVQAKEQRRQQRLRLHTSYDVENGEFLCPLCECLSNTVIPLLLPPRNIFNNRLNFSDQPNLTQWIRTISQQIKALQFLRKEESTPNNASTKNSENVDELQLPEGFRPDFRPKIPYSESIKEMLTTFGTATYKVGLKVHPNEEDPRVPIMCWGSCAYTIQSIERILSDEDKPLFGPLPCRLDDCLRSLTRFAAAHWTVASVSVVQGHFCKLFASLVPNDSHEELPCILDIDMFHLLVGLVLAFPALQCQDFSGISLGTGDLHIFHLVTMAHIIQILLTSCTEENGMDQENPPCEEESAVLALYKTLHQYTGSALKEIPSGWHLWRSVRAGIMPFLKCSALFFHYLNGVPSPPDIQVPGTSHFEHLCSYLSLPNNLICLFQENSEIMNSLIESWCRNSEVKRYLEGERDAIRYPRESNKLINLPEDYSSLINQASNFSCPKSGGDKSRAPTLCLVCGSLLCSQSYCCQTELEGEDVGACTAHTYSCGSGVGIFLRVRECQVLFLAGKTKGCFYSPPYLDDYGETDQGLRRGNPLHLCKERFKKIQKLWHQHSVTEEIGHAQEANQTLVGIDWQHL

SEQ ID NO: 754516 - protein, 710 aa, Homo sapiens [sequence omitted]

SEQ ID NO: 754517 - protein, 1017 aa, Homo sapiens
MLGESRGCAFDTKCMRMITTPITRQVGQHIEMEPEWEAAFTLQMKLTHVISMMQDWCASDEKVLIEAYKKCLAVLMQCHGGYTDGEQPITLSICGHSVETIRYCVSQEKVSIHLPVSRLLAGLHVLLSKSEVAYKFPELLPLSELSPPMLIEHPLRCLVLCAQVHAGMWRRNGFSLVNQIYYYHNVKCRREMFDKDVVMLQTGVSMMDPNHFLMIMLSRFELYQIFSTPDYGKRFSSEITHKDVVQQNNTLIEEMLYLIIMLVGERFSPGVGQVNATDEIKREIIHQLSIKPMAHSELVKSLPEDENKETGMESVIEAVAHFKKPGLTGRGMYELKPECAKEFNLYFYHFSRAEQSKAEEAQRKLKRQNREDTALPPPVLPPFCPLFASLVNILQSDVMLCIMGTILQWAVEHNGYAWSESMLQRVLHLIGMALQEEKQHLENVTEEHVVTFTFTQKISKPGEAPKNSPSILAMLETLQNAPYLEVHKDMIRWILKTFNAVKKMRESSPTSPVAETEGTIMEESSRDKDKAERKRKAEIARLRREKIMAQMSEMQRHFIDENKELFQQTLELDASTSAVLDHSPVASDMTLTALGPTQTQVPEQRQFVTCILCQEEQEVKVESRAMVLAAFVQRSTVLSKNRSKFIQDPEKYDPLFMHPDLSCGTHTSSCGHIMHAHCWQRYFDSVQAKEQRRQQRLRLHTSYDVENGEFLCPLCECLSNTVIPLLLPPRNIFNNRLNFSDQPNLTQWIRTISQQIKALQFLRKEESTPNNASTKNSENVDELQLPEGFRPDFRPKIPYSESIKEMLTTFGTATYKVGLKVHPNEEDPRVPIMCWGSCAYTIQSIERILSDEDKPLFGPLPCRLDDCLRSLTRFAAAHWTVASVSVVQGHFCKLFASLVPNDSHEELPCILDIDMFHLLVGLVLAFPALQCQDFSGISLGTGDLHIFHLVTMAHIIQILLTSCTEENGMDQENPPCEEESAVLALYKTLHQYTGSALKEIPSGWHLWRKYGNVRCYF

SEQ ID NO: 754518 - protein, 1257 aa, Homo sapiens; identical to SEQ ID NO: 754515

SEQ ID NO: 754519 - protein, 1257 aa, Homo sapiens; identical to SEQ ID NO: 754515

SEQ ID NO: 754520 - protein, 1120 aa, Homo sapiens
MLGESRGCAFDTKCMRMITTPITRQVGQHIEMEPEWEAAFTLQMKLTHVISMMQDWCASDEKVLIEAYKKCLAVLMQCHGGYTDGEQPITLSICGHSVETIRYCVSQEKVSIHLPVSRLLAGLHVLLSKSEVAYKFPELLPLSELSPPMLIEHPLRCLVLCAQVHAGMWRRNGFSLVNQIYYYHNVKCRREMFDKDVVMLQTGVSMMDPNHFLMIMLSRFELYQIFSTPDYGKRFSSEITHKDVVQQNNTLIEEMLYLIIMLVGERFSPGVGQVNATDEIKREIIHQLSIKPMAHSELVKSLPEDENKETGMESVIEAVAHFKKPGLTGRGMYELKPECAKEFNLYFYHFSRAEQSKAEEAQRKLKRQNREDTALPPPVLPPFCPLFASLVNILQSDVMLCIMGTILQWAVEHNGYAWSESMLQRVLHLIGMALQEEKQHLENVTEEHVVTFTFTQKISKPGEAPKNSPSILAMLETLQNAPYLEVHKDMIRWILKTFNAVKKMRESSPTSPVAETEGTIMEESSRDKDKAERKRKAEIARLRREKIMAQMSEMQRHFIDENKELFQQTLELDASTSAVLDHSPVASDMTLTALGPTQTQVPEQRQFVTCILCQEEQEVKVESRAMVLAAFVQRSTVLSKNRSKFIQDPEKYDPLFMHPDLSCGTHTSSCGHIMHAHCWQRYFDSVQAKEQRRQQRLRLHTSYDVENGEFLCPLCECLSNTVIPLLLPPRNIFNNRLNFSDQPNLTQWIRTISQQIKALQFLRKEESTPNNASTKNSENVDELQLPEGFRPDFRPKIPYSESIKEMLTTFGTATYKVGLKVHPNEEDPRVPIMCWGSCAYTIQSIERILSDEDKPLFGPLPCRLDDCLRSLTRFAAAHWTVASVSVVQGHFCKLFASLVPNDSHEELPCILDIDMFHLLVGLVLAFPALQCQDFSGISLGTGDLHIFHLVTMAHIIQILLTSCTEENGMDQENPPCEEESAVLALYKTLHQYTGSALKEIPSGWHLWRSVRAGIMPFLKCSALFFHYLNGVPSPPDIQVPGTSHFEHLCSYLSLPNNLICLFQENSEIMNSLIESWCRNSEVKRYLEGERDAIRYPRESNKLINLPEDYSSLINQASNFS

SEQ ID NO: 754521 - protein, 735 aa, Homo sapiens
MLGESRGCAFDTKCMRMITTPITRQVGQHIEMEPEWEAAFTLQMKLTHVISMMQDWCASDEKVLIEAYKKCLAVLMQCHGGYTDGEQPITLSICGHSVETIRYCVSQEKVSIHLPVSRLLAGLHVLLSKSEVAYKFPELLPLSELSPPMLIEHPLRCLVLCAQVHAGMWRRNGFSLVNQIYYYHNVKCRREMFDKDVVMLQTGVSMMDPNHFLMIMLSRFELYQIFSTPDYGKRFSSEITHKDVVQQNNTLIEEMLYLIIMLVGERFSPGVGQVNATDEIKREIIHQLSIKPMAHSELVKSLPEDENKETGMESVIEAVAHFKKPGLTGRGMYELKPECAKEFNLYFYHFSRAEQSKAEEAQRKLKRQNREDTALPPPVLPPFCPLFASLVNILQSDVMLCIMGTILQWAVEHNGYAWSESMLQRVLHLIGMALQEEKQHLENVTEEHVVTFTFTQKISKPGEAPKNSPSILAMLETLQNAPYLEVHKDMIRWILKTFNAVKKMRESSPTSPVAETEGTIMEESSRDKDKAERKRKAEIARLRREKIMAQMSEMQRHFIDENKELFQQTLELDASTSAVLDHSPVASDMTLTALGPTQTQVPEQRQFVTCILCQEEQEVKVESRAMVLAAFVQRSTVLSKNRSKFIQDPEKYDPLFMHPDLSCGTHTSSCGHIMHAHCWQRYFDSVQAKEQRRQQRLRLHTSYDVENGEFLCPLCECLSNTVIPLLLPPRNIFNK

SEQ ID NO: 754522 - protein, 767 aa, Homo sapiens
MTRKFVKRSIFLKMRESSPTSPVAETEGTIMEESSRDKDKAERKRKAEIARLRREKIMAQMSEMQRHFIDENKELFQQTLELDASTSAVLDHSPVASDMTLTALGPTQTQVPEQRQFVTCILCQEEQEVKVESRAMVLAAFVQRSTVLSKNRSKFIQDPEKYDPLFMHPDLSCGTHTSSCGHIMHAHCWQRYFDSVQAKEQRRQQRLRLHTSYDVENGEFLCPLCECLSNTVIPLLLPPRNIFNNRLNFSDQPNLTQWIRTISQQIKALQFLRKEESTPNNASTKNSENVDELQLPEGFRPDFRPKIPYSESIKEMLTTFGTATYKVGLKVHPNEEDPRVPIMCWGSCAYTIQSIERILSDEDKPLFGPLPCRLDDCLRSLTRFAAAHWTVASVSVVQGHFCKLFASLVPNDSHEELPCILDIDMFHLLVGLVLAFPALQCQDFSGISLGTGDLHIFHLVTMAHIIQILLTSCTEENGMDQENPPCEEESAVLALYKTLHQYTGSALKEIPSGWHLWRSVRAGIMPFLKCSALFFHYLNGVPSPPDIQVPGTSHFEHLCSYLSLPNNLICLFQENSEIMNSLIESWCRNSEVKRYLEGERDAIRYPRESNKLINLPEDYSSLINQASNFSCPKSGGDKSRAPTLCLVCGSLLCSQSYCCQTELEGEDVGACTAHTYSCGSGVGIFLRVRECQVLFLAGKTKGCFYSPPYLDDYGETDQGLRRGNPLHLCKERFKKIQKLWHQHSVTEEIGHAQEANQTLVGIDWQHL

SEQ ID NO: 754523 - protein, 1257 aa, Homo sapiens; identical to SEQ ID NO: 754515

SEQ ID NO: 754524 - protein, 452 aa, Homo sapiens
MLTTFGTATYKVGLKVHPNEEDPRVPIMCWGSCAYTIQSIERILSDEDKPLFGPLPCRLDDCLRSLTRFAAAHWTVASVSVVQGHFCKLFASLVPNDSHEELPCILDIDMFHLLVGLVLAFPALQCQDFSGISLGTGDLHIFHLVTMAHIIQILLTSCTEENGMDQENPPCEEESAVLALYKTLHQYTGSALKEIPSGWHLWRSVRAGIMPFLKCSALFFHYLNGVPSPPDIQVPGTSHFEHLCSYLSLPNNLICLFQENSEIMNSLIESWCRNSEVKRYLEGERDAIRYPRESNKLINLPEDYSSLINQASNFSCPKSGGDKSRAPTLCLVCGSLLCSQSYCCQTELEGEDVGACTAHTYSCGSGVGIFLRVRECQVLFLAGKTKGCFYSPPYLDDYGETDQGLRRGNPLHLCKERFKKIQKLWHQHSVTEEIGHAQEANQTLVGIDWQHL

SEQ ID NO: 754525 - protein, 1257 aa, Homo sapiens; identical to SEQ ID NO: 754515

SEQ ID NO: 754526 - protein, 681 aa, Homo sapiens
MLGESRGCAFDTKCMRMITTPITRQVGQHIEMEPEWEAAFTLQMKLTHVISMMQDWCASDEKVLIEAYKKCLAVLMQCHGGYTDGEQPITLSICGHSVETIRYCVSQEKVSIHLPVSRLLAGLHVLLSKSEVAYKFPELLPLSELSPPMLIEHPLRCLVLCAQVHAGMWRRNGFSLVNQIYYYHNVKCRREMFDKDVVMLQTGVSMMDPNHFLMIMLSRFELYQIFSTPDYGKRFSSEITHKDVVQQNNTLIEEMLYLIIMLVGERFSPGVGQVNATDEIKREIIHQLSIKPMAHSELVKSLPEDENKETGMESVIEAVAHFKKPGLTGRGMYELKPECAKEFNLYFYHFSRAEQSKAEEAQRKLKRQNREDTALPPPVLPPFCPLFASLVNILQSDVMLCIMGTILQWAVEHNGYAWSESMLQRVLHLIGMALQEEKQHLENVTEEHVVTFTFTQKISKPGEAPKNSPSILAMLETLQNAPYLEVHKDMIRWILKTFNAVKKMRESSPTSPVAETEGTIMEESSRDKDKAERKRKAEIARLRREKIMAQMSEMQRHFIDENKELFQQTLELDASTSAVLDHSPVASDMTLTALGPTQTQVPEQRQFVTCILCQEEQEVKVESRAMVLAAFVQRSTVLSKNRSKFIQDPEKYDPLFMHPDLSCGTHTSSCGHIMHAHCWQR

SEQ ID NO: 754527 - protein, 652 aa, Homo sapiens
MLGESRGCAFDTKCMRMITTPITRQVGQHIEMEPEWEAAFTLQMKLTHVISMMQDWCASDEKVLIEAYKKCLAVLMQCHGGYTDGEQPITLSICGHSVETIRYCVSQEKVSIHLPVSRLLAGLHVLLSKSEVAYKFPELLPLSELSPPMLIEHPLRCLVLCAQVHAGMWRRNGFSLVNQIYYYHNVKCRREMFDKDVVMLQTGVSMMDPNHFLMIMLSRFELYQIFSTPDYGKRFSSEITHKDVVQQNNTLIEEMLYLIIMLVGERFSPGVGQVNATDEIKREIIHQLSIKPMAHSELVKSLPEDENKETGMESVIEAVAHFKKPGLTGRGMYELKPECAKEFNLYFYHFSRAEQSKAEEAQRKLKRQNREDTALPPPVLPPFCPLFASLVNILQSDVMLCIMGTILQWAVEHNGYAWSESMLQRVLHLIGMALQEEKQHLENVTEEHVVTFTFTQKISKPGEAPKNSPSILAMLETLQNAPYLEVHKDMIRWILKTFNAVKKMRESSPTSPVAETEGTIMEESSRDKDKAERKRKAEIARLRREKIMAQMSEMQRHFIDENKELFQQTLELDASTSAVLDHSPVASDMTLTALGPTQTQVPEQRQFVTCILCQEEQEVKVESRAMVLAAFVQRSTVLSKNRSKFIQDPGKS

SEQ ID NO: 754528 - protein, 338 aa, Homo sapiens
SGGGGGGGGGGIVRAPAARPGRSRTRRGRLLPHGPMNQPGGAAAPQADGASAAGRKSTASRERLKRSQKSTKVEGPEPVPAEASLSAEQGTMTEVKVKTELPDDYIQEVIWQGEAKEEKKAVSKDGTSDVPAEICVVIGGVRNQQTLDGKAPEGSPHGGSVRSRYSGTWIFDQALRYASGSYECGICGKKYKYYNCFQTHVRAHRDTEATSGEGASQSNNFRYTCDICGKKYKYYSCFQEHRDLHAVDVFSVEGAPENRADPFDQGVVATDEVKEEPPEPFQKIGPMNNITSDIFKKKEVRQCQKRETGNYTCEFCGKQYKYYTPYQEHVALHAPISE

SEQ ID NO: 754529 - protein, 318 aa, Homo sapiens
SGGGGGGGGGGIVRAPAARPGRSRTRRGRLLPHGPMNQPGGAAAPQADGASAAGRKSTASRERLKRSQKSTKVEGPEPVPAEASLSAEQGTMTEVKVKTELPDDYIQEVIWQGEAKEEKKAVSKDGTSDVPAEICVVIGGVRNQQTLDGKAPEGSPHGGSVRSRYSGTWIFDQALRYASGSYECGICGKKYKYYNCFQTHVRAHRDTEATSGEGASQSNNFRYTCDICGKKYKYYSCFQEHRDLHAVDVFSVEGAPENRADPFDQGVVATDEVKEEPPEPFQKIGPKTGNYTCEFCGKQYKYYTPYQEHVALHAPISE

SEQ ID NO: 754530 - protein, 374 aa, Homo sapiens
HASGRPQSRGTMAPAGRPGAKKGILERLESGEVVIGDGSFLITLEKRGYVKAGLWTPEAVIEHPDAVRQLHMEFLRAGSNVMQTFTFSASEDNMESKWEDVNAAACDLAREVAGKGDALVAGGICQTSIYKYQKDEARIKKLFRQQLEVFAWKNVDFLIAEYFEHVEEAVWAVEVLKESDRPVAVTMCIGPEGDMHDITPGECAVRLVKAGASIVGVNCRFGPDTSLKTMELMKEGLEWAGLKAHLMVQPLGFHAPDCGKEGFVDLPEYPFGLESRVATRWDIQKYAREAYNLGVRYIGGCCGFEPYHIRAIAEELAPERGFLPPASEKHGSWGSGLDMHTKPWIRARARREYWENLLPASGRPFCPSLSKPDF

SEQ ID NO: 754531 - protein, 107 aa, Homo sapiens
PRVRAPTEPRHHGTCWTPGGQEGEFRPLDPRGAPGRWAASDSVHTRRSSLAKPWGLGKTLGRDGPEPQFSPVTGWLAFMEPLLGAWRCTECCAQVISSSSQLSPFHR

SEQ ID NO: 754532 - protein, 374 aa, Homo sapiens; identical to SEQ ID NO: 754530

SEQ ID NO: 754533 - protein, 291 aa, Homo sapiens
HASGRPQSRGTMAPAGRPGAKKGILERLESGEVVIGDGSFLITLEKRGYVKAGLWTPEAVIEHPDAVRQLHMEFLRAGSNVMQTFTFSASEDNMESKWEDVNAAACDLAREVAGKGDALVAGGICQTSIYKYQKDEARIKKLFRQQLEVFAWKNVDFLIAEYFEHVEEAVWAVEVLKESDRPVAVTMCIGPEGDMHDITPGECAVRLVKAGASIVGVNCRFGPDTSLKTMELMKEGLEWAGLKAHLMVQPLGFHAPDCGKEGFVDLPEYPFGKLRCIVEVLVFLVTKSKWL

SEQ ID NO: 754534 - protein, 150 aa, Homo sapiens
MAPAGRPGAKKGILERLESGEVVIGDGSFLITLEKRGYVKAGLWTPEAVIEHPDAVRQLHMEFLRAGSNVMQTFTFSASEDNMESKWEDVNAAACDLAREVAGKGDALVAGGICQTSIYKYQKDEALKPDLEPFLTFILTMPCYLQLLSS

SEQ ID NO: 754535 - protein, 206 aa, Homo sapiens
  misc_feature (196)..(196): Xaa can be any naturally occurring amino acid
HASGRPQSRGTMAPAGRPGAKKGILERLESGEVVIGDGSFLITLEKRGYVKAGLWTPEAVIEHPDAVRQLHMEFLRAGSNVMQTFTFSASEDNMESKWEDVNAAACDLAREVAGKGDALVAGGICQTSIYKYQKDEARIKKLFRQQLEVFAWKNVDFLIAEYFEHVEEAVWAVEVFMHDITPGECAVKLVARAFIXGVLPLWPHTA

SEQ ID NO: 754536 - protein, 374 aa, Homo sapiens; identical to SEQ ID NO: 754530

SEQ ID NO: 754537 - protein, 374 aa, Homo sapiens; identical to SEQ ID NO: 754530

SEQ ID NO: 754538 - protein, 162 aa, Homo sapiens
MGTSALSKKPWWTLPQNFHAPMVFHMEEDQEELIFGHGDTYLRCIEVHSHTLIQLESWFTATGQTRVTVVGPHRARQWLLHMFCCVGSQDSYHHARGLEMLERVRSQPLTNDDLVTSISVPPYTGDLSLAPRISGTVCLSVPQPSPYQVIGCSGFHLSSLYP

SEQ ID NO: 754539 - protein, 248 aa, Homo sapiens
RARLARPRREPGPLEGSGARPRRYRCLLTIGQACSRCRRRRRRRPTQGVAQACGAPPSPPSFLPSKPSLGYLTPLWSRTRSEQSMDMGTSALSKKPWWTLPQNFHAPMVFHMEEDQEELIFGHGDTYLRCIEVHSHTLIQLESWFTATGQTRVTVVGPHRARQWLLHMFCCVGSQDSYHHARGLEMLERVRSQPLTNDDLVTSISVPPYTGDLSLAPRISGTVCLSVPQPSPYQVIGCSGFHLSSLYP

SEQ ID NO: 754540 - protein, 279 aa, Homo sapiens
SSAPRAAAARAGTPGRVGCAAQEVPLSPHNRPGLQPLPPLPPPPPPPPPPYSGSGPGLRRATLTSFIPTVKAQPWLPDPPVVSNSDYLLCGIISSLVESVSCVSAREHPIWSEQSMDMGTSALSKKPWWTLPQNFHAPMVFHMEEDQEELIFGHGDTYLRCIEVHSHTLIQLESWFTATGQTRVTVVGPHRARQWLLHMFCCVGSQDSYHHARGLEMLERVRSQPLTNDDLVTSISVPPYTGDLSLAPRISGTVCLSVPQPSPYQVIGCSGFHLSSLYP

SEQ ID NO: 754541 - protein, 285 aa, Homo sapiens
RVDAMMDVSGVGFPSKVPWKKMSAEELENQYCPSRWVVRLGAEEALRTYSQIGIEATTRARATRKSLLHVPYGDGEGEKVDIYFPDESSEALPFFLFFHGGYWQSGSKDESAFMVHPLTAQGVAVVIVAYGIAPKGTLDHMVDQVTRSVAFVQKRYPSNKGIYLCGHSAGAHLAAMMLLADWTKHGVTPNLRGFFLVSGVFDLEPIVYTSQNVALQLTLEDAQRNSPQLKVAQAQPVDPTCRVLVVVGQFDSPEFTSPGFSRAPGAREGERLRARGPYWIPRVAL

SEQ ID NO: 754542 - protein, 107 aa, Homo sapiens
RVDAMMDVSGVGFPSKVPWKKMSAEELENQYCPSRWVVRLGAEEALRTYSQIGIEATTRARATRKSLLHVPYGDGEGEKVDIYFPDESSEALPFFLFFHGGYWQSGR

SEQ ID NO: 754543 - protein, 231 aa, Homo sapiens
MVDQVTRSVAFVQKRYPSNKWVLPVDFLPVGPQWVGGQCNQYLGYSQAAPLACGAESKLGLFEGGLMLWGNCVQIQLSALTPPRGIYLCGHSAGAHLAAMMLLADWTKHGVTPNLRGFFLVSGVFDLEPIVYTSQNVALQLTLEDAQRNSPQLKVAQAQPVDPTCRVLVVVGQFDSPEFHRQSWEFYQTLCQGEWKASFEELHDVDHFEIVENLTQKDNVLTQIILKTIFQ

SEQ ID NO: 754544 - protein, 231 aa, Homo sapiens; identical to SEQ ID NO: 754543

SEQ ID NO: 754545 - protein, 400 aa, Homo sapiens
RVDAMMDVSGVGFPSKVPWKKMSAEELENQYCPSRWVVRLGAEEALRTYSQIGIEATTRARATRKSLLHVPYGDGEGEKVDIYFPDESSEALPFFLFFHGGYWQSGSKDESAFMVHPLTAQGVAVVIVAYGIAPKGNRSGCCRSEGRWALGGSASLTQLMLSVQGTLDHMVDQVTRSVAFVQKRYPSNKWVLPVDFLPVGPQWVGGQCNQYLGYSQAAPLACGAESKLGLFEGGLMLWGNCVQIQLSALTPPRGIYLCGHSAGAHLAAMMLLADWTKHGVTPNLRGFFLVSGVFDLEPIVYTSQNVALQLTLEDAQRNSPQLKVAQAQPVDPTCRVLVVVGQFDSPEFHRQSWEFYQTLCQGEWKASFEELHDVDHFEIVENLTQKDNVLTQIILKTIFQ

SEQ ID NO: 754546 - protein, 115 aa, Homo sapiens
RVDAMMDVSGVGFPSKVPWKKMSAEELENQYCPSRWVVRLGAEEALRTYSQIGIEATTRARATRKSLLHVPYGDGEGEKVDIYFPDESSEALPFFLFFHGGYWQSGRLFPGEWGL

SEQ ID NO: 754547 - protein, 131 aa, Homo sapiens
MGEGEEAHSVEKESLTEPHVCALQELENQYCPSRWVVRLGAEEALRTYSQIGIEATTRARATRKSLLHVPYGDGEGEKVDIYFPDESSEALPFFLFFHGGYWQSGRPCVKESGKPHLKSSTMWTTLKLLRI

SEQ ID NO: 754548 - protein, 108 aa, Homo sapiens
MGEGEEAHSVEKESLTEPHVCALQELENQYCPSRWVVRLGAEEALRTYSQIGIEATTRARATRKSLLHVPYGDGEGEKVDIYFPDESSEALPFFLFFHGGYWQSGRLS

SEQ ID NO: 754549 - protein, 88 aa, Homo sapiens
RVDAMMDVSGVGFPSKVPWKKMSAEELENQYCPSRWVVRLGAEEALRTYSQIGIEDYLENNLPVVLTILGAWSTCIPPWEASPKSFRS

SEQ ID NO: 754550 - protein, 231 aa, Homo sapiens; identical to SEQ ID NO: 754543

SEQ ID NO: 754551 - protein, 157 aa, Homo sapiens [sequence omitted]

SEQ ID NO: 754552 - protein, 153 aa, Homo sapiens
MSPMETAKGRKWTFTSPTSRLKPCLSSCSFTEDTGRAEGFFLVSGVFDLEPIVYTSQNVALQLTLEDAQRNSPQLKVAQAQPVDPTCRVLVVVGQFDSPEFHRQSWEFYQTLCQGEWKASFEELHDVDHFEIVENLTQKDNVLTQIILKTIFQ

SEQ ID NO: 754553 - protein, 75 aa, Homo sapiens
TDKALIRPTHRLELKPAVLPVLTRDAYVAERKTLCQGEWKASFEELHDVDHFEIVENLTQKDNVLTQIILKTIFQ

SEQ ID NO: 754554 - protein, 558 aa, Homo sapiens
MYRYLAKALLPSRAGPAALGSAANHSAALLGRGRGQPAAASQPGLALAARRHYSELVADREDDPNFFKMVEGFFDRGASIVEDKLVKDLRTQESEEQKRNRVRGILRIIKPCNHVLSLSFPIRRDDGSWEVIEGYRAQHSQHRTPCKGGIRYSTDVSVDEVKALASLMTYKCAVVDVPFGGAKAGVKINPKNYTENELEKITRRFTMELAKKGFIGPGVDVPAPDMNTGEREMSWIADTYASTIGHYDINAHACVTGKPISQGGIHGRISATGRGVFHGIENFINEASYMSILGMTPGFRDKTFVVQGFGNVGLHSMRYLHRFGAKCIAVGESDGSIWNPDGIDPKELEDFKLQHGSILGFPKAKPYEGSILEVDCDILIPAATEKQLTKSNAPRVKAKIIAEGANGPTTPEADKIFLERNILVIPDLYLNAGGVTVSYFEWLKNLNHVSYGRLTFKYERDSNYHLLLSVQESLERKFGKHGGTIPIVPTAEFQDSISGASEKDIVHSALAYTMERSARQIMHTAMKYNLGLDLRTAAYVNAIEKVFKVYSEAGVTFT

SEQ ID NO: 754555 - protein, 226 aa, Homo sapiens
SSGINAECPLRPGTLLSAFFSPHPSLYLQPPMAPKKPEPKKDDAKAAPKAAPAPAPPPEPERPKEVEFDASKIKIEFTPEQIEEFKEAFMLFDRTPKCEMKITYGQCGDVLRALGQNPTQAEVLRVLGKPRQEELNTKMMDFETFLPMLQHISKNKDTGTYEDFVEGLRVFDKEGNGTVMGAELRHVLATLGERLTEDEVEKLMAGQEDSNGCINYEAFVKHIMSS

SEQ ID NO: 754556 - protein, 195 aa, Homo sapiens
MAPKKPEPKKDDAKAAPKAAPAPAPPPEPERPKEVEFDASKIKIEFTPEQIEEFKEAFMLFDRTPKCEMKITYGQCGDVLRALGQNPTQAEVLRVLGKPRQEELNTKMMDFETFLPMLQHISKNKDTGTYEDFVEGLRVFDKEGNGTVMGAELRHVLATLGERLTEDEVEKLMAGQEDSNGCINYEAFVKHIMSS

SEQ ID NO: 754557 - protein, 195 aa, Homo sapiens; identical to SEQ ID NO: 754556

SEQ ID NO: 754558 - protein, 226 aa, Homo sapiens; identical to SEQ ID NO: 754555

SEQ ID NO: 754559 - protein, 171 aa, Homo sapiens
MAPKKPEPKKDDAKAAPKAAPAPAPPPEPERPKEVEFDASKIKIEFTPEQIEEFKEAFMLFDRTPKCEMKITYGQCGDVLRALGQNPTQAEVLRVLGKPRQEELNTKMMDFETFLPMLQHISKNKDTGTYEDFVEGLRVFDKEGNGTVMGAELRHVLATLGERLVQEGRKL

SEQ ID NO: 754560 - protein, 74 aa, Homo sapiens
SAPSLLCRALGEVHTGKAASFTPRCRRALAGWVPEEMFSLHFVIVSVMDTDDDVLAPYHECSLQFAARVTRASC

SEQ ID NO: 754561 - protein, 309 aa, Homo sapiens
MLLILLSVALLALSSAQSLNEDVSQEESPSVISGKPEGRRPQGGNQPQRTPPPPGKPEGRPPQGGNQSQGPPPRPGKPEGPPPQGGNQSQGPPPRPGKPEGQPPQGGNQSQGPPPRPGKPEGPPPQGGNQSQGPPPRPGKPEGPPPQGGNQSQGPPPRPGKPEGPPPQGGNQSQGPPPHPGKPEGPPPQGGNQSQGPPPRPGKPEGPPPQGGNQSQGPPPRPGKPEGSPSQGGNKPQGPPPHPGKPQGPPPQEGNKPQRPPPPGRPQGPPPPGGNPQQPLPPPAGKPQGPPPPPQGGRPHRPPQGQPPQ

SEQ ID NO: 754562 - protein, 309 aa, Homo sapiens; identical to SEQ ID NO: 754561

SEQ ID NO: 754563 - protein, 121 aa, Homo sapiens
KPQSLPEPPQPQPGPPLPGPSPLCSSHTCLPWCGQACSCTGVLSVPSVPSIHDADTSLHPPGPTQTLLLRKTPGNSPSWTSSPPATLQLAGAIAVSLGVVTQCPTHLPPIGPSYNMLDNMC

SEQ ID NO: 754564 - protein, 104 aa, Homo sapiens
LYLLIRFVNNVYFFCYKFIIIITWTGRFSGLHPHQWGALLAHSQFAGLRTGPARSPPAQNERADSPWTHEATAPRGENGGLIPPALGEDDSLGGGQGSECYPGA

SEQ ID NO: 754565 - protein, 164 aa, Homo sapiens
MRIFAPNHVVAKSCFWYLVSQLKKMKKSSGEIATVGRVFEKLPLRVKNFGIWLHCDAQSSTHNMCREYGDLNHRGCCHPVLPRHGRLAPRPGPLRPDHEGGGDHSQQVPRQPSSSSMTPRSNSCCPTRYCTIRTSHTSPRGPTPSSKAGPSPGCAPNKLRNAPV

SEQ ID NO: 754566 - protein, 613 aa, Homo sapiens
LEAAHAGSQELIDGFSGILEPERHVRVKQRTSVLNMLRRLDKIRFRGHKRDDFLDLAESPNASDTECSDEIPLKVPRTSPRDSEELRDPAGPGTLIMATGVQDFNRTEFDRLNEIKGHLEIALLEKHFLQEELRKLREETNAEMLRQELDRERQRRMELEQKVQEVLKARTEEQMAQQPPKGQAQASNGAERRSQGLSSRLQKWFYERFGEYVEDFRFQPEENTVETEEPLSARRLTENMRRLKRGAKPVTNFVKNLSALSDWYSVYTSAIAFTVYMNAVWHGWAIPLFLFLAILRLSLNYLIARGWRIQWSIVPEVSEPVEPPKEDLTVSEKFQLVLDVAQKAQNLFGKMADILEKIKNLFMWVQPEITQKLYVALWAAFLASCFFPYRLVGLAVGLYAGIKFFLIDFIFKRCPRLRAKYDTPYIIWRSLPTDPQLKERSSAAVSRRLQTTSSRSYVPSAPAGLGKEEDAGRFHSTKKGNFHEIFNLTENERPLAVCENGWRCCLINRDRKMPTDYIRNGVLYVTENYLCFESSKSGSSKRNKVIKLVDITDIQKYKVLSVLPGSGMGIAVSTPSTQKPLVFGAMVHRDEAFETILSQYIKITSAAASGGDS

SEQ ID NO: 754567 - protein, 602 aa, Homo sapiens
WGGRIQVWSLWIERLEMPVGLPREPERHVRVKQRTSVLNMLRRLDKIRFRGHKRDDFLDLAESPNASDTECSDEIPLKAGPGTLIMATGVQDFNRTEFDRLNEIKGHLEIALLEKHFLQEELRKLREETNAEMLRQELDRERQRRMELEQKVQEVLKARTEEQMAQQPPKGQAQASNGAERRSQGLSSRLQKWFYERFGEYVEDFRFQPEENTVETEEPLSARRLTENMRRLKRGAKPVTNFVKNLSALSDWYSVYTSAIAFTVYMNAVWHGWAIPLFLFLAILRLSLNYLIARGWRIQWSIVPEVSEPVEPPKEDLTVSEKFQLVLDVAQKAQNLFGKMADILEKIKNLFMWVQPEITQKLYVALWAAFLASCFFPYRLVGLAVGLYAGIKFFLIDFIFKRCPRLRAKYDTPYIIWRSLPTDPQLKERSSAAVSRRLQTTSSRSYVPSAPAGLGKEEDAGRFHSTKKGNFHEIFNLTENERPLAVCENGWRCCLINRDRKMPTDYIRNGVLYVTENYLCFESSKSGSSKRNKVIKLVDITDIQKYKVLSVLPGSGMGIAVSTPSTQKPLVFGAMVHRDEAFETILSQYIKITSAAASGGDS

SEQ ID NO: 754568 - protein, 533 aa, Homo sapiens
PNSSQPSSWAGPGTLIMATGVQDFNRTEFDRLNEIKGHLEIALLEKHFLQEELRKLREETNAEMLRQELDRERQRRMELEQKVQEVLKARTEEQMAQQPPKGQAQASNGAERRSQGLSSRLQKWFYERFGEYVEDFRFQPEENTVETEEPLSARRLTENMRRLKRGAKPVTNFVKNLSALSDWYSVYTSAIAFTVYMNAVWHGWAIPLFLFLAILRLSLNYLIARGWRIQWSIVPEVSEPVEPPKEDLTVSEKFQLVLDVAQKAQNLFGKMADILEKIKNLFMWVQPEITQKLYVALWAAFLASCFFPYRLVGLAVGLYAGIKFFLIDFIFKRCPRLRAKYDTPYIIWRSLPTDPQLKERSSAAVSRRLQTTSSRSYVPSAPAGLGKEEDAGRFHSTKKGNFHEIFNLTENERPLAVCENGWRCCLINRDRKMPTDYIRNGVLYVTENYLCFESSKSGSSKRNKVIKLVDITDIQKYKVLSVLPGSGMGIAVSTPSTQKPLVFGAMVHRDEAFETILSQYIKITSAAASGGDS

SEQ ID NO: 754569 - protein, 490 aa, Homo sapiens
PNSSQPSSWAGPGTLIMATGVQDFNRTEFDRLNEIKGHLEIALLEKHFLQEELRKLREETNAEMLRQELDRERQRRMELEQKVQEVLKARTEEQMAQQPPKGQAQASNGAERRSQGLSSRLQKWFYERFGEYVEDFRFQPEENTVETEEPLSARRLTENMRRLKRGAKPVTNFVKNLSALSDWYSVYTSAIAFTVYMNAVWHGWAIPLFLFLAILRLSLNYLIARGWRIQWSIVPEVSEPVEPPKEDLTVSEKFQLVLDVAQKAQNLFGKMADILEKIKNLFMWVQPEITQKLYVALWAAFLASCFFPYRLVGLAVGLYAGIKFFLIDFIFKRCPRLRAKYDTPYIIWRSLPTDPQLKERSSAAVSRRLQTTSSRSYVPSAPAGLGKEEDAGRFHSTKKGNFHEIFNLTENERPLAVCENGWRCCLINRDRKMPTDYIRNGVLYVTENYLCFESSKSGSSKRNKVIKLVDITDIQKVNHHHRSVEAAGTK

SEQ ID NO: 754570 - protein, 617 aa, Homo sapiens
WGGRIQVWSLWIERLEMPVGLPREPERHVRVKQRTSVLNMLRRLDKIRFRGHKRDDFLDLAESPNASDTECSDEIPLKVPRTSPRDSEELRDPAGPGTLIMATGVQDFNRTEFDRLNEIKGHLEIALLEKHFLQEELRKLREETNAEMLRQELDRERQRRMELEQKVQEVLKARTEEQMAQQPPKGQAQASNGAERRSQGLSSRLQKWFYERFGEYVEDFRFQPEENTVETEEPLSARRLTENMRRLKRGAKPVTNFVKNLSALSDWYSVYTSAIAFTVYMNAVWHGWAIPLFLFLAILRLSLNYLIARGWRIQWSIVPEVSEPVEPPKEDLTVSEKFQLVLDVAQKAQNLFGKMADILEKIKNLFMWVQPEITQKLYVALWAAFLASCFFPYRLVGLAVGLYAGIKFFLIDFIFKRCPRLRAKYDTPYIIWRSLPTDPQLKERSSAAVSRRLQTTSSRSYVPSAPAGLGKEEDAGRFHSTKKGNFHEIFNLTENERPLAVCENGWRCCLINRDRKMPTDYIRNGVLYVTENYLCFESSKSGSSKRNKVIKLVDITDIQKYKVLSVLPGSGMGIAVSTPSTQKPLVFGAMVHRDEAFETILSQYIKITSAAASGGDS

SEQ ID NO: 754571 - protein, 533 aa, Homo sapiens; identical to SEQ ID NO: 754568

SEQ ID NO: 754572 - protein, 533 aa, Homo sapiens; identical to SEQ ID NO: 754568

SEQ ID NO: 754573 - protein, 355 aa, Homo sapiens
PNSSQPSSWAGPGTLIMATGVQDFNRTEFDRLNEIKGHLEIALLEKHFLQEELRKLREETNAEMLRQELDRERQRRMELEQKVQEVLKARTEEQMAQQPPKGQAQASNGAERRSQGLSSRLQKWFYERFGEYVEDFRFQPEENTVETEEPLSARRLTENMRRLKRGAKPVTNFVKNLSALSDWYSVYTSAIAFTVYMNAVWHGWAIPLFLFLAILRLSLNYLIARGWRIQWSIVPEVSEPVEPPKEDLTVSEKFQLVLDVAQKAQNLFGKMADILEKIKNLFMWVQPEITQKLYVALWAAFLASCFFPYRLVGLAVVLTRDLSLEGQRLPAPSKDGPSWDLGSLELSCPSWVGHH

SEQ ID NO: 754574 - protein, 105 aa, Homo sapiens
MSSSSVWRTGLARDYRSHRLRAQPRKDPKTPSCVGVSWESRPGKGLCSHPVLLKSEICPQNPWNQEAQLCPPPGALGSTSAGRETPGITEGQLGWGWSQEAVMGS

SEQ ID NO: 754575 - protein, 449 aa, Homo sapiens
MWTALVLIWIFSLSLSESHAASNDPRNFVPNKMWKGLVKRNASVETVDNKTSEDVTMAAASPVTLTKGTSAAHLNSMEVTTEDTSRTDVSEPATSGGAADGVTSIAPTAVASSTTAASITTAASSMTVASSAPTTAASSTTVASIAPTTAASSMTAASSTPMTLALPAPTSTSTGRTPSTTATGHPSLSTALAQVPKSSALPRTATLATLATRAQTVATTANTSSPMSTRPSPSKHMPSDTAASPVPPMRPQAQGPISQVSVDQPVVNTTNKSTPMPSNTTPEPAPTPTVVTTTKAQAREPTASPVPVPHTSPIPEMEAMSPTTQPSPMPYTQRAAGPGTSQAPEQVETEATPGTDSTGPTPRSSGGTKMPATDSCQPSTQGQYMVVTTEPLTQAVVDKTLLLVVLLLGVTLFITVLVLFALQAYESYKKKDYTQVDYLINGMYADSEM

SEQ ID NO: 754576 - protein, 201 aa, Homo sapiens
TSFPAFGRGPGRARCPELPGLRCRPRPRAGPQAPSYCPRATRPPGACCARVRGSHCRPGSCCQGSLTGLGLRDRGWGAGGGLDGGTRGSGRVSGAERGRRNGTGGAADGARTECKTLSNADASVTRVESLPSSHMCHKGWHGPGVPHHVAFTPCKARLRPATQCQAHSSPRRKMVQAGSIPLAAASGRLCLTHAGWWRGAS

SEQ ID NO: 754577 - protein, 127 aa, Homo sapiens
VISGVWAGPGQGALPGAAWVALPATSPRRASGSFLLSEGHQAAGGLLRPDASVTRVESLPSSHMCHKGWHGPGVPHHVAFTPCKARLRPATQCQAHSSPRRKMVQAGSIPLAAASEMGFRHVAQAGL

SEQ ID NO: 754578 - protein, 450 aa, Homo sapiens
MWTALVLIWIFSLSLSESHAASNDPRNFVPNKMWKGLVKRNASVETVDNKTSEDVTMAAASPVTLTKGTSAAHLNSMEVTTEDTSRTDVSEPATSGGAADGVTSIAPTAVASSTTAASITTAASSMTVASSAPTTAASSTTVASIAPTTAASSMTAASSTPMTLALPAPTSTSTGRTPSTTATGHPSLSTALAQVPKSSALPRTATLATLATRAQTVATTANTSSPMSTRPSPSKHMPSDTAASPVPPMRPQAQGPISQVSVDQPVVNTTNKSTPMPSNTTPEPAPTPTVVTTTKAQAREPTASPVPVPHTSPIPEMEAMSPTTQPSPMPYTQRAAGPGTSQAPEQVETEATPGTDSTGPTPRSSGGTKMPATDSCQPSTQGQYMVVTTEPLTQAVVDKTLLLVVLLLGVTLFITVLVLFALQAYESYKKKDYTQVTTPPPPPPPTPTKP

SEQ ID NO: 754579 - protein, 449 aa, Homo sapiens; identical to SEQ ID NO: 754575

SEQ ID NO: 754580 - protein, 449 aa, Homo sapiens; identical to SEQ ID NO: 754575

SEQ ID NO: 754581 - protein, 322 aa, Homo sapiens
KLLSKVRTAASSTTVASIAPTTAASSMTAASSTPMTLALPAPTSTSTGRTPSTTATGHPSLSTALAQVPKSSALPRTATLATLATRAQTVATTANTSSPMSTRPSPSKHMPSDTAASPVPPMRPQAQGPISQVSVDQPVVNTTNKSTPMPSNTTPEPAPTPTVVTTTKAQAREPTASPVPVPHTSPIPEMEAMSPTTQPSPMPYTQRAAGPGTSQAPEQVETEATPGTDSTGPTPRSSGGTKMPATDSCQPSTQGQYMVVTTEPLTQAVVDKTLLLVVLLLGVTLFITVLVLFALQAYESYKKKDYTQVDYLINGMYADSEM

SEQ ID NO: 754582 - protein, 154 aa, Homo sapiens
MWTALVLIWIFSLSLSESHAASNDPRNFVPNKMWKGLVKRNASVETVDNKTSEDVTMAAASPVTLTKGTSAAHLNSMEVTTEDTSRTDVSEPATSGGAADGVTSIAPTAVASSTTAASITTAASSMTVASSAPTTAASSTTVASIAPTTAASSL

SEQ ID NO: 754583 - protein, 114 aa, Homo sapiens
MWTALVLIWIFSLSLSESHAASNDPRNFVPNKMWKGLVKRNASVETVDNKTSEDVTMAAASPVTLTKGTSAAHLNSMEVTTEDTSRTDAYESYKKKDYTQVDYLINGMYADSEM

SEQ ID NO: 754584 - protein, 130 aa, Homo sapiens
MWTALVLIWIFSLSLSESHAASNDPRNFVPNKMWKGLVKRNASVETVDNKTSEDVTMAAASPVTLTKGTSAAHLNSMEVTTEDTSRTDVSEPATSGGAADGVTSIAPTAVASSTTAPQDRPTQQAANRDP

SEQ ID NO: 754585 - protein, 113 aa, Homo sapiens
MAWPGSAPPRGFHPLQSQTSPSDTVSSPQLSKEEDGPGWEHPLSSSLWEAVSYSCRVVEGRLLAEDDERLSPLRKEKVLVCSKAKNWTRRRRFIQYIESDPPCCSWSTVPEAG

SEQ ID NO: 754586 - protein, 449 aa, Homo sapiens; identical to SEQ ID NO: 754575

SEQ ID NO: 754587 - protein, 449 aa, Homo sapiens; identical to SEQ ID NO: 754575

SEQ ID NO: 754588 - protein, 449 aa, Homo sapiens; identical to SEQ ID NO: 754575

SEQ ID NO: 754589 - protein, 209 aa, Homo sapiens
MWTALVLIWIFSLSLSESHAASNDPRNFVPNKMWKGLVKRNASVETVDNKTSEDVTMAAASPVTLTKGTSAAHLNSMEVTTEDTSRTDVSEPATSGGAADGVTSIAPTAVASSTTAASITTAASSMTVASSAPTTAASSTTVASIAPTTAASSMTAASSTPMTLALPAPTSTSTGRTPSTTATGHPSLSTALAQVPKSRRRAEVDKSCR

SEQ ID NO: 754590 - protein, 289 aa, Homo sapiens
ALAFSIGLGENPNEHKNPSTTATGHPSLSTALAQVPKSSALPRTATLATLATRAQTVATTANTSSPMSTRPSPSKHMPSDTAASPVPPMRPQAQGPISQVSVDQPVVNTTNKSTPMPSNTTPEPAPTPTVVTTTKAQAREPTASPVPVPHTSPIPEMEAMSPTTQPSPMPYTQRAAGPGTSQAPEQVETEATPGTDSTGPTPRSSGGTKMPATDSCQPSTQGQYMVVTTEPLTQAVVDKTLLLVVLLLGVTLFITVLVLFALQAYESYKKKDYTQVDYLINGMYADSEM

SEQ ID NO: 754591 - protein, 114 aa, Homo sapiens; identical to SEQ ID NO: 754583

SEQ ID NO: 754592 - protein, 114 aa, Homo sapiens; identical to SEQ ID NO: 754583

SEQ ID NO: 754593 - protein, 632 aa, Homo sapiens
QCPRSVELHSGILTRPCNRWATVPATEMVEGPGCTLNGEKIRARVLPGQAVTGVRGSALRSLQGRALRLAASTVVVSPQAAALNNDSSQNVLSLFNGYVYSGVETLGKELFMYFGPKALRIHFGMKGFIMINPLEYKYKNGASPVLEVQLTKDLICFFDSSVELRNSMESQQRIRMMKELDVCSPEFSFLRAESEVKKQKGRMLGDVLMDQNVLPGVGNIIKNEALFDSGLHPAVKVCQLTDEQIHHLMKMIRDFSILFYRCRKAGLALSKHYKVYKRPNCGQCHCRITVCRFGDNNRMTYFCPHCQKENPQHVDICKLPTRNTIISWTSSRVDHVMDSVARKSEEHWTCVVCTLINKPSSKACDACLTSRPIDSVLKSEENSTVFSHLMKYPCNTFGKPHTEVKINRKTAFGTTTLVLTDFSNKSSTLERKTKQNQILDEEFQNSPPASVCLNDIQHPSKKTTNDITQLSSKVNISPTISSESKLFSPAHKKPKTAHYSSPELKSCNPGYSNSELQINMTDGPRTLNPDSPRCSKHNRLCILRVVRKDGENKGRQFYACPLPREAQCGFFEWADLSFPFCNHGKRSTMKTVLKIGPNNGKNFFVCPLGKEKQCNFFQWAENGPGIKIIPGC

SEQ ID NO: 754594 - protein, 378 aa, Homo sapiens
QCPRSVELHSGILTRPCNRWATVPATEMVEGPGCTLNGEKIRARVLPGQAVTGVRGSALRSLQGRALRLAASTVVVSPQAAALNNDSSQNVLSLFNGYVYSGVETLGKELFMYFGPKALRIHFGMKGFIMINPLEYKYKNGASPVLEVQLTKDLICFFDSSVELRNSMESQQRIRMMKELDVCSPEFSFLRAESEVKKQKGRMLGDVLMDQNVLPGVGNIIKNEALFDSGLHPAVKVCQLTDEQIHHLMKMIRDFSILFYRCRKAGLALSKHYKVYKRPNCGQCHCRITVCRFGDNNRMTYFCPHCQKENPQHVDICKLPTRNTIISWTSSRVDHVMDSVARKSEEHWTCVVCTLINKPSSKACDACLTSRPIGKTEF

SEQ ID NO: 754595 - protein, 309 aa, Homo sapiens
QCPRSVELHSGILTRPCNRKSEEHWTCVVCTLINKPSSKACDACLTSRPIDSVLKSEENSTVFSHLMKYPCNTFGKPHTEVKINRKTAFGTTTLVLTDFSNKSSTLERKTKQNQILDEEFQNSPPASVCLNDIQHPSKKTTNDITQLSSKVNISPTISSESKLFSPAHKKPKTAHYSSPELKSCNPGYSNSELQINMTDGPRTLNPDSPRCSKHNRLCILRVVRKDGENKGRQFYACPLPREAQCGFFEWADLSFPFCNHGKRSTMKTVLKIGPNNGKNFFVCPLGKEKQCNFFQWAENGPGIKIIPGC

SEQ ID NO: 754596 - protein, 137 aa, Homo sapiens
YRLLRTSLLMLGGLDGTKRKSPFGSTERKTPVKKLAPEFSKVKTKTPKHSPIKEEPCGSLSETVCKRELRSQETPEKPRSSVDTPPRLSTPQKGPSTHPKEKAFSSEIEDLPYLSTTEMYLCRWHQPVHGGSSRVDA

SEQ ID NO: 754597 - protein, 459 aa, Homo sapiens
MRSAVFKAAAAPAGGNPEQRLDYERAAALGGPEDEPGAAEAHFLPRHRKLKEPGPPLASSQGGSPAPSPAGCGGKGRGLLLPAGAAPGQQEESWGGSVPLPCPPPATKQAGIGGEPAAAGAGCSPRPKYQAVLPIQTGSLVAAAKEPTPWAGDKGGAASPAATASDPAGPPPLPLPGPPPLAPTATAGTLAASEGRWKSMRKSPLGGGGGSGASSQAACLKQILLLQLDLIEQQQQQLQAKEKEIEELKSERDTLLARIERMERRMQLVKKDNEKERHKLFQGYETEEREETELSEKIKLECQPELSETSQTLPPKPFSCGRSGKGHKRKSPFGSTERKTPVKKLAPEFSKVKTKTPKHSPIKEEPCGSLSETVCKRELRSQETPEKPRSSVDTPPRLSTPQKGPSTHPKEKAFSSEIEDLPYLSTTEMYLCRWHQPPPSPLPLRESSPKKEETVASKA

SEQ ID NO: 754598 - protein, 284 aa, Homo sapiens
MRSAVFKRPRPLPAAILSSDWTTSGLRRWAGPRTSLGRPKPTSSPGTILLLQLDLIEQQQQQLQAKEKEIEELKSERDTLLARIERMERRMQLVKKDNEKERHKLFQGYETEEREETELSEKIKLECQPELSETSQTLPPKPFSCGRSGKGHKRKSPFGSTERKTPVKKLAPEFSKVKTKTPKHSPIKEEPCGSLSETVCKRELRSQETPEKPRSSVDTPPRLSTPQKGPSTHPKEKAFSSEIEDLPYLSTTEMYLCRWHQPPPSPLPLRESSPKKEETVASKA

SEQ ID NO: 754599 - protein, 138 aa, Homo sapiens [sequence omitted]

SEQ ID NO: 754600 - protein, 389 aa, Homo sapiens
MRSAVFKAAAAPAGGNPEQRLDYERAAALGGPEDEPGAAEAHFLPRHRKLKEPGPPLASSQGGSPAPSPAGCGGKGRGLLLPAGAAPGQQEESWGGSVPLPCPPPATKQAGIGGEPAAAGAGCSPRPKYQAVLPIQTGSLVAAAKEPTPWAGDKGGAASPAATASDPAGPPPLPLPGPPPLAPTATAGTLAASEGRWKSMRKSPLGGGGGSGASSQAACLKQILLLQLDLIEQQQQQLQAKEKEIEELKSERDTLLARIERMERRMQLVKKDNEKERHKLFQGYETEEREETELSEKIKLECQPELSETSQTLPPKPFSCGRSGKGHKSKGNPIWRQDGRLPFKAWFRILKSKNKLPRLFYYKRNLGVLFESVDGMGATSPFPAFGGPP

SEQ ID NO: 754601 - protein, 372 aa, Homo sapiens
MRSAVFKAAAAPAGGNPEQRLDYERAAALGGPEDEPGAAEAHFLPRHRKLKEPGPPLASSQGGSPAPSPAGCGGKGRGLLLPAGAAPGQQEESWGGSVPLPCPPPATKQAGIGGEPAAAGAGCSPRPKYQAVLPIQTGSLVAAAKEPTPWAGDKGGAASPAATASDPAGPPPLPLPGPPPLAPTATAGTLAASEGRWKSMRKSPLGGGGGSGASSQAACLKQILLLQLDLIEQQQQQLQAKEKEIEELKSERDTLLARIERMERRMQLVKKDNEKERHKLFQGYETEEREETELSEKIKLECQPELSETSQTLPPKPFSCGRSGKGHKRKSPFGSTERKILNFQKSKQKLLSTLLLKRNPVVPYLKLFVNVN

SEQ ID NO: 754602 - protein, 459 aa, Homo sapiens; identical to SEQ ID NO: 754597

SEQ ID NO: 754603 - protein, 469 aa, Homo sapiens
MRSAVFKAAAAPAGGNPEQRLDYERAAALGGPEDEPGAAEAHFLPRHRKLKEPGPPLASSQGGSPAPSPAGCGGKGRGLLLPAGAAPGQQEESWGGSVPLPCPPPATKQAGIGGEPAAAGAGCSPRPKYQAVLPIQTGSLVAAAKEPTPWAGDKGGAASPAATASDPAGPPPLPLPGPPPLAPTATAGTLAASEGRWKSMRKSPLGGGGGSGASSQAACLKQILLLQLDLIEQQQQQLQAKEKEIEELKSERDTLLARIERMERRMQLVKKDNEKERHKLFQGYETEEREETELSEKIKLECQPELSETSQTLPPKPFSCGRSGKGHKRKSPFGSTERKTPVKKLAPEFSKVKTKTPKHSPIKEEPCGSLSETVCKRELRSQETPEKPRSSVDTPPRLSTPQKGPSTHPKEKAFSSEIEDLPYLSTTEMYLCRWHQPPPSPLPLRESSLRLQTQRGRKATTTTKSPRKP

SEQ ID NO: 754604 - protein, 1980 aa, Homo sapiens
MAARLLAPPGPDSFKPFTPESLANIERRIAESKLKKPPKADGSHREDDEDSKPKPNSDLEAGKSLPFIYGDIPQGLVAVPLEDFDPYYLTQKTFVVLNRGKTLFRFSATPALYILSPFNLIRRIAIKILIHSVFSMIIMCTILTNCVFMTFSNPPDWSKNVEYTFTGIYTFESLVKIIARGFCIDGFTFLRDPWNWLDFSVIMMAYITEFVNLGNVSALRTFRVLRALKTISVIPGLKTIVGALIQSVKKLSDVMILTVFCLSVFALIGLQLFMGNLRNKCVVWPINFNESYLENGTKGFDWEEYINNKTNFYTVPGMLEPLLCGNSSDAGQCPEGYQCMKAGRNPNYGYTSFDTFSWAFLALFRLMTQDYWENLYQLTLRAAGKTYMIFFVLVIFVGSFYLVNLILAVVAMAYEEQNQATLEEAEQKEAEFKAMLEQLKKQQEEAQAAAMATSAGTVSEDAIEEEGEEGGGSPRSSSEISKLSSKSAKERRNRRKKRKQKELSEGEEKGDPEKVFKSESEDGMRRKAFRLPDNRIGRKFSIMNQSLLSIPGSPFLSRHNSKSSIFSFRGPGRFRDPGSENEFADDEHSTVEESEGRRDSLFIPIRARERRSSYSGYSGYSQGSRSSRIFPSLRRSVKRNSTVDCNGVVSLIGGPGSHIGGRLLPEATTEVEIKKKGPGSLLVSMDQLASYGRKDRINSIMSVVTNTLVEELEESQRKCPPCWYKFANTFLIWECHPYWIKLKEIVNLIVMDPFVDLAITICIVLNTLFMAMEHHPMTPQFEHVLAVGNLVFTGIFTAEMFLKLIAMDPYYYFQEGWNIFDGFIVSLSLMELSLADVEGLSVLRSFRLLRVFKLAKSWPTLNMLIKIIGNSVGALGNLTLVLAIIVFIFAVVGMQLFGKSYKECVCKINQDCELPRWHMHDFFHSFLIVFRVLCGEWIETMWDCMEVAGQAMCLIVFMMVMVIGNLVVLNLFLALLLSSFSADNLAATDDDGEMNNLQISVIRIKKGVAWTKLKVHAFMQAHFKQREADEVKPLDELYEKKANCIANHTGADIHRNGDFQKNGNGTTSGIGSSVEKYIIDEDHMSFINNPNLTVRVPIAVGESDFENLNTEDVSSESDPEGSKDKLDDTSSSEGSTIDIKPEVEEVPVEQPEEYLDPDACFTEGCVQRFKCCQVNIEEGLGKSWWILRKTCFLIVEHNWFETFIIFMILLSSGALAFEDIYIEQRKTIRTILEYADKVFTYIFILEMLLKWTAYGFVKFFTNAWCWLDFLIVAVSLVSLIANALGYSELGAIKSLRTLRALRPLRALSRFEGMRVVVNALVGAIPSIMNVLLVCLIFWLIFSIMGVNLFAGKYHYCFNETSEIRFEIEDVNNKTECEKLMEGNNTEIRWKNVKINFDNVGAGYLALLQVATFKGWMDIMYAAVDSRKPDEQPKYEDNIYMYIYFVIFIIFGSFFTLNLFIGVIIDNFNQQKKKFGGQDIFMTEEQKKYYNAMKKLGSKKPQKPIPRPLNKIQGIVFDFVTQQAFDIVIMMLICLNMVTMMVETDTQSKQMENILYWINLVFVIFFTCECVLKMFALRHYYFTIGWNIFDFVVVILSIVGMFLADIIEKYFVSPTLFRVIRLARIGRILRLIKGAKGIRTLLFALMMSLPALFNIGLLLFLVMFIFSIFGMSNFAYVKHEAGIDDMFNFETFGNSMICLFQITTSAGWDGLLLPILNRPPDCSLDKEHPGSGFKGDCGNPSVGIFFFVSYIIISFLIVVNMYIAIILENFSVATEESADPLSEDDFETFYEIWEKFDPDATQFIEYCKLADFADALEHPLRVPKPNTIELIAMDLPMVSGDRIHCLDILFAFTKRVLGDSGELDILRQQMEERFVASNPSKVSYEPITTTLRRKQEEVSAVVLQRAYRGHLARRGFICKKTTSNKLENGGTHREKKESTPSTASLPSYDSVTKPEKEKQQRAEEGRRERAKRQKEVRESKC

SEQ ID NO: 754605 - protein, 1980 aa, Homo sapiens; identical to SEQ ID NO: 754604

SEQ ID NO: 754606 - protein, 1663 aa, Homo sapiens
MLEPLLCGNSSDAGQCPEGYQCMKAGRNPNYGYTSFDTFSWAFLALFRLMTQDYWENLYQLTLRAAGKTYMIFFVLVIFVGSFYLVNLILAVVAMAYEEQNQATLEEAEQKEAEFKAMLEQLKKQQEEAQAAAMATSAGTVSEDAIEEEGEEGGGSPRSSSEISKLSSKSAKERRNRRKKRKQKELSEGEEKGDPEKVFKSESEDGMRRKAFRLPDNRIGRKFSIMNQSLLSIPGSPFLSRHNSKSSIFSFRGPGRFRDPGSENEFADDEHSTVEESEGRRDSLFIPIRARERRSSYSGYSGYSQGSRSSRIFPSLRRSVKRNSTVDCNGVVSLIGGPGSHIGGRLLPEATTEVEIKKKGPGSLLVSMDQLASYGRKDRINSIMSVVTNTLVEELEESQRKCPPCWYKFANTFLIWECHPYWIKLKEIVNLIVMDPFVDLAITICIVLNTLFMAMEHHPMTPQFEHVLAVGNLVFTGIFTAEMFLKLIAMDPYYYFQEGWNIFDGFIVSLSLMELSLADVEGLSVLRSFRLLRVFKLAKSWPTLNMLIKIIGNSVGALGNLTLVLAIIVFIFAVVGMQLFGKSYKECVCKINQDCELPRWHMHDFFHSFLIVFRVLCGEWIETMWDCMEVAGQAMCLIVFMMVMVIGNLVVLNLFLALLLSSFSADNLAATDDDGEMNNLQISVIRIKKGVAWTKLKVHAFMQAHFKQREADEVKPLDELYEKKANCIANHTGADIHRNGDFQKNGNGTTSGIGSSVEKYIIDEDHMSFINNPNLTVRVPIAVGESDFENLNTEDVSSESDPEGSKDKLDDTSSSEGSTIDIKPEVEEVPVEQPEEYLDPDACFTEGCVQRFKCCQVNIEEGLGKSWWILRKTCFLIVEHNWFETFIIFMILLSSGALAFEDIYIEQRKTIRTILEYADKVFTYIFILEMLLKWTAYGFVKFFTNAWCWLDFLIVAVSLVSLIANALGYSELGAIKSLRTLRALRPLRALSRFEGMRVVVNALVGAIPSIMNVLLVCLIFWLIFSIMGVNLFAGKYHYCFNETSEIRFEIEDVNNKTECEKLMEGNNTEIRWKNVKINFDNVGAGYLALLQVATFKGWMDIMYAAVDSRKPDEQPKYEDNIYMYIYFVIFIIFGSFFTLNLFIGVIIDNFNQQKKKFGGQDIFMTEEQKKYYNAMKKLGSKKPQKPIPRPLNKIQGIVFDFVTQQAFDIVIMMLICLNMVTMMVETDTQSKQMENILYWINLVFVIFFTCECVLKMFALRHYYFTIGWNIFDFVVVILSIVGMFLADIIEKYFVSPTLFRVIRLARIGRILRLIKGAKGIRTLLFALMMSLPALFNIGLLLFLVMFIFSIFGMSNFAYVKHEAGIDDMFNFETFGNSMICLFQITTSAGWDGLLLPILNRPPDCSLDKEHPGSGFKGDCGNPSVGIFFFVSYIIISFLIVVNMYIAIILENFSVATEESADPLSEDDFETFYEIWEKFDPDATQFIEYCKLADFADALEHPLRVPKPNTIELIAMDLPMVSGDRIHCLDILFAFTKRVLGDSGELDILRQQMEERFVASNPSKVSYEPITTTLRRKQEEVSAVVLQRAYRGHLARRGFICKKTTSNKLENGGTHREKKESTPSTASLPSYDSVTKPEKEKQQRAEEGRRERAKRQKEVRESKC

SEQ ID NO: 754607 - protein, 411 aa, Homo sapiens
EAGPAPLSAAAPGAGRGWPRPLAERRKGRGRRQPLRARLNRRRWAAGQGSTVQAATFGPAMAAAPLKVCIVGSGNWGSAVAKIIGNNVKKLQKFASTVKMWVFEETVNGRKLTDIINNDHENVKYLPGHKLPENVVAMSNLSEAVQDADLLVFVIPHQFIHRICDEITGRVPKKALGITLIKGIDEGPEGLKLISDIIREKMGIDISVLMGANIANEVAAEKFCETTIGSKVMENGLLFKELLQTPNFRITVVDDADTVELCGALKNIVAVGAGFCDGLRCGDNTKAAVIRLGLMEMIAFARIFCKGQVSTATFLESCGVADLITTCYGGRNRRVAEAFARTGKTIEELEKEMLNGQKLQGPQTSAEVYRILKQKGLLDKFPLFTAVYQICYESRPVQEMLSCLQSHPEHT

SEQ ID NO: 754608 - protein, 352 aa, Homo sapiens
RSGSCPAVSCGPRRRAGVAATIGGEAKGAGPPPAAAGKAEQAEVGSRPGKHGPGGYIRPGHGSGAPESVHRGLGELVAMSNLSEAVQDADLLVFVIPHQFIHRICDEITGRVPKKALGITLIKGIDEGPEGLKLISDIIREKMGIDISVLMGANIANEVAAEKFCETTIGSKVMENGLLFKELLQTPNFRITVVDDADTVELCGALKNIVAVGAGFCDGLRCGDNTKAAVIRLGLMEMIAFARIFCKGQVSTATFLESCGVADLITTCYGGRNRRVAEAFARTGKTIEELEKEMLNGQKLQGPQTSAEVYRILKQKGLLDKFPLFTAVYQICYESRPVQEMLSCLQSHPEHT

SEQ ID NO: 754609 - protein, 352 aa, Homo sapiens; identical to SEQ ID NO: 754608

SEQ ID NO: 754610 - protein, 352 aa, Homo sapiens; identical to SEQ ID NO: 754608

SEQ ID NO: 754611 - protein, 50 aa, Homo sapiens
DIRGETVFSAFWLQVAMSNLSEAVQDADLLVFVIPHQFIHRICDEITGRV

SEQ ID NO: 754612 - protein, 352 aa, Homo sapiens; identical to SEQ ID NO: 754608

SEQ ID NO: 754613 - protein, 352 aa, Homo sapiens; identical to SEQ ID NO: 754608

SEQ ID NO: 754614 - protein, 72 aa, Homo sapiens
HLPCLGSCKGPGQNVAVTRAHPDSQGRRRRPELGARGGQVFYNSEYGELSEPSEEDHCSPSARVTFFTDNSY

SEQ ID NO: 754615 - protein, 83 aa, Homo sapiens
LVCRDGVLGRKNSKCQGCAGAGLCMCENKTENEGGGPTRSVGTDSSLCLWCHAEDSVLYVTDEGSKKTALTKARVQNQTQTQP

SEQ ID NO: 754616 - protein, 280 aa, Homo sapiens
SRDHICSSQNKVCSAAGQFTAKIPNLRAEPKPEERKVTIGPKPHSRFQMSFCSPRAINCCLLAAARSLGPYTACIKSLQRLGGWRWETDGGLRFVFPKFTASPGGGGCSEGPPRGQPTMKGFTATLFLWTLIFPSCSGGGGGKAWPTHVVCSDSGLEVLYQSCDPLQDFGFSVEKCSKQLKSNINIRFGIILREDIKELFLDLALMSQGSSVLNFSYPICEAALPKFSFCGRRKGEQIYYAGPVNNPEFTIPQGEYQVLLELYTEKRSTVACANATIMCS

SEQ ID NO: 754617 - protein, 280 aa, Homo sapiens; identical to SEQ ID NO: 754616

SEQ ID NO: 754618 - protein, 66 aa, Homo sapiens
RYQFEETLSVISCFSSDWLLWEEKQLMTERGSTKKRPQRVQLLILVPGPDIPRLHRCNEVPECICF

SEQ ID NO: 754619 - protein, 280 aa, Homo sapiens; identical to SEQ ID NO: 754616

SEQ ID NO: 754620 - protein, 112 aa, Homo sapiens
RLRELSRELSCPVAGFPKWGTRDEGGSTSRRCVVARRPGSRGARDSAAGPEREEWGRRPGVVHGPGGRGRWVWTWGRAPVSLQPMKDGKEGYRDRGRVGLRIARAAWHTVLG

SEQ ID NO: 754621 - protein, 764 aa, Homo sapiens [sequence omitted]

SEQ ID NO: 754622 - protein, 725 aa, Homo sapiens
CSSSSSRRAGAATAAGTRVPGAHGTMERAVQGTDGGGGSNSSSRSSSRATSAGSSPSCSLAGRGVSSRSAAAGLGGGGSRSSPGSVAASPSGGGGRRREPALEGVLSKYTNLLQGWQNRYFVLDFEAGILQYFVNEQSKHQKPRGVLSLSGAIVSLSDEAPHMLVVYSANGEMFKLRAADAKEKQFWVTQLRACAKYHMEMNSKMMNQVEGQQKDLVHAIESLPGSGPLTALDQDLLLLKATSAATLSCLGECLNLLQQSVHQAGQPSQKPGASENILGWHGSKSHSTEQLKNGTLGSLPSASANITWAILPNSAEDEQTSQPEPEPNSGSELVLSEDEKSDNEDKEETELGVMEDQRSIILHLISQLKLGMDLTKVVLPTFILEKRSLLEMYADFMAHPDLLLAITAGATPEERVICFVEYYLTAFHEGRKGALAKKPYNPIIGETFHCSWEVPKDRVKPKRTASRSPASCHEHPMADDPSKSYKLRFVAEQVSHHPPISCFYCECEEKRLCVNTHVWTKSKFMGMSVGVSMIGEGVLRLLEHGEEYVFTLPSAYARSILTIPWVELGGKVSINCAKTGYSATVIFHTKPFYGGKVHRVTAEVKHNPTNTIVCKAHGEWNGTLEFTYNNGETKVIDTTTLPVYPKKIRPLEKQGPMESRNLWREVTRYLRLGDIDAATEQKRHLEEKQRVEERKRENLRTPWKPKYFIQEGDGWVYFNPLWKAH

SEQ ID NO: 754623 - protein, 331 aa, Homo sapiens
TGPEVHVSHQAGKEWTVLQVNVVFLEKIFGSIAEFQTDKVGITFLRQKRIDNHLRTRAPHGPPSGYSISKVKVTLNKFGQWLPCPSCDYGLEHPRMQSRQQRTETAATGTLQWFSSLRAQNSGTEGKFTGHVPLGVSSDEGKRVLRLLEHGEEYVFTLPSAYARSILTIPWVELGGKVSINCAKTGYSATVIFHTKPFYGGKVHRVTAEVKHNPTNTIVCKAHGEWNGTLEFTYNNGETKVIDTTTLPVYPKKIRPLEKQGPMESRNLWREVTRYLRLGDIDAATEQKRHLEEKQRVEERKRENLRTPWKPKYFIQEGDGWVYFNPLWKAH

SEQ ID NO: 754624 - protein, 725 aa, Homo sapiens; identical to SEQ ID NO: 754622

SEQ ID NO: 754625 - protein, 423 aa, Homo sapiens
MPTPGGKEHRYYLSWNVGKEWSVWPNSGSELVLSEDEKSDNEDKEETELGVMEDQRSIILHLISQLKLGMDLTKVVLPTFILEKRSLLEMYADFMAHPDLLLAITAGATPEERVICFVEYYLTAFHEGRKGALAKKPYNPIIGETFHCSWEVPKDRVKPKRTASRSPASCHEHPMADDPSKSYKLRFVAEQVSHHPPISCFYCECEEKRLCVNTHVWTKSKFMGMSVGVSMIGEGVLRLLEHGEEYVFTLPSAYARSILTIPWVELGGKVSINCAKTGYSATVIFHTKPFYGGKVHRVTAEVKHNPTNTIVCKAHGEWNGTLEFTYNNGETKVIDTTTLPVYPKKIRPLEKQGPMESRNLWREVTRYLRLGDIDAATEQKRHLEEKQRVEERKRENLRTPWKPKYFIQEGDGWVYFNPLWKAH

SEQ ID NO: 754626 - protein, 397 aa, Homo sapiens
  misc_feature (305)..(305): Xaa can be any naturally occurring amino acid
MERAVQGTDGGGGSNSSSRSSSRATSAGSSPSCSLAGRGVSSRSAAAGLGGGGSRSSPGSVAASPSGGGGRRREPALEGVLSKYTNLLQGWQNRYFVLDFEAGILQYFVNEQSKHQKPRGVLSLSGAIVSLSDEAPHMLVVYSANGEMFKLRAADAKEKQFWVTQLRACAKYHMEMNSKMMNQVEGQQKDLVHAIESLPGSGPLTALDQDLLLLKATSAATLSCLGECLNLLQQSVHQAGQPSQKPGASENILGWHGSKSHSTEQLKNGTLGSLPSASANITWAILPNSAEDEQTSQPEPEPELXAPEFGLRPELMTNKLTIDRSRQETGTCGVIGRIQRTYTFVHRHLHERQNFGNGTSTHRCVLSTPFYPCDERESFAWQHGYARLTVGDTPAPS

SEQ ID NO: 754627 - protein, 114 aa, Homo sapiens [sequence omitted]

SEQ ID NO: 754628 - protein, 39 aa, Homo sapiens
MKMPSHQLLLWALWTLETLVRATGGPRAARSTPRAPLCA

SEQ ID NO: 754629 - protein, 846 aa, Homo sapiens [sequence omitted]

SEQ ID NO: 754630 - protein, 846 aa, Homo sapiens [sequence omitted]

SEQ ID NO: 754631 - protein, 661 aa, Homo sapiens
MDQFGNGLEIDQARLGMCRQLGDVFTEEKFRYMCILSGCDYLSSLRGIGLAKACKVLRLANNPDIVKVIKKIGHYLKMNITVPEDYINGFIRANNTFLYQLVFDPIKRKLIPLNAYEDDVDPETLSYAGQYVDDSIALQIALGNKDINTFEQIDDYNPDTAMPAHSRSRSWDDKTCQKSANVSSIWHRNYSPRPESGTVSDAPQLKENPSTVGVERVISTKGLNLPRKSSIVKRPRSAELSEDDLLSQYSLSFTKKTKKNSSEGNKSLSFSEVFVPDLVNGPTNKKSVSTPPRTRNKFATFLQRKNEESGAVVVPGTRSRFFCSSDSTDCVSNKVSIQPLDETAVTDKENNLHESEYGDQEGKRLVDTDVARNSSDDIPNNHIPGDHIPDKATVFTDEESYSFKSSKFTRTISPPTLGTLRSCFSWSGGLGDFSRTPSPSPSTALQQFRRKSDSPTSLPENNMSDVSQLKSEESSDDESHPLREGACSSQSQESGEFSLQSSNASKLSQCSSKDSDSEESDCNIKLLDSQSDQTSKLCLSHFSKKDTPLRNKVPGLYKSSSADSLSTTKIKPLGPARASGLSKKPASIQKRKHHNAENKPGLQIKLNELWKNFGFKKDSEKLPPCKKPLSPVRDNIQLTPEAEEDIFNKPECGRVQRAIFQ

SEQ ID NO: 754632 - protein, 718 aa, Homo sapiens
MKPQTLAAARSQGVDCLVAPYEADAQLAYLNKAGIVQAIITEDSDLLAFGCKKVILKMDQFGNGLEIDQARLGMCRQLGDVFTEEKFRYMCILSGCDYLSSLRGIGLAKACKVLRLANNPDIVKVIKKIGHYLKMNITVPEDYINGFIRANNTFLYQLVFDPIKRKLIPLNAYEDDVDPETLSYAGQYVDDSIALQIALGNKDINTFEQIDDYNPDTAMPAHSRSRSWDDKTCQKSANVSSIWHRNYSPRPESGTVSDAPQLKENPSTVGVERVISTKGLNLPRKSSIVKRPRSAELSEDDLLSQYSLSFTKKTKKNSSEGNKSLSFSEVFVPDLVNGPTNKKSVSTPPRTRNKFATFLQRKNEESGAVVVPGTRSRFFCSSDSTDCVSNKVSIQPLDETAVTDKENNLHESEYGDQEGKRLVDTDVARNSSDDIPNNHIPGDHIPDKATVFTDEESYSFKSSKFTRTISPPTLGTLRSCFSWSGGLGDFSRTPSPSPSTALQQFRRKSDSPTSLPENNMSDVSQLKSEESSDDESHPLREGACSSQSQESGEFSLQSSNASKLSQCSSKDSDSEESDCNIKLLDSQSDQTSKLCLSHFSKKDTPLRNKVPGLYKSSSADSLSTTKIKPLGPARASGLSKKPASIQKRKHHNAENKPGLQIKLNELWKNFGFKKDSEKLPPCKKPLSPVRDNIQLTPEAEEDIFNKPECGRVQRAIFQ

SEQ ID NO: 754633 - protein, 846 aa, Homo sapiens [sequence omitted]

SEQ ID NO: 754634 - protein, 853 aa, Homo sapiens
MGIQGLLQFIKEASEPIHVRKYKGQVVAVDTYCWLHKGAIACAEKLAKGEPTDRYVGFCMKFVNMLLSHGIKPILVFDGCTLPSKKEVERSRRERRQANLLKGKQLLREGKVSEARECFTRSINITHAMAHKVIKAARSQGVDCLVAPYEADAQLAYLNKAGIVQAIITEDSDLLAFGCKKVILKMDQFGNGLEIDQARLGMCRQLGDVFTEEKFRYMCILSGCDYLSSLRGIGLAKACKVLRLANNPDIVKVIKKIGHYLKMNITVPEDYINGFIRANNTFLYQLVFDPIKRKLIPLNAYEDDVDPETLSYAGQYVDDSIALQIALGNKDINTFEQIDDYNPDTAMPAHSRSRSWDDKTCQKSANVSSIWHRNYSPRPESGTVSDAPQLKENPSTVGVERVISTKGLNLPRKSSIVKRPRSAELSEDDLLSQYSLSFTKKTKKNSSEGNKSLSFSEVFVPDLVNGPTNKKSVSTPPRTRNKFATFLQRKNEESGAVVVPGTRSRFFCSSDSTDCVSNKVSIQPLDETAVTDKENNLHESEYGDQEGKRLVDTDVARNSSDDIPNNHIPGDHIPDKATVFTDEESYSFKSSKFTRTISPPTLGTLRSCFSWSGGLGDFSRTPSPSPSTALQQFRRKSDSPTSLPENNMSDVSQLKSEESSDDESHPLREGACSSQSQESGEFSLQSSNASKLSQCSSKDSDSEESDCNIKLLDSQSDQTSKLCLSHFSKKDTPLRNKVPGLYKSSSADSLSTTKIKPLGPARASGLSKKPASIQKRKHHNAENKPGLQIKLNELWKNFGFKNKWCLESDDFSTEHHSAFRVQAIHHMPSQGAEFTASYMIGRNLYHIICFLTG

SEQ ID NO: 754635 - protein, 139 aa, Homo sapiens
MGIQGLLQFIKEASEPIHVRKYKGQVVAVDTYCWLHKGAIACAEKLAKGEPTDRRRQANLLKGKQLLREGKVSEARECFTRSINITHAMAHKVIKGQARRKRCDAGQSVKYKEMCALCSQEKRGCIVCGSREETLIGHK

SEQ ID NO: 754636 - protein, 846 aa, Homo sapiens [sequence omitted]

SEQ ID NO: 754637 - protein, 846 aa, Homo sapiens [sequence omitted]

SEQ ID NO: 754638 - protein, 876 aa, Homo sapiens
MGIQGLLQFIKEASEPIHVRKYKGQVVAVDTYCWLHKGAIACAEKLAKGEPTDRRRQANLLKGKQLLREGKVSEARECFTRSINITHAMAHKVIKGQARRKRCDAGQSVKYKEMCALCSQEKRGCIVCGSREETLIGHKKWCKSVSRIGGFLASLTSRMKPQTLAAARSQGVDCLVAPYEADAQLAYLNKAGIVQAIITEDSDLLAFGCKKVILKMDQFGNGLEIDQARLGMCRQLGDVFTEEKFRYMCILSGCDYLSSLRGIGLAKACKVLRLANNPDIVKVIKKIGHYLKMNITVPEDYINGFIRANNTFLYQLVFDPIKRKLIPLNAYEDDVDPETLSYAGQYVDDSIALQIALGNKDINTFEQIDDYNPDTAMPAHSRSRSWDDKTCQKSANVSSIWHRNYSPRPESGTVSDAPQLKENPSTVGVERVISTKGLNLPRKSSIVKRPRSAELSEDDLLSQYSLSFTKKTKKNSSEGNKSLSFSEVFVPDLVNGPTNKKSVSTPPRTRNKFATFLQRKNEESGAVVVPGTRSRFFCSSDSTDCVSNKVSIQPLDETAVTDKENNLHESEYGDQEGKRLVDTDVARNSSDDIPNNHIPGDHIPDKATVFTDEESYSFKSSKFTRTISPPTLGTLRSCFSWSGGLGDFSRTPSPSPSTALQQFRRKSDSPTSLPENNMSDVSQLKSEESSDDESHPLREGACSSQSQESGEFSLQSSNASKLSQCSSKDSDSEESDCNIKLLDSQSDQTSKLCLSHFSKKDTPLRNKVPGLYKSSSADSLSTTKIKPLGPARASGLSKKPASIQKRKHHNAENKPGLQIKLNELWKNFGFKKDSEKLPPCKKPLSPVRDNIQLTPEAEEDIFNKPECGRVQRAIFQ

SEQ ID NO: 754639 - protein, 846 aa, Homo sapiens [sequence omitted]

SEQ ID NO: 754640 - protein, 838 aa, Homo sapiens
MGIQGLLQFIKEASEPIHVRKYKGQVVAVDTYCWLHKGAIACAEKLAKGEPTDRYVGFCMKFVNMLLSHGIKPILVFDGCTLPSKKEVERSRRERRQANLLKGKQLLREGKVSEARECFTRSINITHAMAHKVIKAARSQGVDCLVAPYEADAQLAYLNKAGIVQAIITEDSDLLAFGCKKVILKMDQFGNGLEIDQARLGMCRQLGDVFTEEKFRYMCILSGCDYLSSLRGIGLAKACKVLRLANNPDIVKVIKKIGHYLKMNITVPEDYINGFIRANNTFLYQLVFDPIKRKLIPLNAYEDDVDPETLSYAGQYVDDSIALQIALGNKDINTFEQIDDYNPDTAMPAHSRSRSWDDKTCQKSANVSSIWHRNYSPRPESGTVSDAPQLKENPSTVGVERVISTKGLNLPRKSSIVKRPRSAELSEDDLLSQYSLSFTKKTKKNSSEGNKSLSFSEVFVPDLVNGPTNKKSVSTPPRTRNKFATFLQRKNEESGAVVVPGTRSRFFCSSDSTDCVSNKVSIQPLDETAVTDKENNLHESEYGDQEGKRLVDTDVARNSSDDIPNNHIPGDHIPDKATVFTDEESYSFKSSKFTRTISPPTLGTLRSCFSWSGGLGDFSRTPSPSPSTALQQFRRKSDSPTSLPENNMSDVSQLKSEESSDDESHPLREGACSSQSQESGEFSLQSSNASKLSQCSSKDSDSEESDCNIKLLDSQSDQTSKLCLSHFSKKDTPLRNKVPGLYKSSSADSLSTTKIKPLGPARASGLSKKPASIQKRKHHNAENKPGLQIKLNELWKNFGFKKWSLAVSQSQLTATSASQVQAILPQPPKELRLQLPPS

SEQ ID NO: 754641 - protein, 123 aa, Homo sapiens
MDSKDESSHVWPTSAEHEQNAAQVHFVPDTGTVAQIVYTDDQVRPPQQVVYTADGASYTSVDGPEHTLVYIHPVEAAQTLFTDPGQVAYVQQDATAQQASLPVHNQVLPSIESVDGSDPLATL

SEQ ID NO: 754642 - protein, 72 aa, Homo sapiens
LKNQLVELPPYTQLAVSLSHHWKTDIPCPLGLDGLCSSSFTNAPTTFLGVSEAQCGLQFSRLAGTSLISQGC

SEQ ID NO: 754643 - protein, 368 aa, Homo sapiens
SSRPAAAGTGSGLRRDWERAPQRTLARGSAQSVCEDPARRPPGDPMASEGLAGALASVLAGQGSSVHSCDSAPAGEPPAPVRLRKNVCYVVLAVFLSEQDEVLLIQEAKRECRGSWYLPAGRMEPGETIVEALQREVKEEAGLHCEPETLLSVEERGPSWVRFVFLARPTGGILKTSKEADAESLQAAWYPRTSLPTPLRAHDILHLVELAAQYRQQARHPLILPQELPCDLVCQRLVATFTSAQTVWVLVGTVGMPHLPVTACGLDPVEQRGGMKMAVLRLLQECLTLHHLVVEIKGLLGLQHLGRDHSDGICLNVLVTVAFRSPGIQDEPPKVRGENFSWWKVMEEDLQSQLLQRLQGSSVVPVNR

SEQ ID NO: 754644 - protein, 447 aa, Homo sapiens
SSRPAAAGTGSGLRRDWERAPQRTLARGSAQSVCEDPARRPPGDPMASEGLAGALASVLAGQGSSVHSCDSAPAGEPPAPVRLRKNVCYVVLAVFLSEQDEVLLIQEAKRECRGSWYLPAGRMEPGETIVEALQREVKEEAGLHCEPETLLSVEERGPSWVRFVFLARPTGMAHLEECEQGQLTPFPQLLGEVEPLYSQSCYGWHSLAWADSSLWAGGLSPGSGMSVDSARAALLSTQTLPAPSPTSPPGGILKTSKEADAESLQAAWYPRTSLPTPLRAHDILHLVELAAQYRQQARHPLILPQELPCDLVCQRLVATFTSAQTVWVLVGTVGMPHLPVTACGLDPVEQRGGMKMAVLRLLQECLTLHHLVVEIKGLLGLQHLGRDHSDGICLNVLVTVAFRSPGIQDEPPKVRGENFSWWKVMEEDLQSQLLQRLQGSSVVPVNR

SEQ ID NO: 754645 - protein, 368 aa, Homo sapiens; identical to SEQ ID NO: 754643

SEQ ID NO: 754646 - protein, 347 aa, Homo sapiens
LDEKPVIIASCLHKEYAGQKKSCFSKRKKKIAARNISFCVQEGEILGLLGPNGAGKSSSIRMISGITKPTAGEVELKGCSSVLGHLGYCPQENVLWPMLTLREHLEVYAAVKGLRKADARLAIARLVSAFKLHEQLNVPVQKLTAGITRKLCFVLSLLGNSPVLLLDEPSTGIDPTGQQQMWQAIQAVVKNTERGVLLTTHNLAEAEALCDRVAIMVSGRLRCIGSIQHLKNKLGKDYILELKVKETSQVTLVHTEILKLFPQAAGQERYSSLLTYKLPVADVYPLSQTFHKLEAVKHNFNLEEYSLSQCTLEKVFLELSKEQEVGNFDEEIDTTMRWKLLPHSDEP

SEQ ID NO: 754647 - protein, 329 aa, Homo sapiens
LDEKPVIIASCLHKEYAGQKKSCFSKRKKKIAARNISFCVQEGEILGLLGPNGAGKSSSIRMISGITKPTAGEVELKGCSSVLGHLGYCPQENVLWPMLTLREHLEVYAAVKGLRKADARLAIARLVSAFKLHEQLNVPVQKLTAGITRKLCFVLSLLGNSPVLLLDEPSTGIDPTGQQQMWQAIQAVVKNTERGVLLTTHNLAEAEALCDRVAIMVSGRLRCIGSIQHLKNKLGKDYILELKVKETSQVTLVHTEILKLFPQAAGQERYSSLLTYKLPVADVYPLSQTFHKLEAVKHNFNLEEYSLSQCTLEKVFLELSKEQEVGNFE

SEQ ID NO: 754648 - protein, 309 aa, Homo sapiens
LDEKPVIIASCLHKEYAGQKKSCFSKRKKKIAARNISFCVQEGEILGLLGPNGAGKSSSIRMISGITKPTAGEVELKGCSSVLGHLGYCPQENVLWPMLTLREHLEVYAAVKGLRKADARLAIARLVSAFKLHEQLNVPVQKLTAGITRKLCFVLSLLGNSPVLLLDEPSTGIDPTGQQQMWQAIQAVVKNTERGVLLTTHNLAEAEALCDRVAIMVSGRLRCIGSIQHLKNKLGKDYILELKVKETSQVTLVHTEILKLFPQAAGQERYSSLLTYKLPVADVYPLSQTFHKLEAEDYVKKLLAGRMGK

SEQ ID NO: 754649 - protein, 215 aa, Homo sapiens
ITLVSRFLSMLEEEVYSQNSPIWDQDFLSASSRTSQLGIQTVINPPPVAGTISYNSTSSSLEQPNAGSSSPACKASSGLEANPGEKRKMTDSHVLEEAKKPRVMGDIPMELINEVMSTITDPAAMLGPETNFLSAHSARDEAARLEERRGVIEFHVVGNSLNQKPNKKILMWLVGLQNVFSHQLPRMPKEYITRLVFDPKHKTLACSAGGSLEST

SEQ ID NO: 754650 - protein, 832 aa, Homo sapiens
MSEAGGAGPGGCGAGAGAGAGPGALPPQPAALPPAPPQGSPCAAAAGGSGACGPATAVAAAGTAEGPGGGGSARIAVKKAQLRSAPRAKKLEKLGVYSACKAEESCKCNGWKNPNPSPTPPRADLQQIIVSLTESCRSCSHALAAHVSHLENVSEEEMNRLLGIVLDVEYLFTCVHKEEDADTKQVYFYLFKLLRKSILQRGKPVVEGSLEKKPPFEKPSIEQGVNNFVQYKFSHLPAKERQTIVELAKMFLNRINYWHLEAPSQRRLRSPNDDISGYKENYTRWLCYCNVPQFCDSLPRYETTQVFGRTLLRSVFTVMRRQLLEQARQEKDKLPLEKRTLILTHFPKFLSMLEEEVYSQNSPIWDQDFLSASSRTSQLGIQTVINPPPVAGTISYNSTSSSLEQPNAGSSSPACKASSGLEANPGEKRKMTDSHVLEEAKKPRVMGDIPMELINEVMSTITDPAAMLGPETNFLSAHSARDEAARLEERRGVIEFHVVGNSLNQKPNKKILMWLVGLQNVFSHQLPRMPKEYITRLVFDPKHKTLALIKDGRVIGGICFRMFPSQGFTEIVFCAVTSNEQVKGYGTHLMNHLKEYHIKHDILNFLTYADEYAIGYFKKQGFSKEIKIPKTKYVGYIKDYEGATLMGCELNPRIPYTEFSVIIKKQKEIIKKLIERKQAQIRKVYPGLSCFKDGVRQIPIESIPGIRETGWKPSGKEKSKEPRDPDQLYSTLKSILQQVKSHQSAWPFMEPVKRTEAPGYYEVIRFPMDLKTMSERLKNRYYVSKKLFMADLQRVFTNCKEYNPPESEYYKCANILEKFFFSKIKEAGLIDK

SEQ ID NO: 754651 - protein, 832 aa, Homo sapiens; identical to SEQ ID NO: 754650

SEQ ID NO: 754652 - protein, 775 aa, Homo sapiens
MSEAGGAGPGGCGAGAGAGAGPGALPPQPAALPPAPPQGSPCAAAAGGSGACGPATAVAAAGTAEGPGGGGSARIAVKKAQLRSAPRAKKLEKLGVYSACKAEESCKCNGWKNPNPSPTPPRADLQQIIVSLTESCRSCSHALAAHVSHLENVSEEEMNRLLGIVLDVEYLFTCVHKEEDADTKQVYFYLFKLLRKSILQRGKPVVEGSLEKKPPFEKPSIEQGVNNFVQYKFSHLPAKERQTIVELAKMFLNRINYWHLEAPSQRRLRSPNDDISGYKENYTRWLCYCNVPQFCDSLPRYETTQVFGRTLLRSVFTVMRRQLLEQARQEKDKLPLEKRTLILTHFPKFLSMLEEEVYSQNSPIWDQDFLSASSRTSQLGIQTVINPPPVAGTISYNSTSSSLEQPNAGSSSPACKASSGLEANPGEKRKMTDSHVLEEAKKPRVMGDIPMELINEVMSTITDPAAMLGPETNFLSAHSARDEAARLEERRGVIEFHVVGNSLNQKPNKKILMWLVGLQNVFSHQLPRMPKEYITRLVFDPKHKTLALIKDGRVIGGICFRMFPSQGFTEIVFCAVTSNEQVKGYGTHLMNHLKEYHIKHDILNFLTYADEYAIGYFKKQGFSKEIKIPKTKYVGYIKDYEGATLMGCELNPRIPYTEFSVIIKKQKEIIKKLIERKQAQIRKVYPGLSCFKDGVRQIPIESIPGIRETGWKPSGKEKSKEPRDPDQLYSTLKSILQQVKSHQSAWPFMEPVKRTEAPGYYEVIRFPMGNTINIF

SEQ ID NO: 754653 - protein, 807 aa, Homo sapiens
MSEAGGAGPGGCGAGAGAGAGPGALPPQPAALPPAPPQGSPCAAAAGGSGACGPATAVAAAGTAEGPGGGGSARIAVKKAQLRSAPRAKKLEKLGVYSACKAEESCKCNGWKNPNPSPTPPRADLQQIIVSLTESCRSCSHALAAHVSHLENVSEEEMNRLLGIVLDVEYLFTCVHKEEDADTKQVYFYLFKLLRKSILQRGKPVVEGSLEKKPPFEKPSIEQGVNNFVQYKFSHLPAKERQTIVELAKMFLNRINYWHLEAPSQRRLRSPNDDISGYKENYTRWLCYCNVPQFCDSLPRYETTQVFGRTLLRSVFTVMRRQLLEQARQEKDKLPLEKRTLILTHFPKFLSMLEEEVYSQNSPIWDQDFLSASSRTSQLGIQTVINPPPVAGTISYNSTSSSLEQPNAGSSSPACKASSGLEANPGEKRKMTDSHVLEEAKKPRVMGDIPMELINEVMSTITDPAAMLGPETNFLSAHSARDEAARLEERRGVIEFHVVGNSLNQKPNKKILMWLVGLQNVFSHQLPRMPKEYITRLVFDPKHKTLALIKDGRVIGGICFRMFPSQGFTEIVFCAVTSNEQVKGYGTHLMNHLKEYHIKHDILNFLTYADEYAIGYFKKQGFSKEIKIPKTKYVGYIKDYEGATLMGCELNPRIPYTEFSVIIKKQKEIIKKLIERKQAQIRKVYPGLSCFKDGVRQIPIESIPGIRETGWKPSGKEKSKEPRDPDQLYSTLKSILQQVKSHQSAWPFMEPVKRTEAPGYYEVIRFPMDLKTMSERLKNRYYVSKKLFMADLQRVFTNCKEYNPPEK

SEQ ID NO: 754654 - protein, 832 aa, Homo sapiens; identical to SEQ ID NO: 754650

SEQ ID NO: 754655 - protein, 388 aa, Homo sapiens
MRSLDVSHPHCLERIALCNFFLSLASQTNFLSAHSARDEAARLEERRGVIEFHVVGNSLNQKPNKKILMWLVGLQNVFSHQLPRMPKEYITRLVFDPKHKTLALIKDGRVIGGICFRMFPSQGFTEIVFCAVTSNEQVKGYGTHLMNHLKEYHIKHDILNFLTYADEYAIGYFKKQGFSKEIKIPKTKYVGYIKDYEGATLMGCELNPRIPYTEFSVIIKKQKEIIKKLIERKQAQIRKVYPGLSCFKDGVRQIPIESIPGIRETGWKPSGKEKSKEPRDPDQLYSTLKSILQQVKSHQSAWPFMEPVKRTEAPGYYEVIRFPMDLKTMSERLKNRYYVSKKLFMADLQRVFTNCKEYNPPESEYYKCANILEKFFFSKIKEAGLIDK

SEQ ID NO: 754656 - protein, 498 aa, Homo sapiens
MSEAGGAGPGGCGAGAGAGAGPGALPPQPAALPPAPPQGSPCAAAAGGSGACGPATAVAAAGTAEGPGGGGSARIAVKKAQLRSAPRAKKLEKLGVYSACKAEESCKCNGWKNPNPSPTPPRADLQQIIVSLTESCRSCSHALAAHVSHLENVSEEEMNRLLGIVLDVEYLFTCVHKEEDADTKQVYFYLFKLLRKSILQRGKPVVEGSLEKKPPFEKPSIEQGVNNFVQYKFSHLPAKERQTIVELAKMFLNRINYWHLEAPSQRRLRSPNDDISGYKENYTRWLCYCNVPQFCDSLPRYETTQVFGRTLLRSVFTVMRRQLLEQARQEKDKLPLEKRTLILTHFPKFLSMLEEEVYSQNSPIWDQDFLSASSRTSQLGIQTVINPPPVAGTISYNSTSSSLEQPNAGSSSPACKASSGLEANPGEKRKMTDSHVLEEAKKPRVMGDIPMELINEVMSTITDPAAMLGPEVSRVNLGSQLVDLFCSPGHSSCQKWGC

SEQ ID NO: 754657 - protein, 87 aa, Homo sapiens
MGAAAATKTTPAALAGPEGGRLRTSAGRSLRWEALAGAPPVLRCEPGHKEPSALAPQDRGPELEASVHPCGSRHVHVATMTPSASQG

SEQ ID NO: 754658 - protein, 87 aa, Homo sapiens; identical to SEQ ID NO: 754657

SEQ ID NO: 754659 - protein, 243 aa, Homo sapiens [sequence omitted]

SEQ ID NO: 754660 - protein, 238 aa, Homo sapiens
MEVPTAYMISPKEREKASNLKLSSRPPATSHLIRTPKDTHYCGASKGLGNSFIGNESFLPEFINGDFDSIRPEVREYYATKGCELISTPDQDHTDFTKCLKMLQKKIEEKDLKVDVIVTLGGLAGRFDQIMASVNTLFQATHITPFPIIIIQEESLIYLLQPGKHRLHVDTGMEGDWCGLIPVGQPCMQVTTTGLKWNLTNDVLAFGTLVSTSNTYDGSGVVTVETDHPLLWTMAIKS

SEQ ID NO: 754661 - protein, 137 aa, Homo sapiens
MLQKKIEEKDLKVDVIVTLGGLAGRFDQIMASVNTLFQATHITPFPIIIIQEESLIYLLQPGKHRLHVDTGMEGDWCGLIPVGQPCMQVTTTGLKWNLTNDVLAFGTLVSTSNTYDGSGVVTVETDHPLLWTMAIKS

SEQ ID NO: 754662 - protein, 204 aa, Homo sapiens
ERRAVDRRSSRSLRSPVCGSYQPLWNLKYCLVILNQPLDNYFRHLWNKALLRACADGGANRLYDITEGERESFLPEFINGDFDSIRPEVREYYATKGCELISTPDQDHTDFTKCLKMLQKKIEEKDLKGKHRLHVDTGMEGDWCGLIPVGQPCMQVTTTGLKWNLTNDVLAFGTLVSTSNTYDGSGVVTVETDHPLLWTMAIKS

SEQ ID NO: 754663 - protein, 243 aa, Homo sapiens [sequence omitted]

SEQ ID NO: 754664 - protein, 137 aa, Homo sapiens; identical to SEQ ID NO: 754661

SEQ ID NO: 754665 - protein, 1937 aa, Homo sapiens
HEAARGMTCALNNLLHSLQLPESCSEIKHEAFKNHVFNVDNAKFVVKFDLSALTTIGNAKNSLIGMWALSPTVFALLSKNLMIVHSDLAVHFPAIQYAVLYTLYPHCTRHDHFIFSSLSSSSPSLFDGAVIGTVTMATKKHFSIILNLLGMLLKKDNQDTRKLLMTWALEVAVVMKKSETYAPLFCLPSFHKFCKGLLADTLVEDVNICLQACSSLHALSSSLPDDLLQRCVDVCRVQLVHRGTCIRQAFGKLLKSIPLGVFLSDNNHTEIQEISLALRSHMSKAPSNTFHPQDFSDVISFILYGNSHRTGKDNWLERLFYSCQRLDKRDQSTIPRNLLKTDAILWQWAIWEAAQFTVLYKLRTPLGRAQDTFQTIEGIIRSLAGHTLNPDQDVSQWTTADSDEGHGNNQLRLVLLLQYLENLEKLMYNAYEGCANALTSPPKVIRTFLYTNRQTCQDWLTRIRLSIMRVGLLAGQPAVTVRHGFDLLTEMKTTSLSQGNELEVSIMMVVEALCELHCPEAIQGIAVWSSSIVGKHLLWINSVAQQAEGRFEKASVEYQEHLCAMTGVDCCISSFDKSVLTLASAGCKSASLKHCLNGESRKSVLSKPTDSSPEVINYLGNKACECYISTADWAAVQEWQNAIHDLKKSTSSTSLNLKADFNYIKSLSSFESGKFVECTEQLELLPGENINLLAGGSKEKIDMKKLLRNMRSPDPREPQKSIEVPLLRSSVCLATALNPIEQDQKWQSITENVVKYLKQTSRIAIGPLRLSTLTVSQSLPVLSTLQLYCSSALETTVSNRLSTEDCLIPLFGEALRSCKQHDVRPWMQALRYTVYQNQLLEKIKGMICEILRETEVTNETIVPVSHRRKLRLALIMAPVLILQMVKLSIVLTPQFLSHDQGQLTKELQQHVKSVTCPCEYLRKVINTLADHHHRGTDFGGSPWLHVIIAFPTSYKVVITLWIVYLWVSLLKTIFWSRNGHDGSTDVQQRAWRSNRRRQEGLRSICMHTKKRVSSFRGNKIGLKDVITLRRHVETKVRAKIRKRKVTTKINHHDKINGKRKTARKQKMFQRAQELRRRAEDYHKCKIPLLQERLFATGSEWRQRSIVILQDVPYWPYLTAETLKNRMGHQPPPPTQQHSITDNSLSLKTPPECLLTPLPPSADDNLKTPPECVLTPLPPSADDNLKTPPECVLIPFHPQRMIISRHLLSVSSLPFHPQRMIISRHLPSVCSLPFHPQLYPQLHPQQMIISRHVPSVCSIPFHPQRMIISRHLPSVSSLPFHPQLHPQQMIISRHLPSVCGGRFHPQRMIISRHLPSVSSLPFHPQLHPQQMIISRHLPSVCGGRFHPQRMIISRHLPSVSSLPFHPQLHPQQMIISRHLPSVCGGRFHPQRMIISRHLPSVSSLPFHPQLHPQQMIISRHLPSVCGGRFHPQRMIISRHLPSVSSLPFHPQLHPQQMINIKTPAFHPQRMIISRHLPSVSSLPFHPQLHPQQMIISRYLLSVCGFRFHHQPMIISRHLPSVSSLPFHPQLHPQQMIISRHLPSVCGGRFHPQRMIISRHLPSISSLPFHPQLHPQQMIISRHLPSVCGGRFHPQRMIISRHLPSVSSLPFHPQLHPQQMIISRHLPSVCGGRFHPQRMIISRHLPSVSSLPFHTQLHPQQMIISRHLPSVCGELCGGRFHPQRMIISRHLPSVSSLPFHPQLHPQQMIISRHLLSVCGGRFHPQRMIISRHLPSVSSLPFHPQLHPQQMIISRHLPSVCGGRFHPQRMIISRHLPSVSSLPFHPQLHPQQMIISRHLPSVCGGRFHPQPDDNLKTPPLATQEAEAEKPRKPKRQRAAEMEPPPEPKRRRVGDVEPSRKPKRRRAADVEPSSPEPKRRRVGDVEPSRKPKRRRAADVEPSSPEPKRRRVGDVEPSRKPKRRRAADVEPSLPEPKRRRLS

SEQ ID NO: 754666 - protein, 1808 aa, Homo sapiens
MAIRLTLIAKKHFSIILNLLGMLLKKDNQDTRKLLMTWALEVAVVMKKSETYAPLFCLPSFHKFCKGLLADTLVEDVNICLQACSSLHALSSSLPDDLLQRCVDVCRVQLVHRGTCIRQAFGKLLKSIPLGVFLSDNNHTEIQEISLALRSHMSKAPSNTFHPQDFSDVISFILYGNSHRTGKDNWLERLFYSCQRLDKRDQSTIPRNLLKTDAILWQWAIWEAAQFTVLYKLRTPLGRAQDTFQTIEGIIRSLAGHTLNPDQDVSQWTTADSDEGHGNNQLRLVLLLQYLENLEKLMYNAYEGCANALTSPPKVIRTFLYTNRQTCQDWLTRIRLSIMRVGLLAGQPAVTVRHGFDLLTEMKTTSLSQGNELEVSIMMVVEALCELHCPEAIQGIAVWSSSIVGKHLLWINSVAQQAEGRFEKASVEYQEHLCAMTGVDCCISSFDKSVLTLASAGCKSASLKHCLNGESRKSVLSKPTDSSPEVINYLGNKACECYISTADWAAVQEWQNAIHDLKKSTSSTSLNLKADFNYIKSLSSFESGKFVECTEQLELLPGENINLLAGGSKEKIDMKKLLRNMRSPDPREPQKSIEVPLLRSSVCLATALNPIEQDQKWQSITENVVKYLKQTSRIAIGPLRLSTLTVSQSLPVLSTLQLYCSSALETTVSNRLSTEDCLIPLFGEALRSCKQHDVRPWMQALRYTVYQNQLLEKIKGMICEILRETEVTNETIVPVSHRRKLRLALIMSPFLILQMVKLSIVLTPQFLSHDQGQLTKELQQHVKSVTCPCEYLRKVINTLADHHHRGTDFGGSPWLHVIIAFPTSYKVVITLWIVYLWVSLLKTIFWSRNGHDGSTDVQQRAWRSNRRRQEGLRSICMHTKKRVSSFRGNKIGLKDVITLRRHVETKVRAKIRKRKVTTKINHHDKINGKRKTARKQKMFQRAQELRRRAEDYHKCKIPLLQERLFATGSEWRQRSIVILQDVPYWPYLTAETLKNRMGHQPPPPTQQHSITDNSLSLKTPPECLLTPLPPSADDNLKTPPECVLTPLPPSADDNLKTPPECVLIPFHPQRMIISRHLLSVSSLPFHPQRMIISRHLPSVCSLPFHPQLYPQLHPQQMIISRHVPSVCSIPFHPQRMIISRHLPSVSSLPFHPQLHPQQMIISRHLPSVCGGRFHPQRMIISRHLPSVSSLPFHPQLHPQQMIISRHLPSVCGGRFHPQRMIISRHLPSVSSLPFHPQLHPQQMIISRHLPSVCGGRFHPQRMIISRHLPSVSSLPFHPQLHPQQMIISRHLPSVCGGRFHPQRMIISRHLPSVSSLPFHPQLHPQQMINIKTPAFHPQRMIISRHLPSVSSLPFHPQLHPQQMIISRYLLSVCGFRFHHQPMIISRHLPSVSSLPFHPQLHPQQMIISRHLPSVCGGRFHPQRMIISRHLPSISSLPFHPQLHPQQMIISRHLPSVCGGRFHPQRMIISRHLPSVSSLPFHPQLHPQQMIISRHLPSVCGGRFHPQRMIISRHLPSVSSLPFHTQLHPQQMIISRHLPSVCGERCGGRFHPQRMIISRHLPSVSSLPFHPQLHPQQMIISRHLLSVCGGRFHPQRMIISRHLPSVSSLPFHPQLHPQQMIISRHLPSVCGGRFHPQRMIISRHLPSVSSLPFHPQLHPQQMIISRHLPSVCGGRFHPQPDDNLKTPPLATQEAEAEKPRKPKRQRAAEMEPPPEPKRRRVGDVEPSRKPKRRRAADVEPSSPEPKRRRVGDVEPSRKPKRRRAADVEPSSPEPKRRRVGDVEPSRKPKRRRAADVEPSLPEPKRRRLS

SEQ ID NO: 754667 - protein, 581 aa, Homo sapiens
MAIRLTLIAKKHFSIILNLLGMLLKKDNQDTRKLLMTWALEVAVVMKKSETYAPLFCLPSFHKFCKGLLADTLVEDVNICLQACSSLHALSSSLPDDLLQRCVDVCRVQLVHRGTCIRQAFGKLLKSIPLGVFLSDNNHTEIQEISLALRSHMSKAPSNTFHPQDFSDVISFILYGNSHRTGKDNWLERLFYSCQRLDKRDQSTIPRNLLKTDAILWQWAIWEAAQFTVLYKLRTPLGRAQDTFQTIEGIIRSLAGHTLNPDQDVSQWTTADSDEGHGNNQLRLVLLLQYLENLEKLMYNAYEGCANALTSPPKVIRTFLYTNRQTCQDWLTRIRLSIMRVGLLAGQPAVTVRHGFDLLTEMKTTSLSQGNELEVSIMMVVEALCELHCPEAIQGIAVWSSSIVGKHLLWINSVAQQAEGRFEKASVEYQEHLCAMTGVDCCISSFDKSVLTLASAGCKSASLKHCLNGESRKSVLSKPTDSSPEVINYLGNKACECYISTADWAAVQEWQNAIHDLKKSTSSTSLNLKADFNYIKSLSSFESGKFVECTEQLELLPGENINLLAGGSKEKIDMKKLLRNM

SEQ ID NO: 754668 - protein, 285 aa, Homo sapiens
MARNAEKAMTALARFRQAQLEEGKVKERRPFLASECTELPKAEKWRRQIIGEISKKVAQIQNAGLGEFRIRDLNDEINKLLREKGHWEVRIKELGGPDYGKVGPKMLDHEGKEVPGNRGYKYFGAAKDLPGVRELFEKEPLPPPRKTRAELMKAIDFEYYGYLDEDDGVIVPLEQEYEKKLRAELVEKWKAEREARLARGEKEEEEEEEEEINIYAVTEEESDEEGSQEKGGDDSQQKFIAHVPVPSQQEIEEALVRRKKMELLQKYASETLQAQSEEARRLLGY

SEQ ID NO: 754669 - protein, 285 aa, Homo sapiens; identical to SEQ ID NO: 754668

SEQ ID NO: 754670 - protein, 285 aa, Homo sapiens; identical to SEQ ID NO: 754668

SEQ ID NO: 754671 - protein, 320 aa, Homo sapiens
LGTSPWVNRPRGVFWACGVSWTGAAGLQDGALSDTMARNAEKAMTALARFRQAQLEEGKVKERRPFLASECTELPKAEKWRRQIIGEISKKVAQIQNAGLGEFRIRDLNDEINKLLREKGHWEVRIKELGGPDYGKVGPKMLDHEGKEVPGNRGYKYFGAAKDLPGVRELFEKEPLPPPRKTRAELMKAIDFEYYGYLDEDDGVIVPLEQEYEKKLRAELVEKWKAEREARLARGEKEEEEEEEEEINIYAVTEEESDEEGSQEKGGDDSQQKFIAHVPVPSQQEIEEALVRRKKMELLQKYASETLQAQSEEARRLLGY

SEQ ID NO: 754672 - protein, 285 aa, Homo sapiens; identical to SEQ ID NO: 754668

SEQ ID NO: 754673 - protein, 210 aa, Homo sapiens
MARNAEKAMTALARFRQAQLEEGKVKERRPFLASECTELPKAEKWRRQIIGEISKKVAQIQNAGLGEFRIRDLNDEINKLLREKGHWEVRIKELGGPDYGKVGPKMLDHEGKEVPGNRGYKYFGAAKDLPGVRELFEKEPLPPPRKTRAELMKAIDFEYYGYLDEDDGVIVPLEQEYEKKLGRGRQPGERRGRQPAEVHCSRPCSLAARD

SEQ ID NO: 754674 - protein, 210 aa, Homo sapiens; identical to SEQ ID NO: 754673

SEQ ID NO: 754675 - protein, 169 aa, Homo sapiens
MARNAEKAMTALARFRQAQLEEGKVKERRPFLASECTELPKAEKWRRQIIGEISKKVAQIQNAGLGEFRIRDLNDEINKLLREKGHWEVRIKELGGPDYGKVGPKMLDHEGKEVPGNRGYKYFGAAKDLPGVRELFEKELGRGRQPGERRGRQPAEVHCSRPCSLAARD

SEQ ID NO: 754676 - protein, 135 aa, Homo sapiens
MARNAEKAMTALARFRQAQLEEGKVKERRPFLASECTELPKAEKWRRQIIGEISKKVAQIQNAGLGEFRIRDLNDEINKLLREKGHWEVRIKELGGPDYGKVGPKMLDHEGKEVPGNPMSTKNTKKLAGRTGMHL

SEQ ID NO: 754677 - protein, 433 aa, Homo sapiens
MAGPGPGPGDPDEQYDFLFKLVLVGDASVGKTCVVQRFKTGAFSERQGSTIGVDFTMKTLEIQDKRVKLQIWDTAGQERFRTITQSYYRSANGAILAYDITKRSSFLSVPHWIEDVRKYAGSNIVQLLIGNKSDLSELREVSLAEAQSLAEHYDILCAIETSAKDSSNVEEAFLRVATELIMRHGGPLFSEKSPDHIQLNSKDIGEGWGCGCCPGAGPADWGFPTSLLSPACQAQPSRASPPGYRQLQQPGEALELCILWPGCGMEALLEEGEAGYPGGPPCQPAAGPPPSSHSKTGLNPPVWATVGGASSPPCPMPAGSDRFLSWVCFTCGSRLLLSRDVSSALGSSRSSWGSAQSSRARAMRPTDLVPERSSREAPAPSRRGTCFLPSLPLQHSQTSPWGLAHCLIRTSEFSDFLCSFSFSSAQHGVTAHS

SEQ ID NO: 754678 - protein, 285 aa, Homo sapiens; identical to SEQ ID NO: 754668

SEQ ID NO: 754679 - protein, 649 aa, Homo sapiens
MARNAEKAMTALARFRQAQLEEGKVKERRPFLASECTELPKAEKWRRQIIGEISKKVAQIQNAGLGEFRIRDLNDEINKLLREKGHWEVRIKELGGPDYGKVGPKMLDHEGKEVPGNRGYKYFGAAKDLPGVRELFEKEPLPPPRKTRAELMKAIDFEYYGYLDEDDGVIVPLEQEYEKKLRAELVEKWKAEREARLARGEKEEEEEEEEEINIYAVTEEESDEEGSQEKGGDDSQQKFIAHVPVPSQQEIEEALVRRKKMELLQKYASETLQAQSEEARRLLGLQIWDTAGQERFRTITQSYYRSANGAILAYDITKRSSFLSVPHWIEDVRKYAGSNIVQLLIGNKSDLSELREVSLAEAQSLAEHYDILCAIETSAKDSSNVEEAFLRVATELIMRHGGPLFSEKSPDHIQLNSKDIGEGWGCGCCPGAGPADWGFPTSLLSPACQAQPSRASPPGYRQLQQPGEALELCILWPGCGMEALLEEGEAGYPGGPPCQPAAGPPPSSHSKTGLNPPVWATVGGASSPPCPMPAGSDRFLSWVCFTCGSRLLLSRDVSSALGSSRSSWGSAQSSRARAMRPTDLVPERSSREAPAPSRRGTCFLPSLPLQHSQTSPWGLAHCLIRTSEFSDFLCSFSFSSAQHGVTAHS

SEQ ID NO: 754680 - protein, 285 aa, Homo sapiens; identical to SEQ ID NO: 754668

SEQ ID NO: 754681 - protein, 285 aa, Homo sapiens; identical to SEQ ID NO: 754668

SEQ ID NO: 754682 - protein, 649 aa, Homo sapiens; identical to SEQ ID NO: 754679

SEQ ID NO: 754683 - protein, 307 aa, Homo sapiens
MARNAEKAMTALARFRQAQLEEGKVKERRPFLASECTELPKAEKWRRQIIGEISKKVAQIQNAGLGEFRIRDLNDEINKLLREKGHWEVRIKELGGPDYGKVGPKMLDHEGKEVPGNRGYKYFGAAKDLPGVRELFEKERQVRWLMPVIPALWEAEAGGSQALPPPRKTRAELMKAIDFEYYGYLDEDDGVIVPLEQEYEKKLRAELVEKWKAEREARLARGEKEEEEEEEEEINIYAVTEEESDEEGSQEKGGDDSQQKFIAHVPVPSQQEIEEALVRRKKMELLQKYASETLQAQSEEARRLLGY

SEQ ID NO: 754684 - protein, 326 aa, Homo sapiens
MARNAEKAMTALARFRQAQLEEGKVKERRPFLASECTELPKAEKWRRQIIGEISKKVAQIQNAGLGEFRIRDLNDEINKLLREKGHWEVRIKELGGPDYGYMSCQSEPLPDLFSSCVVEILFFLLRQLKSSSLIHLEKWSQKVGPKMLDHEGKEVPGNRGYKYFGAAKDLPGVRELFEKEPLPPPRKTRAELMKAIDFEYYGYLDEDDGVIVPLEQEYEKKLRAELVEKWKAEREARLARGEKEEEEEEEEEINIYAVTEEESDEEGSQEKGGDDSQQKFIAHVPVPSQQEIEEALVRRKKMELLQKYASETLQAQSEEARRLLGY

SEQ ID NO: 754685 - protein, 105 aa, Homo sapiens
MEKLALKCWIMKEKKSQETEVTSTLEQQKICLVLESCLKKNSDEEGSQEKGGDDSQQKFIAHVPVPSQQEIEEALVRRKKMELLQKYASETLQAQSEEARRLLGY

SEQ ID NO: 754686 - protein, 74 aa, Homo sapiens
LGYVWGNYMSVSLGFSTRAGQILRKNPLVSFLQVGGLAACGLEAKWENKAVGGSSITEFIRCVFKEGDSTSSKV

SEQ ID NO: 754687 - protein, 103 aa, Homo sapiens
PALTLLFYYYISQHLVVPNMRMWLARGKQQNTKPDLSQIGKTRGESAKLSPFGMPIPSRKQLGQCSSALHKQTTVGSLIPGLACEGLPQVSPFTVVHIYSDFC

SEQ ID NO: 754688 - protein, 269 aa, Homo sapiens
MTLTFPFRIVHDAGFGPWYFKFILCRYTSVLFYANMYTSIVFLGLISIDRYLKVVKPFGDSRMYSITFTKVLSVCVWVIMAVLSLPNIILTNGQPTEDNIHDCSKLKSPLGVKWHTAVTYVNSCLFVAVLVILIGCYIAISRYIHKSSRQFISQSSRKRKHNQSIRVVVAVFFTCFLPYHLCRIPFTFSHLDRLLDESAQKILYYCKEITLFLSACNVCLDPIIYFFMCRSFSRRLFKKSNIRTRSESIRSLQSVRRSEVRIYYDYTDV

SEQ ID NO: 754689 - protein, 358 aa, Homo sapiens
MGFNLTLAKLPNNELHGQESHNSGNRSDGPGKNTTLHNEFDTIVLPVLYLIIFVASILLNGLAVWIFFHIRNKTSFIFYLKNIVVADLIMTLTFPFRIVHDAGFGPWYFKFILCRYTSVLFYANMYTSIVFLGLISIDRYLKVVKPFGDSRMYSITFTKVLSVCVWVIMAVLSLPNIILTNGQPTEDNIHDCSKLKSPLGVKWHTAVTYVNSCLFVAVLVILIGCYIAISRYIHKSSRQFISQSSRKRKHNQSIRVVVAVFFTCFLPYHLCRIPFTFSHLDRLLDESAQKILYYCKEITLFLSACNVCLDPIIYFFMCRSFSRRLFKKSNIRTRSESIRSLQSVRRSEVRIYYDYTDV

SEQ ID NO: 754690 - protein, 623 aa, Homo sapiens
MSCRQFSSSYLSRSGGGGGGGLGSGGSIRSSYSRFSSSGGRGGGGRFSSSSGYGGGSSRVCGRGGGGSFGYSYGGGSGGGFSASSLGGGFGGGSRGFGGASGGGYSSSGGFGGGFGGGSGGGFGGGYGSGFGGLGGFGGGAGGGDGGILTANEKSTMQELNSRLASYLDKVQALEEANNDLENKIQDWYDKKGPAAIQKNYSPYYNTIDDLKDQIVDLTVGNNKTLLDIDNTRMTLDDFRIKFEMEQNLRQGVDADINGLRQVLDNLTMEKSDLEMQYETLQEELMALKKNHKEEMSQLTGQNSGDVNVEINVAPGKDLTKTLNDMRQEYEQLIAKNRKDIENQYETQITQIEHEVSSSGQEVQSSAKEVTQLRHGVQELEIELQSQLSKKAALEKSLEDTKNRYCGQLQMIQEQISNLEAQITDVRQEIECQNQEYSLLLSIKMRLEKEIETYHNLLEGGQEDFESSGAGKIGLGGRGGSGGSYGRGSRGGSGGSYGGGGSGGGYGGGSGSRGGSGGSYGGGSGSGGGSGGGYGGGSGGGHSGGSGGGHSGGSGGNYGGGSGSGGGSGGGYGGGSGSRGGSGGSHGGGSGFGGESGGSYGGGEEASGSGGGYGGGSGKSSHS

SEQ ID NO: 754691 - protein, 522 aa, Homo sapiens
PRGRGQRQSRYLSRPPRPAASEEARAKRAGGDQVRAGGSRARPRPRTLRPELHGTMAPKLLLLLCLFSGLHARSRKVEEDEYEDSSSNQKWVLAPKSQDTDVTLILNKLLREYDKKLRPDIGIKPTVIDVDIYVNSIGPVSSINMEYQIDIFFAQTWTDSRLRFNSTMKILTLNSNMVGLIWIPDTIFRNSKTAEAHWITTPNQLLRIWNDGKILYTLRLTINAECQLQLHNFPMDEHSCPLIFSSYGYPKEEMIYRWRKNSVEAADQKSWRLYQFDFMGLRNTTEIVTTSAGDYVVMTIYFELSRRMGYFTIQTYIPCILTVVLSWVSFWIKKDATPARTALGITTVLTMTTLSTIARKSLPRVSYVTAMDLFVTVCFLFVFAALMEYATLNYYSSCRKPTTTKKTTSLLHPDSSRWIPERISLQAPSNYSLLDMRPPPPAMITLNNSVYWQEFEDTCVYECLDGKDCQSFFCCYEECKSGSWRKGRIHIDILELDSYSRVFFPTSFLLFNLVYWVGYLYL

SEQ ID NO: 754692 - protein, 348 aa, Homo sapiens
PRSWGEGYRRGWLLGMQPRVSQSQTWQENKLSEYQIDIFFAQTWTDSRLRFNSTMKILTLNSNMVGLIWIPDTIFRNSKTAEAHWITTPNQLLRIWNDGKILYTLRLTINAECQLQLHNFPMDEHSCPLIFSSYGYPKEEMIYRWRKNSVEAADQKSWRLYQFDFMGLRNTTEIVTTSAGDYVVMTIYFELSRRMGYFTIQTYIPCILTVVLSWVSFWIKKDATPARTALGITTVLTMTTLSTIARKSLPRVSYVTAMDLFVTVCFLFVFAALMEYATLNYYSSCRKPTTTKKTTSLLHPDSSRWIPERISLQAPSKPSCCPACGLQGLPFRSLVSHPRISRAFCLPV

SEQ ID NO: 754693 - protein, 461 aa, Homo sapiens
PRGRGQRQSRYLSRPPRPAASEEARAKRAGGDQVRAGGSRARPRPRTLRPELHGTMAPKLLLLLCLFSGLHARSRKVEEDEYEDSSSNQKWVLAPKSQDTDVTLILNKLLREYDKKLRPDIGIKPTVIDVDIYVNSIGPVSSINMEYQIDIFFAQTWTDSRLRFNSTMKILTLNSNMVGLIWIPDTIFRNSKTAEAHWITTPNQLLRIWNDGKILYTLRLTINAECQLQLHNFPMDEHSCPLIFSSYGYPKEEMIYRWRKNSVEAADQKSWRLYQFDFMGLRNTTEIVTTSAGDYVVMTIYFELSRRMGYFTIQTYIPCILTVVLSWVSFWIKKDATPARTALGITTVLTMTTLSTIARKSLPRVSYVTAMDLFVTVCFLFVFAALMEYATLNYYSSCRKPTTTKKTTSLLHPDSSRWIPERISLQAPSKPSCCPACGLQGLPFRSLVSHPRISRAFCLPV

SEQ ID NO: 754694 - protein, 231 aa, Homo sapiens
MVGNEAKKVKSWARWLTPVITALLEAEAGRLLEPRSSRSAWVTRDLVSMQNQKSKLGVVTGGANLGRIGVISNRERHPGSFDVVHVKKMPMATALPLRLSNISDIGKGKRTMDVSSPRKRVSASPLPEERDHQTGGQTRARGVTTGPRVTTADSSTQLTHTGPRIPRNKTQHTTPHRQQHPQEGPPAHGTQRHGSNGPPLHNPHKNTRPAPTNREHNGANSTRHARTSTPI

SEQ ID NO: 754695 - protein, 329 aa, Homo sapiens
SPASCGFGDHRAAAMGARLGRRAGPEAGSEAGAAAGCGPAPYERRVRWLREIQSTLRERRPERARQLLRLLRQDLGLERTLLPDILYRDVAFLNPVDPISHDLLVNLARDLQCPKKDYELWKSSDKICRQLIYHLTPHSKQQQGSSLRQRKTQSCLKSSLQKTLLAGETVDLSGIPLSTQDVQHITRYLSSHGAVLAVLDLSFTGLSDELLHLLLPSLWALPRLTQLLLNGNRLTRATARKLTDAIKDTTKFPALAWVDLGNNVDVASLPQPLLVGLRRRLSQRTSLPTIYEGLDLEPEGSAAGATTPASTWDSTAAGLGPEPQACCAR

SEQ ID NO: 754696 - protein, 221 aa, Homo sapiens
MVTLPSQQDYELWKSSDKICRQLIYHLTPHSKQQQGSSLRQRKTQSCLKSSLQKTLLAGETVDLSGIPLSTQDVQHITRYLSSHGAVLAVLDLSFTGLSDELLHLLLPSLWALPRLTQLLLNGNRLTRATARKLTDAIKDTTKFPALAWVDLGNNVDVASLPQPLLVGLRRRLSQRTSLPTIYEGLDLEPEGSAAGATTPASTWDSTAAGLGPEPQACCAR

SEQ ID NO: 754697 - protein, 68 aa, Homo sapiens
MVTLPSHRTMSSGSPRTRSADSSSTTSPLTRSSSKGPACARGRPRAGKGSPATAPPHCCSKVPSQVDT

SEQ ID NO: 754698 - protein, 268 aa, Homo sapiens
MPPALSAQTQTPQAQSRLESERKKNTLTWLVPTPWDWRQWSTAPSRGLVWPPPPVDYELWKSSDKICRQLIYHLTPHSKQQQGSSLRQRKTQSCLKSSLQKTLLAGETVDLSGIPLSTQDVQHITRYLSSHGAVLAVLDLSFTGLSDELLHLLLPSLWALPRLTQLLLNGNRLTRATARKLTDAIKDTTKFPALAWVDLGNNVDVASLPQPLLVGLRRRLSQRTSLPTIYEGLDLEPEGSAAGATTPASTWDSTAAGLGPEPQACCAR

SEQ ID NO: 754699 - protein, 268 aa, Homo sapiens; identical to SEQ ID NO: 754698

SEQ ID NO: 754700 - protein, 107 aa, Homo sapiens [sequence omitted]

SEQ ID NO: 754701 - protein, 137 aa, Homo sapiens
ISVQLPLRRRLQCTKMAAPVDLELKKAFTELQAKVIDTQQKVKLADIQIEQLNRTKKHAHLTDTEIMTLVDETNMYEGVGRMFILQSKEAIHSQLLEKQKIAEEKIKELEQKKSYLERSVKEAEDNIREMLMARRAQ

SEQ ID NO: 754702 - protein, 122 aa, Homo sapiens
MAAPVDLELKKAFTELQAKVIDTQQKVKLADIQIEQLNRTKKHAHLTDTEIMTLVDETNMYEGVGRMFILQSKEAIHSQLLEKQKIAEEKIKELEQKKSYLERSVKEAEDNIREMLMARRAQ

SEQ ID NO: 754703 - protein, 137 aa, Homo sapiens; identical to SEQ ID NO: 754701

SEQ ID NO: 754704 - protein, 137 aa, Homo sapiens; identical to SEQ ID NO: 754701

SEQ ID NO: 754705 - protein, 137 aa, Homo sapiens; identical to SEQ ID NO: 754701

SEQ ID NO: 754706 - protein, 137 aa, Homo sapiens; identical to SEQ ID NO: 754701

SEQ ID NO: 754707 - protein, 137 aa, Homo sapiens; identical to SEQ ID NO: 754701

SEQ ID NO: 754708 - protein, 70 aa, Homo sapiens
QAGKARRYRDETRFRFILQSKEAIHSQLLEKQKIAEEKIKELEQKKSYLERSVKEAEDNIREMLMARRAQ

SEQ ID NO: 754709 - protein, 73 aa, Homo sapiens
CIDYLRKNLQETTGEELRFILQSKEAIHSQLLEKQKIAEEKIKELEQKKSYLERSVKEAEDNIREMLMARRAQ

SEQ ID NO: 754710 - protein, 137 aa, Homo sapiens; identical to SEQ ID NO: 754701

SEQ ID NO: 754711 - protein, 144 aa, Homo sapiens
RRRLREWSESGAYPCELQGHYCAHCIMNAQKLIDLYSRTRMLADIQIEQLNRTKKHAHLTDTEIMTLVDETNMYEGVGRISFFELRRQANSPGRACSAAQPANISQQAKHIKDTENSQKKSYLERSVKEAEDNIREMLMARRAQ

SEQ ID NO: 754712 - protein, 113 aa, Homo sapiens
ISVQLPLRRRLQCTKMAAPVDLELKKAFTELQAKVIDTQQKVKLADIQIEQLNRTKKHAHLTDTEIMTLVDETNMYEGVGRMFILQSKEAIHSQLLEKQKIAEEKIKELEGRC

SEQ ID NO: 754713 - protein, 137 aa, Homo sapiens; identical to SEQ ID NO: 754701

SEQ ID NO: 754714 - protein, 194 aa, Homo sapiens
ISVQLPLRRRLQCTKMAAPVDLELKKAFTELQAKVIDTQQKVKLADIQIEQLNRTKKHAHLTDTEIMTLVDETNMYEGVGRMFILQSKEAIHSQLLEKQKIAEEKIKELEQKKSYLERSVKEAEDNIRPDGCFIWMAWQHHIFCITLSPICFPALEFLPGFACHLCPGHSSLSGCVMNSQEREDGSQGKIGSSA

SEQ ID NO: 754715 - protein, 117 aa, Homo sapiens
ISVQLPLRRRLQCTKMAAPVDLELKKAFTELQAKVIDTQQKVKLADIQIEQLNRTKKHAHLTDTEIMTLVDETNMYEGVGRMFILQSKEAIHSQLLEKQKIAEEKIKELEITFSASP

SEQ ID NO: 754716 - protein, 137 aa, Homo sapiens; identical to SEQ ID NO: 754701

SEQ ID NO: 754717 - protein, 137 aa, Homo sapiens; identical to SEQ ID NO: 754701

SEQ ID NO: 754718 - protein, 116 aa, Homo sapiens
ISVQLPLRRRLQCTKMAAPVDLELKKAFTELQAKVIDTQQKVKLADIQIEQLNRTKKHAHLTDTEIMTLVDETNMYEGVGRMFILQSKEAIHSQLLEKQKIAEEKIKELEVSFYWQ

SEQ ID NO: 754719 - protein, 109 aa, Homo sapiens [sequence omitted]

SEQ ID NO: 754720 - protein, 410 aa, Homo sapiens
SKGPDIIKSSDKFDIIADGKKHILVINDSQFDDEGVYTAEVEGKKTSARLFVTGIRLKFMSPLEDQTVKEGETATFVCELSHEKMHVVWFKNDAKLHTSRTVLISSEGKTHKLEMKEVTLDDISQIKAQVKELSSTAQLKVLEADPYFTVKLHDKTAVEKDEITLKCEVSKDVPVKWFKDGEEIVPSPKYSIKADGLRRILKIKKADLKDKGEYVCDCGTDKTKANVTVEARLIKVEKPLYGVEVFVGETAHFEIELSEPDVHGQWKLKGQPLTASPDCEIIEDGKKHILILHNCQLGMTGEVSFQAANAKSAANLKVKELPLIFITPLSDVKVFEKDEAKFECEVSREPKTFRWLKGTQEITGDDRFELIKDGTKHSMVIKSAAFEDEAKYMFEAEDKHTSGKLIIEGK

SEQ ID NO: 754721 - protein, 117 aa, Homo sapiens
MKQSICHKVRCSCGMSTSLEQNCICFSQKRIPQGDFLLSTIIKIKQASLLAVIFYKCGLCMPFFQEVQYFQEVQKSSGRSNFTVEKPDSQHGLTKIDFTAAENCLKMRSSFSKNNRE

SEQ ID NO: 754722 - protein, 508 aa, Homo sapiens
MGSCCSCPDKDTVPDNHRNKFKVINVDDDGNELGSGIMELTDTELILYTRKRDSVKWHYLCLRRYGYDSNLFSFESGRRCQTGQGIFAFKCARAEELFNMLQEIMQNNSINVVEEPVVERNNHQTELEVPRTPRTPTTPGFAAQNLPNGYPRYPSFGDASSHPSSRHPSVGSARLPSVGEESTHPLLVAEEQVHTYVNTTGVQEERKNRTSVHVPLEARVSNAESSTPKEEPSSIEDRDPQILLEPEGVKFVLGPTPVQKQLMEKEKLEQLGRDQVSGSGANNTEWDTGYDSDERRDAPSVNKLVYENINGLSIPSASGVRRGRLTSTSTSDTQNINNSAQRRTALLNYENLPSLPPVWEARKLSRDEDDNLGPKTPSLNGYHNNLDPMHNYVNTENVTVPASAHKIEYSRRRDCTPTVFNFDIRRPSLEHRQLNYIQVDLEGGSDSDNPQTPKTPTTPLPQTPTRRTELYAVIDIERTAAMSNLQKALPRDDGTSRKTRHNSTDLPM

SEQ ID NO: 754723 - protein, 508 aa, Homo sapiens; identical to SEQ ID NO: 754722

SEQ ID NO: 754724 - protein, 117 aa, Homo sapiens; identical to SEQ ID NO: 754721

SEQ ID NO: 754725 - protein, 184 aa, Homo sapiens [sequence omitted]

SEQ ID NO: 754726 - protein, 225 aa, Homo sapiens
DWRRAPRSGWLPGSMEELSSVGEQVFAAECILSKRLRKGKLEYLVKWRGWSSKHNSWEPEENILDPRLLLAFQKKEHEKEVQNRKRGKRPRGRPRKLTAMSSCSRRSKLKVGGCAGYADPTSQHPLGVGGRQREGLGPSGRGWHFCQQSVPLLGKQEPPFFLSLSFCCQGPQPAESSSPPLPGASCFSLSCTPLCWVAGSNCCRQALFPPRGSLGDGKEQEACVQ

SEQ ID NO: 754727 - protein, 546 aa, Homo sapiens
DWRRAPRSGWLPGSMEELSSVGEQVFAAECILSKRLRKGKLEYLVKWRGWSSKHNSWEPEENILDPRLLLAFQKKEHEKEVQNRKRGKRPRGRPRKLTAMSSCSRRSKLKEPDAPSKSKSSSSSSSSTSSSSSSDEEDDSDLDAKRGPRGRETHPVPQKKAQILVAKPELKDPIRKKRGRKPLPPEQKATRRPVSLAKVLKTARKDLGAPASKLPPPLSAPVAGLAALKAHAKEACGGPSAMATPENLASLMKGMASSPGRGGISWQSSIVHYMNRMTQSQAQAASRLALKAQATNKCGLGLDLKVRTQKGELGMSPPGSKIPKAPSGGAVEQKVGNTGGPPHTHGASRVPAGCPGPQPAPTQELSLQVLDLQSVKNGMPGVGLLARHATATKGVPATNPAPGKGTGSGLIGASGATMPTDTSKSEKLASRAVAPPTPASKRDCVKGSATPSGQESRTAPGEARKAATLPEMSAGEESSSSDSDPDSASPPSTGQNPSVSVQTSQDWKPTRSLIEHVFVTDVTANLITVTVKESPTSVGFFNLRHY

SEQ ID NO: 754728 - protein, 502 aa, Homo sapiens [sequence omitted]

SEQ ID NO: 754729 - protein, 502 aa, Homo sapiens [sequence omitted]

SEQ ID NO: 754730 - protein, 502 aa, Homo sapiens [sequence omitted]

SEQ ID NO: 754731 - protein, 154 aa, Homo sapiens
NGREGVWHPRKGLSAQLLPRPRFCVFPDPALSSLPLEVPRPARHIVLDLGLGACAPPCMLDLPSLPPLAPGQGLGESLSATLRFMGVCFSPRQRLWESSCGLVLIGGLERQFPFGSEVRVLAWWGVASLQNLGLDFEKCHGATVPLPSAQVEER

SEQ ID NO: 754732 - protein, 502 aa, Homo sapiens [sequence omitted]

SEQ ID NO: 754733 - protein, 94 aa, Homo sapiens
IRAPHRAVRGRQAPPFTPRTYLLLVKDWLHSNYGPQTAPETWRTAVLALGCPWARLPALPVLQVLAVGPANNSLRPVWGPAQVDEAFLEEYHFP

SEQ ID NO: 754734 - protein, 502 aa, Homo sapiens [sequence omitted]

SEQ ID NO: 754735 - protein, 280 aa, Homo sapiens
MAPRKGSSRVAKTNSLRRRKLASFLKDFDREVEIRIKQIESDRQNLLKEVDNLYNIEILRLPKALREMNWLDYFALGGNKQALEEAATADLDITEINKLTAEAIQTPLKSAKTRKVIQVDEMIVEEEEEEENERKNLQTARVKRCPPSKKRTQSIQGKGKGKRSSRANTVTPAVGRLEVSMVKPTPGLTPRFDSRVFKTPGLRTPAAGERIYNISGNGSPLADSKEIFLTVPVGGGESLRLLASDLQRHSIAQLDPEALGNIKKLSNRLAQICSSIRTHK

SEQ ID NO: 754736 - protein, 280 aa, Homo sapiens; identical to SEQ ID NO: 754735

SEQ ID NO: 754737 - protein, 224 aa, Homo sapiens
MAPRKGSSRVAKTNSLRRRKLASFLKDFDREVEIRIKQIESDRQNLLKEVDNLYNIEILRLPKALREMNWLDYFALGGNKQALEEAATADLDITEINKLTAEAIQTPLKSAKTRKVIQVDEMIVEEEEEEENERKNLQTARVKRCPPSKKRTQSIQGKGKGKRSSRANTVTPAVGRLEVSMVKPTPGLTPRFDSRLQGLPDPGRLSASRDGYTSGWSLVEKESQ

SEQ ID NO: 754738 - protein, 280 aa, Homo sapiens; identical to SEQ ID NO: 754735

SEQ ID NO: 754739 - protein, 280 aa, Homo sapiens; identical to SEQ ID NO: 754735

SEQ ID NO: 754740 - protein, 281 aa, Homo sapiens
MAPRKGSSRVAKTNSLRRRKLASFLKDFDREVEIRIKQIESDRQNLLKEVDNLYNIEILRLPKALREMNWLDYFALGGNKQALEEAATADLDITEINKLTAEAIQTPLKSAKTRKVIQVDEMIVEEEEEEENERKNLQTARVKRCPPSKKRTQSIQGKGKGKSPGKVQPCNILPSRGPWRCHGSNEFRLTTRFDSRVFKTPGLRTPAAGERIYNISGNGSPLADSKEIFLTVPVGGGESLRLLASDLQRHSIAQLDPEALGNIKKLSNRLAQICSSIRTHK

SEQ ID NO: 754741 - protein, 344 aa, Homo sapiens
MLFIGRSLGLFRTGRGFAQPLSRDRRYVPGDFFGWSPSALLVPTQFLASLPHLRRSPQPPPSAMAPRKGSSRVAKTNSLRRRKLASFLKDFDREVEIRIKQIESDRQNLLKEVDNLYNIEILRLPKALREMNWLDYFALGGNKQALEEAATADLDITEINKLTAEAIQTPLKSAKTRKVIQVDEMIVEEEEEEENERKNLQTARVKRCPPSKKRTQSIQGKGKGKSPGQVQPCNILPSRGPWRCHGSNEFRLTTRFDSRVFKTPGLRTPAAGERIYNISGNGSPLADSKEIFLTVPVGGGESLRLLASDLQRHSIAQLDPEALGNIKKLSNRLAQICSSIRTHK

SEQ ID NO: 754742 - protein, 159 aa, Homo sapiens [sequence omitted]

SEQ ID NO: 754743 - protein, 211 aa, Homo sapiens
MAPRKGSSRVAKTNSLRRRKLASFLKDFDREVEIRIKQIESDRQNLLKEVDNLYNIEILRLPKALREMNWLDYFALGGNKQALEEAATADLDITEINKLTAEAIQTPLKSAKTRKVIQVDEMIVEEEEEEENERKNLQTARVKRCPPSKKRTQSIQGKGKGKRVFKTPGLRTPAAGERIYNISGNGSPLADSKEIFLTVPVGGGEVKYFQG

SEQ ID NO: 754744 - protein, 145 aa, Homo sapiens
MAPRKGSSRVAKTNSLRRRKLASFLKDFDREVEIRIKQIESDRQNLLKEVDNLYNIEILRLPKALREMNWLDYFALGGNKQALEEAATADLDITEINKLTAEAIQTPLKSAKTRKVIQVDEMIVEEEEEEENERKNLQTARVSGH

SEQ ID NO: 754745 - protein, 252 aa, Homo sapiens
MAPRKGSSRVAKTNSLRRRKLASFLKDFDREVEIRIKQIESDRQNLLKEVDNLYNIEILRLPKALREMNWLDYFALGGNKQALEEAATADLDITEINKLTAEAIQTPLKSAKTRKVIQVDEMIVEEEEEEENERKNLQTARVKRCPPSKKRTQSIQGKGKGKSPGKVQPCNILPSRGPWRCHGSNEFRLTTRFDSRVFKTPGLRTPAAGERIYNISGNGSPLADSKEIFLTVPVGGGENRLAQICSSIRTHK

SEQ ID NO: 754746 - protein, 159 aa, Homo sapiens [sequence omitted]

SEQ ID NO: 754747 - protein, 280 aa, Homo sapiens; identical to SEQ ID NO: 754735

SEQ ID NO: 754748 - protein, 192 aa, Homo sapiens
MNCKEGTDSSCGCRGNDEKKMLKCVVVGDGAVGKTCLLMSYANDAFPEEYVPTVFDHYAVTVTVGGKQHLLGLYDTAGQEDYNQLRPLSYPNTDVFLICFSVVNPASYHNVQIDLRDDPKTLARLLYMKEKPLTYEHGVKLAKAIGAQCYLECSALTQKGLKAVFDEAILTIFHPKKKKKRCSEGHSCCSII

SEQ ID NO: 754749 - protein, 119 aa, Homo sapiens
MNCKEGTDSSCGCRGNDEKKMLKCVVVGDGAVGKTCLLMSYANDAFPEEYVPTVFDHYAVGTYSSGTGRWVTDQQEVQAEGHGSAEDKYVVNMMYLDYGYVDLGASGRGSVPPWTIVVD

SEQ ID NO: 754750 - protein, 214 aa, Homo sapiens
MNCKEGTDSSCGCRGNDEKKMLKCVVVGDGAVGKTCLLMSYANDAFPEEYVPTVFDHYAVTVTVGGKQHLLGLYDTAGQEDYNQLRPLSYPNTDVFLICFSVVNPASYHNVQEEWVPELKDCMPHVPYVLIGTQIDLRDDPKTLARLLYMKEKPLTYEHGVKLAKAIGAQCYLECSALTQKGLKAVFDEAILTIFHPKKKKKRCSEGHSCCSII

SEQ ID NO: 754751 - protein, 214 aa, Homo sapiens; identical to SEQ ID NO: 754750

SEQ ID NO: 754752 - protein, 214 aa, Homo sapiens; identical to SEQ ID NO: 754750

SEQ ID NO: 754753 - protein, 178 aa, Homo sapiens
MNCKEGTDSSCGCRGNDEKKMLKCVVVGDGAVGKTCLLMSYANDAFPEEYVPTVFDHYAVTVTVGGKQHLLGLYDTAGQEDYNQLRPLSYPNTDVFLICFSVVNPASYHNVQEEWVPELKDCMPHVPYVLIGTQIDLRDDPKTLARLLYMKEKPLTYEHGVKLAKAVQSDLNFILNVC

SEQ ID NO: 754754 - protein, 214 aa, Homo sapiens; identical to SEQ ID NO: 754750

SEQ ID NO: 754755 - protein, 75 aa, Homo sapiens
RGGPQAVRDVGATTLLELQDTAGIDLRDDPKTLARLLYMKEKPLTYEHGVKLAKAKCLNWKRQAWAPPAPSKGKA

SEQ ID NO: 754756 - protein, 1337 aa, Homo sapiens
MDFTAQPKPATALCGVVSADGKIAYPPGVKEITDKITTDEMIKRLKMVVKTFMDMDQDSEDEKQQYLPLALHLASEFFLRNPNKDVRLLVACCLADIFRIYAPEAPYTSHDKLKDIFLFITRQLKGLEDTKSPQFNRYFYLLENLAWVKSYNICFELEDCNEIFIQLFRTLFSVINNSHNKKVQMHMLDLMSSIIMEGDGVTQELLDSILINLIPAHKNLNKQSFDLAKVLLKRTVQTIEACIANFFNQVLVLGRSSVSDLSEHVFDLIQELFAIDPHLLLSVMPQLEFKLKSNDGEERLAVVRLLAKLFGSKDSDLATQNRPLWQCFLGRFNDIHVPVRLESVKFASHCLMNHPDLAKDLTEYLKVRSHDPEEAIRHDVIVTIITAAKRDLALVNDQLLGFVRERTLDKRWRVRKEAMMGLAQLYKKYCLHGEAGKEAAEKVSWIKDKLLHIYYQNSIDDKLLVEKIFAQYLVPHNLETEERMKCLYYLYASLDPNAVKALNEMWKCQNMLRSHVRELLDLHKQPTSEANCSAMFGKLMTIAKNLPDPGKAQDFVKKFNQVLGDDEKLRSQLELLISPTCSCKQADICVREIARKLANPKQPTNPFLEMVKFLLERIAPVHIDSEAISALVKLMNKSIEGTADDEEEGVSPDTAIRSGLELLKVLSFTHPTSFHSAETYESLLQCLRMEDDKVAEAAIQIFRNTGHKIETDLPQIRSTLIPILHQKAKRGTPHQAKQAVHCIHAIFTNKEVQLAQIFEPLSRSLNADVPEQLITPLVSLGHISMLAPDQFASPMKSVVANFIVKDLLMNDRSTGEKNGKLWSPDEEVSPEVLAKVQAIKLLVRWLLGMKNNQSKSANSTLRLLSAMLVSEGDLTEQKRISKSDMSRLRLAAGSAIMKLAQEPCYHEIITPEQFQLCALVINDECYQVRQIFAQKLHKALVKLLLPLEYMAIFALCAKDPVKERRAHARQCLLKNISIRREYIKQNPMATEKLLSLLPEYVVPYMIHLLAHDPDFTRSQDVDQLRDIKECLWFMLEVLMTKNENNSHAFMKKMAENIKLTRDAQSPDESKTNEKLYTVCDVALCVINSKSALCNADSPKDPVLPMKFFTQPEKDFCNDKSYISEETRVLLLTGKPKPAGVLGAVNKPLSATGRKPYVRSTGTETGSNINVNSELNPSTGNRSREQSSEAAETGVSENEENPVRIISVTPVKNIDPVKNKEINSDQATQGNISSDRGKKRTVTAAGAENIQQKTDEKVDESGPPAPSKPRRGRRPKSESQGNATKNDDLNKPINKGRKRAAVGQESPGGLEAGNAKAPKLQDLAKKAAPAERQIDLQR

SEQ ID NO: 754757 - protein, 937 aa, Homo sapiens
GRVGREHWYKRWRVRKEAMMGLAQLYKKYCLHGEAGKEAAEKVSWIKDKLLHIYYQNSIDDKLLVEKIFAQYLVPHNLETEERMKCLYYLYASLDPNAVKALNEMWKCQNMLRSHVRELLDLHKQPTSEANCSAMFGKLMTIAKNLPDPGKAQDFVKKFNQVLGDDEKLRSQLELLISPTCSCKQADICVREIARKLANPKQPTNPFLEMVKFLLERIAPVHIDSEAISALVKLMNKSIEGTADDEEEGVSPDTAIRSGLELLKVLSFTHPTSFHSAETYESLLQCLRMEDDKVAEAAIQIFRNTGHKIETDLPQIRSTLIPILHQKAKRGTPHQAKQAVHCIHAIFTNKEVQLAQIFEPLSRSLNADVPEQLITPLVSLGHISMLAPDQFASPMKSVVANFIVKDLLMNDRSTGEKNGKLWSPDEEVSPEVLAKVQAIKLLVRWLLGMKNNQSKSANSTLRLLSAMLVSEGDLTEQKRISKSDMSRLRLAAGSAIMKLAQEPCYHEIITPEQFQLCALVINDECYQVRQIFAQKLHKALVKLLLPLEYMAIFALCAKDPVKERRAHARQCLLKNISIRREYIKQNPMATEKLLSLLPEYVVPYMIHLLAHDPDFTRSQDVDQLRDIKECLWFMLEVLMTKNENNSHAFMKKMAENIKLTRDAQSPDESKTNEKLYTVCDVALCVINSKSALCNADSPKDPVLPMKFFTQPEKDFCNDKSYISEETRVLLLTGKPKPAGVLGAVNKPLSATGRKPYVRSTGTETGSNINVNSELNPSTGNRSREQSSEAAETGVSENEENPVRIISVTPVKNIDPVKNKEINSDQATQGNISSDRGKKRTVTAAGAENIQQKTDEKVDESGPPAPSKPRRGRRPKSESQGNATKNDDLNKPINKGRKRAAVGQESPGGLEAGNAKAPKLQDLAKKAAPAERQIDLQR

SEQ ID NO: 754758 - protein, 924 aa, Homo sapiens
ILEVSRLTSESLYKKYCLHGEAGKEAAEKVSWIKDKLLHIYYQNSIDDKLLVEKIFAQYLVPHNLETEERMKCLYYLYASLDPNAVKALNEMWKCQNMLRSHVRELLDLHKQPTSEANCSAMFGKLMTIAKNLPDPGKAQDFVKKFNQVLGDDEKLRSQLELLISPTCSCKQADICVREIARKLANPKQPTNPFLEMVKFLLERIAPVHIDSEAISALVKLMNKSIEGTADDEEEGVSPDTAIRSGLELLKVLSFTHPTSFHSAETYESLLQCLRMEDDKVAEAAIQIFRNTGHKIETDLPQIRSTLIPILHQKAKRGTPHQAKQAVHCIHAIFTNKEVQLAQIFEPLSRSLNADVPEQLITPLVSLGHISMLAPDQFASPMKSVVANFIVKDLLMNDRSTGEKNGKLWSPDEEVSPEVLAKVQAIKLLVRWLLGMKNNQSKSANSTLRLLSAMLVSEGDLTEQKRISKSDMSRLRLAAGSAIMKLAQEPCYHEIITPEQFQLCALVINDECYQVRQIFAQKLHKALVKLLLPLEYMAIFALCAKDPVKERRAHARQCLLKNISIRREYIKQNPMATEKLLSLLPEYVVPYMIHLLAHDPDFTRSQDVDQLRDIKECLWFMLEVLMTKNENNSHAFMKKMAENIKLTRDAQSPDESKTNEKLYTVCDVALCVINSKSALCNADSPKDPVLPMKFFTQPEKDFCNDKSYISEETRVLLLTGKPKPAGVLGAVNKPLSATGRKPYVRSTGTETGSNINVNSELNPSTGNRSREQSSEAAETGVSENEENPVRIISVTPVKNIDPVKNKEINSDQATQGNISSDRGKKRTVTAAGAENIQQKTDEKVDESGPPAPSKPRRGRRPKSESQGNATKNDDLNKPINKGRKRAAVGQESPGGLEAGNAKAPKLQDLAKKAAPAERQIDLQR

SEQ ID NO: 754759 - protein, 925 aa, Homo sapiens
LILCTRITKSVLHGCRQLANPEKHMSGRIAGFSGLSSLLSEYCIDMLPSLHRRLRVVSGPPRPGVSIRDLSLRILTRMLIRSPYCLFQALNEMWKCQNMLRSHVRELLDLHKQPTSEANCSAMFGKLMTIAKNLPDPGKAQDFVKKFNQVLGDDEKLRSQLELLISPTCSCKQADICVREIARKLANPKQPTNPFLEMVKFLLERIAPVHIDSEAISALVKLMNKSIEGTADDEEEGVSPDTAIRSGLELLKVLSFTHPTSFHSAETYESLLQCLRMEDDKVAEAAIQIFRNTGHKIETDLPQIRSTLIPILHQKAKRGTPHQAKQAVHCIHAIFTNKEVQLAQIFEPLSRSLNADVPEQLITPLVSLGHISMLAPDQFASPMKSVVANFIVKDLLMNDRSTGEKNGKLWSPDEEVSPEVLAKVQAIKLLVRWLLGMKNNQSKSANSTLRLLSAMLVSEGDLTEQKRISKSDMSRLRLAAGSAIMKLAQEPCYHEIITPEQFQLCALVINDECYQVRQIFAQKLHKALVKLLLPLEYMAIFALCAKDPVKERRAHARQCLLKNISIRREYIKQNPMATEKLLSLLPEYVVPYMIHLLAHDPDFTRSQDVDQLRDIKECLWFMLEVLMTKNENNSHAFMKKMAENIKLTRDAQSPDESKTNEKLYTVCDVALCVINSKSALCNADSPKDPVLPMKFFTQPEKDFCNDKSYISEETRVLLLTGKPKPAGVLGAVNKPLSATGRKPYVRSTGTETGSNINVNSELNPSTGNRSREQSSEAAETGVSENEENPVRIISVTPVKNIDPVKNKEINSDQATQGNISSDRGKKRTVTAAGAENIQQKTDEKVDESGPPAPSKPRRGRRPKSESQGNATKNDDLNKPINKGRKRAAVGQESPGGLEAGNAKAPKLQDLAKKAAPAERQIDLQR

SEQ ID NO: 754760 - protein, 1337 aa, Homo sapiens; identical to SEQ ID NO: 754756

SEQ ID NO: 754761 - protein, 1337 aa, Homo sapiens; identical to SEQ ID NO: 754756

SEQ ID NO: 754762 - protein, 1337 aa, Homo sapiens; identical to SEQ ID NO: 754756

SEQ ID NO: 754763 - protein, 1337 aa, Homo sapiens; identical to SEQ ID NO: 754756

SEQ ID NO: 754764 - protein, 1247 aa, Homo sapiens
MDFTAQPKPATALCGVVSADGKIAYPPGVKEITDKITTDEMIKRLKMVVKTFMDMDQDSEDEKQQYLPLALHLASEFFLRNPNKDVRLLVACCLADIFRIYAPEAPYTSHDKLKDIFLFITRQLKGLEDTKSPQFNRYFYLLENLAWVKSYNICFELEDCNEIFIQLFRTLFSVINNSHNKKVQMHMLDLMSSIIMEGDGVTQELLDSILINLIPAHKNLNKQSFDLAKVLLKRTVQTIEACIANFFNQVLVLGRSSVSDLSEHVFDLIQELFAIDPHLLLSVMPQLEFKLKSNDGEERLAVVRLLAKLFGSKDSDLATQNRPLWQCFLGRFNDIHVPVRLESVKFASHCLMNHPDLAKDLTEYLKVRSHDPEEAIRHDVIVTIITAAKRDLALVNDQLLGFVRERTLDKRWRVRKEAMMGLAQLYKKYCLHGEAGKEAAEKVSWIKDKLLHIYYQNSIDDKLLVEKIFAQYLVPHNLETEERMKCLYYLYASLDPNAVKALNEMWKCQNMLRSHVRELLDLHKQPTSEANCSAMFGKLMTIAKNLPDPGKAQDFVKKFNQVLGDDEKLRSQLELLISPTCSCKQADICVREIARKLANPKQPTNPFLEMVKFLLERIAPVHIDSEAISALVKLMNKSIEGTADDEEEGVSPDTAIRSGLELLKVLSFTHPTSFHSAETYESLLQCLRMEDDKVAEAAIQIFRNTGHKIETDLPQIRSTLIPILHQKAKRGTPHQAKQAVHCIHAIFTNKEVQLAQIFEPLSRSLNADVPEQLITPLVSLGHISMLAPDQFASPMKSVVANFIVKDLLMNDRSTGEKNGKLWSPDEEVSPEVLAKVQAIKLLVRWLLGMKNNQSKSANSTLRLLSAMLVSEGDLTEQKRISKSDMSRLRLAAGSAIMKLAQEPCYHEIITPEQFQLCALVINDECYQVRQIFAQKLHKALVKLLLPLEYMAIFALCAKDPVKERRAHARQCLLKNISIRREYIKQNPMATEKLLSLLPEYVVPYMIHLLAHDPDFTRSQDVDQLRDIKECLWFMLEVLMTKNENNSHAFMKKMAENIKLTRDAQSPDESKTNEKLYTVCDVALCVINSKSALCNADSPKDPVLPMKFFTQPEKDFCNDKSYISEETRVLLLTGKPKPAGVLGAVNKPLSATGRKPYVRSTGTETGSNINVNSELNPSTGNRSREQSSEAAETGVSENEENPVRIISVTPVKNIDPVKNKFKKGGKKKNFFKKNFFSLWGKIFPKGGA

SEQ ID NO: 754765 - protein, 600 aa, Homo sapiens
MDFTAQPKPATALCGVVSADGKIAYPPGVKEITDKITTDEMIKRLKMVVKTFMDMDQDSEDEKQQYLPLALHLASEFFLRNPNKDVRLLVACCLADIFRIYAPEAPYTSHDKLKDIFLFITRQLKGLEDTKSPQFNRYFYLLENLAWVKSYNICFELEDCNEIFIQLFRTLFSVINNSHNKKVQMHMLDLMSSIIMEGDGVTQELLDSILINLIPAHKNLNKQSFDLAKVLLKRTVQTIEACIANFFNQVLVLGRSSVSDLSEHVFDLIQELFAIDPHLLLSVMPQLEFKLKSNDGEERLAVVRLLAKLFGSKDSDLATQNRPLWQCFLGRFNDIHVPVRLESVKFASHCLMNHPDLAKDLTEYLKVRSHDPEEAIRHDVIVTIITAAKRDLALVNDQLLGFVRERTLDKRWRVRKEAMMGLAQLYKKYCLHGEAGKEAAEKVSWIKDKLLHIYYQNSIDDKLLVEKIFAQYLVPHNLETEERMKCLYYLYASLDPNAVKALNEMWKCQNMLRSHVRELLDLHKQPTSEANCSAMFGKLMTIAKNLPDPGKAQDFVKKFNQVLGDDEKLRSQLELLISPTCSCKQADICVVSKSYFTLFL

SEQ ID NO: 754766 - protein, 373 aa, Homo sapiens
MDFTAQPKPATALCGVVSADGKIAYPPGVKEITDKITTDEMIKRLKMVVKTFMDMDQDSEDEKQQYLPLALHLASEFFLRNPNKDVRLLVACCLADIFRIYAPEAPYTSHDKLKDIFLFITRQLKGLEDTKSPQFNRYFYLLENLAWVKSYNICFELEDCNEIFIQLFRTLFSVINNSHNKKVQMHMLDLMSSIIMEGDGVTQELLDSILINLIPAHKNLNKQSFDLAKVLLKRTVQTIEACIANFFNQVLVLGRSSVSDLSEHVFDLIQELFAIDPHLLLSVMPQLEFKLKSNDGEERLAVVRLLAKLFGSKDSDLATQNRPLWQCFLGRFNDIHVPVRLESVKFASHCLMNHPDLAKDLTGKLAGLLHILA

SEQ ID NO: 754767 - protein, 71 aa, Homo sapiens
LTDRGRERTVNQKLSPRMDFTAQPKPATALCGVVSADGKIAYPPGVKEITDKITTDEMIKRLKGKTNCLFT

SEQ ID NO: 754768 - protein, 1040 aa, Homo sapiens
MDFTAQPKPATALCGVVSADGKIAYPPGVKEITDKITTDEMIKRLKMVVKTFMDMDQDSEDEKQQYLPLALHLASEFFLRNPNKDVRLLVACCLADIFRIYAPEAPYTSHDKLKWRVRKEAMMGLAQLYKKYCLHGEAGKEAAEKVSWIKDKLLHIYYQNSIDDKLLVEKIFAQYLVPHNLETEERMKCLYYLYASLDPNAVKALNEMWKCQNMLRSHVRELLDLHKQPTSEANCSAMFGKLMTIAKNLPDPGKAQDFVKKFNQVLGDDEKLRSQLELLISPTCSCKQADICVREIARKLANPKQPTNPFLEMVKFLLERIAPVHIDSEAISALVKLMNKSIEGTADDEEEGVSPDTAIRSGLELLKVLSFTHPTSFHSAETYESLLQCLRMEDDKVAEAAIQIFRNTGHKIETDLPQIRSTLIPILHQKAKRGTPHQAKQAVHCIHAIFTNKEVQLAQIFEPLSRSLNADVPEQLITPLVSLGHISMLAPDQFASPMKSVVANFIVKDLLMNDRSTGEKNGKLWSPDEEVSPEVLAKVQAIKLLVRWLLGMKNNQSKSANSTLRLLSAMLVSEGDLTEQKRISKSDMSRLRLAAGSAIMKLAQEPCYHEIITPEQFQLCALVINDECYQVRQIFAQKLHKALVKLLLPLEYMAIFALCAKDPVKERRAHARQCLLKNISIRREYIKQNPMATEKLLSLLPEYVVPYMIHLLAHDPDFTRSQDVDQLRDIKECLWFMLEVLMTKNENNSHAFMKKMAENIKLTRDAQSPDESKTNEKLYTVCDVALCVINSKSALCNADSPKDPVLPMKFFTQPEKDFCNDKSYISEETRVLLLTGKPKPAGVLGAVNKPLSATGRKPYVRSTGTETGSNINVNSELNPSTGNRSREQSSEAAETGVSENEENPVRIISVTPVKNIDPVKNKEINSDQATQGNISSDRGKKRTVTAAGAENIQQKTDEKVDESGPPAPSKPRRGRRPKSESQGNATKNDDLNKPINKGRKRAAVGQESPGGLEAGNAKAPKLQDLAKKAAPAERQIDLQR

SEQ ID NO: 754769 - protein, 1337 aa, Homo sapiens; identical to SEQ ID NO: 754756

SEQ ID NO: 754770 - protein, 165 aa, Homo sapiens
PAVHPTGNRSREQSSEAAETGVSENEENPVRIISVTPVKNIDPVKNKEINSDQATQGNISSDRGKKRTVTAAGAENIQQKTDEKVDESGPPAPSKPRRGRRPKSESQGNATKNDDLNKPINKGRKRAAVGQESPGGLEAGNAKAPKLQDLAKKAAPAERQIDLQR

SEQ ID NO: 754771 - protein, 1337 aa, Homo sapiens; identical to SEQ ID NO: 754756

SEQ ID NO: 754772 - protein, 1337 aa, Homo sapiens; identical to SEQ ID NO: 754756

SEQ ID NO: 754773 - protein, 842 aa, Homo sapiens
MDFTAQPKPATALCGVVSADGKIAYPPGVKEITDKITTDEMIKRLKMVVKTFMDMDQDSEDEKQQYLPLALHLASEFFLRNPNKDVRLLVACCLADIFRIYAPEAPYTSHDKLKDIFLFITRQLKGLEDTKSPQFNRYFYLLENLAWVKSYNICFELEDCNEIFIQLFRTLFSVINNSHNKKVQMHMLDLMSSIIMEGDGVTQELLDSILINLIPAHKNLNKQSFDLAKVLLKRTVQTIEACIANFFNQVLVLGRSSVSDLSEHVFDLIQELFAIDPHLLLSVMPQLEFKLKSNDGEERLAVVRLLAKLFGSKDSDLATQNRPLWQCFLGRFNDIHVPVRLESVKFASHCLMNHPDLAKDLTEYLKVRSHDPEEAIRHDVIVTIITAAKRDLALVNDQLLGFVRERTLDKRWRVRKEAMMGLAQLYKKYCLHGEAGKEAAEKVSWIKDKLLHIYYQNSIDDKLLVEKIFAQYLVPHNLETEERMKCLYYLYASLDPNAVKALNEMWKCQNMLRSHVRELLDLHKQPTSEANCSAMFGKLMTIAKNLPDPGKAQDFVKKFNQVLGDDEKLRSQLELLISPTCSCKQADICVREIARKLANPKQPTNPFLEMVKFLLERIAPVHIDSEAISALVKLMNKSIEGTADDEEEGVSPDTAIRSGLELLKVLSFTHPTSFHSAETYESLLQCLRMEDDKVAEAAIQIFRNTGHKIETDLPQIRSTLIPILHQKAKRGTPHQAKQAVHCIHAIFTNKEVQLAQIFEPLSRSLNADVPEQLITPLVSLGHISMLAPDQFASPMKSVVANFIVKDLLMNDRSTGEQEWNHCGLQMKSFPLSTSKVQANKFW

SEQ ID NO: 754774 - protein, 46 aa, Homo sapiens
MVVGSTGAGERQLVRPLAASGVSSCNGLSLAMEYHGKNLDLVPKSQ

SEQ ID NO: 754775 - protein, 242 aa, Homo sapiens
SVRRPAAAPAAVRPPAAGPPAAAPAVVYPAAAGPSAASLCAANPLVPAPAAVRPPVAGPPATAPAVVCPAAAGPSAASLCAANPPAVAPAAVRRPAATLGAASPAAVAPAAVCPAAASPSAASLCAASPTAAAPAAASPAAAAPLAVNPAAAAPAAACVQSVAESPATPLAIAQPVSSPAAPAPCAVPPLAAEPTALAYLPLHHWPTDVDPSTVLTIRIQEVGLMSFNRMELMFPMSPSPFH

SEQ ID NO: 754776 - protein, 656 aa, Homo sapiens
MADNLPTEFDVVIIGTGLPESILAAACSRSGQRVLHIDSRSYYGGNWASFSFSGLLSWLKEYQQNNDIGEESTVVWQDLIHETEEAITLRKKDETIQHTEAFPYASQDMEDNVEEIGALQKNPSLGVSNTFTEVLDSALPEESQLSYFNSDEMPAKHTQKSDTEISLEVTDVEESVEKEKYCGDKTCMHTVSDKDGDKDESKSTVEDKADEPIRNRITYSQIVKEGRRFNIDLVSKLLYSQGLLIDLLIKSDVSRYVEFKNVTRILAFREGKVEQVPCSRADVFNSKELTMVEKRMLMKFLTFCLEYEQHPDEYQAFRQCSFSEYLKTKKLTPNLQHFVLHSIAMTSESSCTTIDGLNATKNFLQCLGRFGNTPFLFPLYGQGEIPQGFCRMCAVFGGIYCLRHKVQCFVVDKESGRCKAIIDHFGQRINAKYFIVEDSYLSEETCSNVQYKQISRAVLITDQSILKTDLDQQTSILIVPPAEPGACAVRVTELCSSTMTCMKDTYLVHLTCSSSKTAREDLESVVKKLFTPYTETEINEEELTKPRLLWALYFNMRDSSGISRSSYNGLPSNVYVCSGPDCGLGNEHAVKQAETLFQEIFPTEEFCPPPPNPEDIIFDGDDKQPEAPGTNNVVMAKLESSEESKNLESPEKHLQN

SEQ ID NO: 754777 - protein, 656 aa, Homo sapiens; identical to SEQ ID NO: 754776

SEQ ID NO: 754778 - protein, 117 aa, Homo sapiens
WGPLNCTLGPAFIQPTSPAYLPPLLPRVARVATRVCFGLAGRASLLCPWTAEVYCPSLSWGISVQYMLYHFWDTLAPQDWATCPHLGSQNTPHSACRPPTRWAVVASVPCSTVSPQD

SEQ ID NO: 754779 - protein, 141 aa, Homo sapiens
SSSIKLSGWGMGRKAITCSAQRHLPFACSTSVRKAQLGTQRLLVSGPRNQLPSQGAGTHFSKLWKIMAKAMMQKCLMNTKASTSLKKGPSFSPQIPPCPCGHHTPTSLYLLEKRNRNEDLMSTSASVTKHSDYQCLGFLHH

SEQ ID NO: 754780 - protein, 100 aa, Homo sapiens
MTTQLRVVHLLPLLLACFVQTSPKQEKMKMDCHKDEKGTIYDYEAIALNKNEYVSFKQYVGKHILFVNVATYCGLTAQYPGMSVQGEDLYLVSSFLRKGM

SEQ ID NO: 754781 - protein, 221 aa, Homo sapiens
MTTQLRVVHLLPLLLACFVQTSPKQEKMKMDCHKDEKGTIYDYEAIALNKNEYVSFKQYVGKHILFVNVATYCGLTAQYPELNALQEELKPYGLVVLGFPCNQFGKQEPGDNKEILPGLKYVRPGGGFVPSFQLFEKGDVNGEKEQKVFSFLKHSCPHPSEILGTFKSISWDPVKVHDIRWNFEKFLVGPDGIPVMRWSHRATVSSVKTDILAYLKQFKTK

SEQ ID NO: 754782 - protein, 151 aa, Homo sapiens
MFLRLLQGFTELNALQEELKPYGLVVLGFPCNQFGKQEPGDNKEILPGLKYVRPGGGFVPSFQLFEKGDVNGEKEQKVFSFLKHSCPHPSEILGTFKSISWDPVKVHDIRWNFEKFLVGPDGIPVMRWSHRATVSSVKTDILAYLKQFKTK

SEQ ID NO: 754783 - protein, 208 aa, Homo sapiens
MSSPPSAARHSLCLQPDSGGPPELGSSPPVLCSNSSSLGSSTPTGAACAPGDYGRQALSPAEAEKRSGGKRKSDSSDSQEGNYKSEVNSKPRKERTAFTKEQIRELEAEFAHHNYLTRLRRYEIAVNLDLTERQVKVWFQNRRMKWKRVKGGQQGAAAREKELVNVKKGTLLPSELSGIGAATLQQTGDSIANEDSHDSDHSSEHAHL

SEQ ID NO: 754784 - protein, 208 aa, Homo sapiens; identical to SEQ ID NO: 754783

SEQ ID NO: 754785 - protein, 111 aa, Homo sapiens
SLKHALLNQYQKRTTKIVACFVGPSFVLGSVQGMSPELSLCLVPAPPLIGVDVFLNSLKQTVVTLASSADVLSTEQSASQAMLQSGWSMLLPTAEKQARALCSPALRSFRQ

SEQ ID NO: 754786 - protein, 111 aa, Homo sapiens; identical to SEQ ID NO: 754785

SEQ ID NO: 754787 - protein, 117 aa, Homo sapiens
MFSSLAKCCLPSCCCFSCGTAGHRRLTMSVPPRAPAPRFCPCCKGSRASFAGRMHPTPRATCTLKQTVVTLASSADVLSTEQSASQAMLQSGWSMLLPTAEKQARALCSPALRSFRQ

SEQ ID NO: 754788 - protein, 190 aa, Homo sapiens
MTASASSFSSSQGVQQPSIYSFSQITRSLFLSNGVAANDKLLLSSNRITAIVNASVGSGQRILRGLQYIKVPVTDARDSRLYDFFDPIADLIHTIDMRQGRTLLHCMAGVSRSASLCLAYLMKYHSMSLLDAHTWTKSRRPIIRPNNGFWEQLINYEFKLFNNNTVRMINSPVGNIPDIYEKDLRTMISM

SEQ ID NO: 754789 - protein, 73 aa, Homo sapiens
PFMIKLLNKLGTERTYLKIIKAIYDKLTANILNEEKLKAFFLRTGTRQECPLLPLLFNVVLEVLARTVRQEKK

SEQ ID NO: 754790 - protein, 759 aa, Homo sapiens
MESRSSPRLECSGAISAHCSLHLPDSSDFQLIFVFLVEMGFHHVGQAGLELLISSDLPTSASQSAGITDMKLSMKNNIINTQQSFVTMPNVIVPDIEKEIRRMENGACSSFSEDDDSASTSEESENENPHARGSFSYKSLRKGGPSQREQYLPGAIALFNVNNSSNKDQEPEEKKKKKKEKKSKSDDKNENKNDPEKKKKKKDKEKKKKEEKSKDKKEEEKKEVVVIDPSGNTYYNWLFCITLPVMYNWTMVIARACFDELQSDYLEYWLILDYVSDIVYLIDMFVRTRTGYLEQGLLVKEELKLINKYKSNLQFKLDVLSLIPTDLLYFKLGWNYPEIRLNRLLRFSRMFEFFQRTETRTNYPNIFRISNLVMYIVIIIHWNACVFYSISKAIGFGNDTWVYPDINDPEFGRLARKYVYSLYWSTLTLTTIGETPPPVRDSEYVFVVVDFLIGVLIFATIVGNIGSMISNMNAARAEFQARIDAIKQYMHFRNVSKDMEKRVIKWFDYLWTNKKTVDEKEVLKYLPDKLRAEIAINVHLDTLKKVRIFADCEAGLLVELVLKLQPQVYSPGDYICKKGDIGREMYIIKEGKLAVVADDGVTQFVVLSDGSYFGEISILNIKGSKAGNRRTANIKSIGYSDLFCLSKDDLMEALTEYPDAKTMLEEKGKQILMKDGLLDLNIANAGSDPKDLEEKVTRMEGSVDLLQTRFARILAEYESMQQKLKQRLTKVEKFLKPLIDTEFSSIEGPGAESGPIDST

SEQ ID NO: 754791 - protein, 690 aa, Homo sapiens
MKLSMKNNIINTQQSFVTMPNVIVPDIEKEIRRMENGACSSFSEDDDSASTSEESENENPHARGSFSYKSLRKGGPSQREQYLPGAIALFNVNNSSNKDQEPEEKKKKKKEKKSKSDDKNENKNDPEKKKKKKDKEKKKKEEKSKDKKEEEKKEVVVIDPSGNTYYNWLFCITLPVMYNWTMVIARACFDELQSDYLEYWLILDYVSDIVYLIDMFVRTRTGYLEQGLLVKEELKLINKYKSNLQFKLDVLSLIPTDLLYFKLGWNYPEIRLNRLLRFSRMFEFFQRTETRTNYPNIFRISNLVMYIVIIIHWNACVFYSISKAIGFGNDTWVYPDINDPEFGRLARKYVYSLYWSTLTLTTIGETPPPVRDSEYVFVVVDFLIGVLIFATIVGNIGSMISNMNAARAEFQARIDAIKQYMHFRNVSKDMEKRVIKWFDYLWTNKKTVDEKEVLKYLPDKLRAEIAINVHLDTLKKVRIFADCEAGLLVELVLKLQPQVYSPGDYICKKGDIGREMYIIKEGKLAVVADDGVTQFVVLSDGSYFGEISILNIKGSKAGNRRTANIKSIGYSDLFCLSKDDLMEALTEYPDAKTMLEEKGKQILMKDGLLDLNIANAGSDPKDLEEKVTRMEGSVDLLQTRFARILAEYESMQQKLKQRLTKVEKFLKPLIDTEFSSIEGPGAESGPIDST

SEQ ID NO: 754792 - protein, 690 aa, Homo sapiens; identical to SEQ ID NO: 754791

SEQ ID NO: 754793 - protein, 408 aa, Homo sapiens
MAPWPHENSSLAPWPDLPTLAPNTANTSGLPGVPWEAALAGALLALAVLATVGGNLLVIVAIAWTPRLQTMTNVFVTSLAAADLVMGLLVVPPAATLALTGHWPLGATGCELWTSVDVLCVTASIETLCALAVDRYLAVTNPLRYGALVTKRCARTAVVLVWVVSAAVSFAPIMSQWWRVGADAEAQRCHSNPRCCAFASNMPYVLLSSSVSFYLPLLVMLFVYARVFVVATRQLRLLRGELGRFPPEESPPAPSRSLAPAPVGTCAPPEGVPACGRRPARLLPLREHRALCTLGLIMGTFTLCWLPFFLANVLRALGGPSLVPGPAFLALNWLGYANSAFNPLIYCRSPDFRSAFRRLLCRCGRRLPPEPCAAARPALFPSGVPAARSSPAQPRLCQRLDGASWGVS

SEQ ID NO: 754794 - protein, 599 aa, Homo sapiens; identical to SEQ ID NO: 751495

SEQ ID NO: 754795 - protein, 614 aa, Homo sapiens
QALGRQLVMLPCSPQIEAQCLSNYLNGALQGGAWLLLEKVHQLPPGLLSALGQRLGELHHLYAPLYQEASRNTSTIDPTQPQLLGSSFFEKHHVSVRLGYGCLLVLRALSSAVPANLHLLLRPVALALPDLRQVAELTLLGAGMRDAFQMATRLSKFFSLERELVSGPLPCRLPLLKQILEDTIRTLNVTKEEPKCQKPRSLAAIEEAAALLRSPLFSILNGLHLHNLRGLLCALFPSASQVLAEPMTYKLMKPLVVEELQQVGLDPSPDILGSLEQLSQALSRASGILLLGPAGSGKTTCWHSLFKIQNRLAAMEDTSTQGCQPVEITHLYPSGLSPQEFLGWLEGSCWHHGIFPKVLRAAGQCNNMGQKRQTEESIGIQHWIICDGASNGAWLDSITCLLSELPQLSLPSGQQIARPPGTFLLMEVADTTGISPTVVGCCALVWCGGEQTWQCILSALMASLPYEYRLQHRTVAELNHMAEVLVPATLRFLTCQGVSSLLQVHGQQAVCAGVAEVTSMARILHSLLDLHLRLKEEKAPGPEDLSYSDPVAQSFRSSKSSFLNRSQVDSDDVPDKCREHLLAVSSFLFALIWGFGAHLPSRYLPGWGMGDAEG

SEQ ID NO: 754796 - protein, 550 aa, Homo sapiens
QALGRQLVMLPCSPQIEAQCLSNYLNGALQGGAWLLLEKVHQLPPGLLSALGQRLGELHHLYAPLYQEASRNTSTIDPTQPQLLGSSFFEKHHVSVRLGYGCLLVLRALSSAVPANLHLLLRPVALALPDLRQVAELTLLGAGMRDAFQMATRLSKFFSLERELVSGPLPCRLPLLKQILEDTIRTLNVTKEEPKCQKPRSLAAIEEAAALLRSPLFSILNGLHLHNLRGLLCALFPSASQVLAEPMTYKLMKPLVVEELQQVGLDPSPDILGSLEQLSQALSRASGILLLGPAGSGKTTCWHSLFKIQNRLAAMEDTSTQGCQPVEITHLYPSGLSPQEFLGWLEGSCWHHGIFPKVLRAAGQCNNMGQKRQTEESIGIQHWIICDGASNGAWLDSITCLLSELPQLSLPSGQQIARPPGTFLLMEVADTTGISPTVVGCCALVWCGGEQTWQCILSALMASLPYEYRLQHRTVAELNHMAEVLVPATLRFLTCQGVSSLLQVHGQQAVCAGVAEVTSMARILHSLLDLHLRLKEEKAPGPGGKMDGLV

SEQ ID NO: 754797 - protein, 842 aa, Homo sapiens
QALGRQLVMLPCSPQIEAQCLSNYLNGALQGGAWLLLEKVHQLPPGLLSALGQRLGELHHLYAPLYQEASRNTSTIDPTQPQLLGSSFFEKHHVSVRLGYGCLLVLRALSSAVPANLHLLLRPVALALPDLRQVAELTLLGAGMRDAFQMATRLSKFFSLERELVSGPLPCRLPLLKQILEDTIRTLNVTKEEPKCQKPRSLAAIEEAAALLRSPLFSILNGLHLHNLRGLLCALFPSASQVLAEPMTYKLMKPLVVEELQQVGLDPSPDILGSLEQLSQALSRASGILLLGPAGSGKTTCWHSLFKIQNRLAAMEDTSTQGCQPVEITHLYPSGLSPQEFLGWLEGSCWHHGIFPKVLRAAGQCNNMGQKRQTEESIGIQHWIICDGASNGAWLDSITCLLSELPQLSLPSGQQIARPPGTFLLMEVADTTGISPTVVGCCALVWCGGEQTWQCILSALMASLPYEYRLQHRTVAELNHMAEVLVPATLRFLTCQGVSSLLQVHGQQAVCAGVAEVTSMARILHSLLDLHLRLKEEKAPGPGGKMEGWFERDGALRVAGVYSWSLGRVFFGGSGPGVKSNTVNLFSFFHLPPFSTGAPLVAMATFTEDLSYSDPVAQSFRSSKSSFLNRSQVDSDDVPDKCREHLLAVSSFLFALIWGFGAHLPSRFWPIFDTFIRDSISRLSNYPEPPPSALVFDLHVSPEDGTLVPFTGQYLSSHIKGTLGTFHPSIQTERLLYVVDLLLSGGQPVLLAGEAATGKSAFVEVLVEPHHPYIYSPIHPAFSSSHLRLLLSRGIQGQTQASPQPGHHQDSKPSLLFLLEDLHLATSGEELRRGKEGATVIS

SEQ ID NO: 754798 - protein, 551 aa, Homo sapiens
QALGRQLVMLPCSPQIEAQCLSNYLNGALQGGAWLLLEKVHQLPPGLLSALGQRLGELHHLYAPLYQEASRNTSTIDPTQPQLLGSSFFEKHHVSVRLGYGCLLVLRALSSAVPANLHLLLRPVALALPDLRQVAELTLLGAGMRDAFQMATRLSKFFSLERELVSGPLPCRLPLLKQILEDTIRTLNVTKEEPKCQKPRSLAAIEEAAALLRSPLFSILNGLHLHNLRGLLCALFPSASQVLAEPMTYKLMKPLVVEELQQVGLDPSPDILGSLEQLSQALSRASGILLLGPAGSGKTTCWHSLFKIQNRLAAMEDTSTQGCQPVEITHLYPSGLSPQEFLGWLEGSCWHHGIFPKVLRAAGQCNNMGQKRQTEESIGIQHWIICDGASNGAWLDSITCLLSELPQLSLPSGQQIARPPGTFLLMEVADTTGISPTVVGCCALVWCGGEQTWQCILSALMASLPYEYRLQHRTVAELNHMAEVLVPATLRFLTCQGVSSLLQVHGQQAVCAGVAEVTSMARILHSLLDLHLRLKEEKAPGPGSGPSLIPS

SEQ ID NO: 754799 - protein, 550 aa, Homo sapiens; identical to SEQ ID NO: 754796

SEQ ID NO: 754800 - protein, 643 aa, Homo sapiens
MGLLPKLGVSQGSDTSTSRAGRCARSVFGNIKVFVLCQGLLQLCQLLYSAYFKSSLTTIEKRFGLSSSSSGLISSLNEISNAILIIFVSYFGSRVHRPRLIGIGGLFLAAGAFILTLPHFLSEPYQYTLASTGNNSRLQAELCQKHWQDLPPSKCHSTTQNPQKETSSMWGLMVVAQLLAGIGTVPIQPFGISYVDDFSEPSNSPLYISILFAISVFGPAFGYLLGSIMLQIFVDYGRVNTAAVNLVPGDPRWIGAWWLGLLISSALLVLTSFPFFFFPRAMPIGAKRAPATADEARKLEEAKSRGSLVDFIKRFPCIFLRLLMNSLFVLVVLAQCTFSSVIAGLSTFLNKFLEKQYGTSAAYANFLIGAVNLPAAALGMLFGGILMKRFVFSLQTIPRIATTIITISMILCVPLFFMGCSTPTVAEVYPPSTSSSIHPQSPACRRDCSCPDSIFHPVCGDNGIEYLSPCHAGCSNINMSSATSKQLIYLNCSCVTGGSASAKTGSCPVPCAHFLLPAIFLISFVSLIACISHNPLYMMVLRVVNQEEKSFAIGVQFLLMRLLAWLPSPALYGLTIDHSCIRWNSLCLGRRGACAYYDNDALRDRYLGLQMGYKALGMLLLCFISWRVKKNKEYNVQKAAGLI

SEQ ID NO: 754801 - protein, 643 aa, Homo sapiens; identical to SEQ ID NO: 754800

SEQ ID NO: 754802 - protein, 643 aa, Homo sapiens; identical to SEQ ID NO: 754800

SEQ ID NO: 754803 - protein, 98 aa, Homo sapiens
LVKEKFRLHESYSAFQSHSWLPSPALYGLTIDHSCIRWNSLCLGRRGACAYYDNDALRDRYLGLQMGYKALGMLLLCFISWRVKKNKEYNVQKAAGLI

SEQ ID NO: 754804 - protein, 189 aa, Homo sapiens
FRHRRPKTRSPGGRKFQLAPGPPPPRSSLRLAASLAPMPPSWSPLMCGRAAEAAASSRTPGREMGQAVTRRLGAGARAAPRRAMDGRTPRPQDAPARRKPKAKAPLPPAETKYTDVSSAADSVESTAFIMEQKENMIDKDVELSVVLPGDIIKSTTVHGRYAGVNEISGPPLLIPPLKVSVIYVLMFVL

SEQ ID NO: 754805 - protein, 1167 aa, Homo sapiens
MDGRTPRPQDAPARRKPKAKAPLPPAETKYTDVSSAADSVESTAFIMEQKENMIDKDVELSVVLPGDIIKSTTVHGSKPMMDLLIFLCAQYHLNPSSYTIDLLSAEQNHIKFKPNTPIGMLEVEKVILKPKMLDKKKPTPIIPEKTVRVVINFKKTQKTIVRVSPHASLQELAPIICSKCEFDPLHTLLLKDYQSQEPLDLTKSLNDLGLRELYAMDVNRESCQISQNLDIMKEKENKGFFSFFQRSKKKRDQTASAPATPLVNKHRPTFTRSNTISKPYISNTLPSDAPKKRRAPLPPMPASQSVPQDLAHIQERPASCIVKSMSVDETDKSPCEAGRVRAGSLQLSSMSAGNSSLRRTKRKAPSPPSKIPPHQSDENSRVTALQPVDGVPPDSASEANSPEELSSPETFHPGLSSQEQCTAPKLMEETSVFECPGTPEAAITSLTSGISSDYSLEEIDEKEELSEVPKVEAENISPKSQDIPFVSTDIINTLKNDPDSALGNGSGEFSQNSMEEKQETKSTDGQEPHSVVYDTSNGKKVVDSIRNLKSLGPNQENVVQNEIIVYPENTEDNMKNGVKKTEINVEGVAKNNNIDMEVERPSNSEAHETDTAISYKENHLAASSVPDQKLNQPSAEKTKDAAIQTTPSCNSFDGKHQDHNLSDSKVEECVQTSNNNISTQHSCLSSQDSVNTSREFRSQGTLIIHSEDPLTVKDPICAHGNDDLLPPVDRIDKNSTASYLKNYPLYRQDYNPKPKPSNEITREYIPKIGMTTYKIVPPKSLEISKDWQSETIEYKDDQDMHALGKKHTHENVKETAIQTEDSAISESPEEPLPNLKPKPNLRTEHQVPSSVSSPDDAMVSPLKPAPKMTRDTGTAPFAPNLEEINNILESKFKSRASNAQAKPSSFFLQMQKRVSGHYVTSAAAKSVHAAPNPAPKELTNKEAERDMLPSPEQTLSPLSKMPHSVPQPLVEKTDDDVIGQAPAEASPPPIAPKPVTIPASQVSTQNLKTLKTFGAPRPYSSSGPSPFALAVVKRSQSFSKERTESPSASALVQPPANTEEGKTHSVNKFVDIPQLGVSDKENNSAHNEQNSQIPTPTDGPSFTVMRQSSLTFQSSDPEQMRQSLLTAIRSGEAAAKLKRVTIPSNTISVNGRSRLSHSMSPDAQDGH

SEQ ID NO: 754806 - protein, 1128 aa, Homo sapiens
MDGRTPRPQDAPARRKPKAKAPLPPAETKYTDVSSAADSVESTAFIMEQKENMIDKDVELSVVLPGDIIKSTTVHGSKPMMDLLIFLCAQYHLNPSSYTIDLLSAEQNHIKFKPNTPIGMLEVEKVILKPKMLDKKKPTPIIPEKTVRVVINFKKTQKTIVRVSPHASLQELAPIICSKCEFDPLHTLLLKDYQSQEPLDLTKSLNDLGLRELYAMDVNRESCQISQNLDIMKEKENKGFFSFFQRSKKKRDQTASAPATPLVNKHRPTFTRSNTISKPYISNTLPSDAPKKRRAPLPPMPASQSVPQDLAHIQERPASCIVKSMSVDETDKSPCEAGRVRAGSLQLSSMSAGNSSLRRTKRKAPSPPSKIPPHQSDENSRVTALQPVDGVPPDSASEANSPEELSSPAGISSDYSLEEIDEKEELSEVPKVEAENISPKSQDIPFVSTDIINTLKNDPDSALGNGSGEFSQNSMEEKQETKSTDGQEPHSVVYDTSNGKKVVDSIRNLKSLGPNQENVVQNEIIVYPENTEDNMKNGVKKTEINVEGVAKNNNIDMEVERPSNSEAHETDTAISYKENHLAASSVPDQKLNQPSAEKTKDAAIQTTPSCNSFDGKHQDHNLSDSKVEECVQTSNNNISTQHSCLSSQDSVNTSREFRSQGTLIIHSEDPLTVKDPICAHGNDDLLPPVDRIDKNSTASYLKNYPLYRQDYNPKPKPSNEITREYIPKIGMTTYKIVPPKSLEISKDWQSETIEYKDDQDMHALGKKHTHENVKETAIQTEDSAISESPEEPLPNLKPKPNLRTEHQVPSSVSSPDDAMVSPLKPAPKMTRDTGTAPFAPNLEEINNILESKFKSRASNAQAKPSSFFLQMQKRVSGHYVTSAAAKSVHAAPNPAPKELTNKEAERDMLPSPEQTLSPLSKMPHSVPQPLVEKTDDDVIGQAPAEASPPPIAPKPVTIPASQVSTQNLKTLKTFGAPRPYSSSGPSPFALAVVKRSQSFSKERTESPSASALVQPPANTEEGKTHSVNKFVDIPQLGVSDKENNSAHNEQNSQIPTPTDGPSFTVMRQSSLTFQSSDPEQMRQSLLTAIRSGEAAAKLKRVTIPSNTISVNGRSRLSHSMSPDAQDGH

SEQ ID NO: 754807 - protein, 900 aa, Homo sapiens
MEQKENMIDKGFFSFFQRSKKKRDQTASAPATPLVNKHRPTFTRSNTISKPYISNTLPSDAPKKRRAPLPPMPASQSVPQDLAHIQERPASCIVKSMSVDETDKSPCEAGRVRAGSLQLSSMSAGNSSLRRTKRKAPSPPSKIPPHQSDENSRVTALQPVDGVPPDSASEANSPEELSSPAGISSDYSLEEIDEKEELSEVPKVEAENISPKSQDIPFVSTDIINTLKNDPDSALGNGSGEFSQNSMEEKQETKSTDGQEPHSVVYDTSNGKKVVDSIRNLKSLGPNQENVVQNEIIVYPENTEDNMKNGVKKTEINVEGVAKNNNIDMEVERPSNSEAHETDTAISYKENHLAASSVPDQKLNQPSAEKTKDAAIQTTPSCNSFDGKHQDHNLSDSKVEECVQTSNNNISTQHSCLSSQDSVNTSREFRSQGTLIIHSEDPLTVKDPICAHGNDDLLPPVDRIDKNSTASYLKNYPLYRQDYNPKPKPSNEITREYIPKIGMTTYKIVPPKSLEISKDWQSETIEYKDDQDMHALGKKHTHENVKETAIQTEDSAISESPEEPLPNLKPKPNLRTEHQVPSSVSSPDDAMVSPLKPAPKMTRDTGTAPFAPNLEEINNILESKFKSRASNAQAKPSSFFLQMQKRVSGHYVTSAAAKSVHAAPNPAPKELTNKEAERDMLPSPEQTLSPLSKMPHSVPQPLVEKTDDDVIGQAPAEASPPPIAPKPVTIPASQVSTQNLKTLKTFGAPRPYSSSGPSPFALAVVKRSQSFSKERTESPSASALVQPPANTEEGKTHSVNKFVDIPQLGVSDKENNSAHNEQNSQIPTPTDGPSFTVMRQSSLTFQSSDPEQMRQSLLTAIRSGEAAAKLKRVTIPSNTISVNGRSRLSHSMSPDAQDGH

SEQ ID NO: 754808 - protein, 812 aa, Homo sapiens
PRFYHVSSMSVDETDKSPCEAGRVRAGSLQLSSMSAGNSSLRRTKRKAPSPPSKIPPHQSDENSRVTALQPVDGVPPDSASEANSPEELSSPAGISSDYSLEEIDEKEELSEVPKVEAENISPKSQDIPFVSTDIINTLKNDPDSALGNGSGEFSQNSMEEKQETKSTDGQEPHSVVYDTSNGKKVVDSIRNLKSLGPNQENVVQNEIIVYPENTEDNMKNGVKKTEINVEGVAKNNNIDMEVERPSNSEAHETDTAISYKENHLAASSVPDQKLNQPSAEKTKDAAIQTTPSCNSFDGKHQDHNLSDSKVEECVQTSNNNISTQHSCLSSQDSVNTSREFRSQGTLIIHSEDPLTVKDPICAHGNDDLLPPVDRIDKNSTASYLKNYPLYRQDYNPKPKPSNEITREYIPKIGMTTYKIVPPKSLEISKDWQSETIEYKDDQDMHALGKKHTHENVKETAIQTEDSAISESPEEPLPNLKPKPNLRTEHQVPSSVSSPDDAMVSPLKPAPKMTRDTGTAPFAPNLEEINNILESKFKSRASNAQAKPSSFFLQMQKRVSGHYVTSAAAKSVHAAPNPAPKELTNKEAERDMLPSPEQTLSPLSKMPHSVPQPLVEKTDDDVIGQAPAEASPPPIAPKPVTIPASQVSTQNLKTLKTFGAPRPYSSSGPSPFALAVVKRSQSFSKERTESPSASALVQPPANTEEGKTHSVNKFVDIPQLGVSDKENNSAHNEQNSQIPTPTDGPSFTVMRQSSLTFQSSDPEQMRQSLLTAIRSGEAAAKLKRVTIPSNTISVNGRSRLSHSMSPDAQDGH

SEQ ID NO: 754809 - protein, 1195 aa, Homo sapiens
MDGRTPRPQDAPARRKPKAKAPLPPAETKYTDVSSAADSVESTAFIMEQKENMIDKDVELSVVLPGDIIKSTTVHGSKPMMDLLIFLCAQYHLNPSSYTIDLLSAEQNHIKFKPNTPIGMLEVEKVILKPKMLDKKKPTPIIPEKTVRVVINFKKTQKTIVRVSPHASLQELAPIICSKCEFDPLHTLLLKDYQSQEPLDLTKSLNDLGLRELYAMDVNRATSVTVFSKSSLQESCQISQNLDIMKEKENKGFFSFFQRSKKKRDQTASAPATPLVNKHRPTFTRSNTISKPYISNTLPSDAPKKRRAPLPPMPASQSVPQDLAHIQERPASCIVKSMSVDETDKSPCEAGRVRAGSLQLSSMSAGNSSLRRTKRKAPSPPSKIPPHQSDENSRVTALQPVDGVPPDSASEANSPEELSSPGNIYGGTLLNLSSLSETFHPGLSSQEQCTAPKLMEETSVFECPGTPEAAITSLTSGISSDYSLEEIDEKEELSEVPKVEAENISPKSQDIPFVSTDIINTLKNDPDSALGNGSGEFSQNSMEEKQETKSTDGQEPHSVVYDTSNGKKVVDSIRNLKSLGPNQENVVQNEIIVYPENTEDNMKNGVKKTEINVEGVAKNNNIDMEVERPSNSEAHETDTAISYKENHLAASSVPDQKLNQPSAEKTKDAAIQTTPSCNSFDGKHQDHNLSDSKVEECVQTSNNNISTQHSCLSSQDSVNTSREFRSQGTLIIHSEDPLTVKDPICAHGNDDLLPPVDRIDKNSTASYLKNYPLYRQDYNPKPKPSNEITREYIPKIGMTTYKIVPPKSLEISKDWQSETIEYKDDQDMHALGKKHTHENVKETAIQTEDSAISESPEEPLPNLKPKPNLRTEHQVPSSVSSPDDAMVSPLKPAPKMTRDTGTAPFAPNLEEINNILESKFKSRASNAQAKPSSFFLQMQKRVSGHYVTSAAAKSVHAAPNPAPKELTNKEAERDMLPSPEQTLSPLSKMPHSVPQPLVEKTDDDVIGQAPAEASPPPIAPKPVTIPASQVSTQNLKTLKTFGAPRPYSSSGPSPFALAVVKRSQSFSKERTESPSASALVQPPANTEEGKTHSVNKFVDIPQLGVSDKENNSAHNEQNSQIPTPTDGPSFTVMRQSSLTFQSSDPEQMRQSLLTAIRSGEAAAKLKRVTIPSNTISVNGRSRLSHSMSPDAQDGH

SEQ ID NO: 754810 - protein, 360 aa, Homo sapiens
MDGRTPRPQDAPARRKPKAKAPLPPAETKYTDVSSAADSVESTAFIMEQKENMIDKDVELSVVLPGDIIKSTTVHGSKPMMDLLIFLCAQYHLNPSSYTIDLLSAEQNHIKFKPNTPIGMLEVEKVILKPKMLDKKKPTPIIPEKTVRVVINFKKTQKTIVRVSPHASLQELAPIICSKCEFDPLHTLLLKDYQSQEPLDLTKSLNDLGLRELYAMDVNRESCQISQNLDIMKEKENKGFFSFFQRSKKKRDQTASAPATPLVNKHRPTFTRSNTISKPYISNTLPSDAPKKRRAPLPPMPASQSVPQDLAHIQERPASCIVKSMSVDETDKVCSFVFYFVFLDEAVYHLFFLLPNIFSR

SEQ ID NO: 754811 - protein, 106 aa, Homo sapiens
MDGRTPRPQDAPARRKPKAKAPLPPAETKYTDVSSAADSVESTAFIMEQKENMIDKDVELSVVLPGDIIKSTTVHGRYAGVNEISGPPLLIPPLKVSVIYVLMFVL

SEQ ID NO: 754812 - protein, 1167 aa, Homo sapiens; identical to SEQ ID NO: 754805

SEQ ID NO: 754813 - protein, 1195 aa, Homo sapiens; identical to SEQ ID NO: 754809

SEQ ID NO: 754814 - protein, 1161 aa, Homo sapiens
FRHRRPKTRSPGGRKFQLAPGPPPPRSSLRLAASLAPMPPSWSPLMCGRAAEAAASSRTPGREMGQAVTRRLGAGARAAPRRAMDGRTPRPQDAPASKPMMDLLIFLCAQYHLNPSSYTIDLLSAEQNHIKFKPNTPIGMLEVEKVILKPKMLDKKKPTPIIPEKTVRVVINFKKTQKTIVRVSPHASLQELAPIICSKCEFDPLHTLLLKDYQSQEPLDLTKSLNDLGLRELYAMDVNRATSVTVFSKSSLQESCQISQNLDIMKEKENKGFFSFFQRSKKKRDQTASAPATPLVNKHRPTFTRSNTISKPYISNTLPSDAPKKRRAPLPPMPASQSVPQDLAHIQERPASCIVKSMSVDETDKSPCEAGRVRAGSLQLSSMSAGNSSLRRTKRKAPSPPSKIPPHQSDENSRVTALQPVDGVPPDSASEANSPEELSSPAGISSDYSLEEIDEKEELSEVPKVEAENISPKSQDIPFVSTDIINTLKNDPDSALGNGSGEFSQNSMEEKQETKSTDGQEPHSVVYDTSNGKKVVDSIRNLKSLGPNQENVVQNEIIVYPENTEDNMKNGVKKTEINVEGVAKNNNIDMEVERPSNSEAHETDTAISYKENHLAASSVPDQKLNQPSAEKTKDAAIQTTPSCNSFDGKHQDHNLSDSKVEECVQTSNNNISTQHSCLSSQDSVNTSREFRSQGTLIIHSEDPLTVKDPICAHGNDDLLPPVDRIDKNSTASYLKNYPLYRQDYNPKPKPSNEITREYIPKIGMTTYKIVPPKSLEISKDWQSETIEYKDDQDMHALGKKHTHENVKETAIQTEDSAISESPEEPLPNLKPKPNLRTEHQVPSSVSSPDDAMVSPLKPAPKMTRDTGTAPFAPNLEEINNILESKFKSRASNAQAKPSSFFLQMQKRVSGHYVTSAAAKSVHAAPNPAPKELTNKEAERDMLPSPEQTLSPLSKMPHSVPQPLVEKTDDDVIGQAPAEASPPPIAPKPVTIPASQVSTQNLKTLKTFGAPRPYSSSGPSPFALAVVKRSQSFSKERTESPSASALVQPPANTEEGKTHSVNKFVDIPQLGVSDKENNSAHNEQNSQIPTPTDGPSFTVMRQSSLTFQSSDPEQMRQSLLTAIRSGEAAAKLKRVTIPSNTISVNGRSRLSHSMSPDAQDGH

SEQ ID NO: 754815 - protein, 1177 aa, Homo sapiens
MDGRTPRPQDAPARRKPKAKAPLPPAETKYTDVSSAADSVESTAFIMEQKENMIDKDVELSVVLPGDIIKSTTVHGSKPMMDLLIFLCAQYHLNPSSYTIDLLSAEQNHIKFKPNTPIGMLEVEKVILKPKMLDKKKPTPIIPEKTVRVVINFKKTQKTIVRVSPHASLQELAPIICSKCEFDPLHTLLLKDYQSQEPLDLTKSLNDLGLRELYAMDVNRATSVTVFSKSSLQESCQISQNLDIMKEKENKGFFSFFQRSKKKRDQTASAPATPLVNKHRPTFTRSNTISKPYISNTLPSDAPKKRRAPLPPMPASQSVPQDLAHIQERPASCIVKSMSVDETDKSPCEAGRVRAGSLQLSSMSAGNSSLRRTKRKAPSPPSKIPPHQSDENSRVTALQPVDGVPPDSASEANSPEELSSPGNIYGGTLLNLSSLSETFHPGLSSQEQCTAPKLMEETSVFECPGTPEAAITSLTSGISSDYSLEEIDEKEELSEVPKVEAENISPKSQDIPFVSTDIINTLKNDPDSALGNGSGEFSQNSMEEKQETKSTDGQEPHSVVYDTSNGKKVVDSIRNLKSLGPNQENVVQNEIIVYPENTEDNMKNGVKKTEINVEGVAKNNNIDMEVERPSNSEAHETDTAISYKENHLAASSVPDQKLNQPSAEKTKDAAIQTTPSCNSFDGKHQDHNLSDSKVEECVQTSNNNISTQHSCLSSQDSVNTSREFRSQGTLIIHSEDPLTVKDPICAHGNDDLLPPVDRIDKNSTASYLKNYPLYRQDYNPKPKPSNEITREYIPKIGMTTYKIVPPKSLEISKDWQSETIEYKDDQDMHALGKKHTHENVKETAIQTEDSAISESPEEPLPNLKPKPNLRTEHQVPSSVSSPDDAMVSPLKPAPKMTRDTGTAPFAPNLEEINNILESKFKSRASNAQAKPSSFFLQMQKRVSGHYVTSAAAKSVHAAPNPAPKELTNKEAERDMLPSPEQTLSPLSKMPHSVPQPLVEKTDDDVIGQAPAEASPPPIAPKPVTIPASQVSTQNLKTLKTFGAPRPYSSSGPSPFALAVVKRSQSFSKERTESPSASALVQPPANTEEGKTHSVNKFVDIPQLGVSDKGPSFTVMRQSSLTFQSSDPEQMRQSLLTAIRSGEAAAKLKRVTIPSNTISVNGRSRLSHSMSPDAQDGH

SEQ ID NO: 754816 - protein, 1169 aa, Homo sapiens
MDGRTPRPQDAPARRKPKAKAPLPPAETKYTDVSSAADSVESTAFIMEQKENMIDKDVELSVVLPGDIIKSTTVHGSKPMMDLLIFLCAQYHLNPSSYTIDLLSAEQNHIKFKPNTPIGMLEVEKVILKPKMLDKKKPTPIIPEKTVRVVINFKKTQKTIVRVSPHASLQELAPIICSKCEFDPLHTLLLKDYQSQEPLDLTKSLNDLGLRELYAMDVNRATSVTVFSKSSLQESCQISQNLDIMKEKENKGFFSFFQRSKKKRDQTASAPATPLVNKHRPTFTRSNTISKPYISNTLPSDAPKKRRAPLPPMPASQSVPQDLAHIQERPASCIVKSMSVDETDKSPCEAGRVRAGSLQLSSMSAGNSSLRRTKRKAPSPPSKIPPHQSDENSRVTALQPVDGVPPDSASEANSPEELSSPGNIYGGTLLNLSSLSETFHPGLSSQEQCTAPKLMEETSVFECPGTPEAAITSLTSGISSDYSLEEIDEKEELSEVPKVEAENISPKSQDIPFVSTDIINTLKNDPDSALGNGSGEFSQNSMEEKQETKSTDGQEPHSVVYDTSNGKKVVDSIRNLKSLGPNQENVVQNEIIVYPENTEDNMKNGVKKTEINVEGVAKNNNIDMEVERPSNSEAHETDTAISYKENHLAASSVPDQKLNQPSAEKTKDAAIQTTPSCNSFDGKHQDHNLSDSKVEECVQTSNNNISTQHSCLSSQDSVNTSREFRSQGTLIIHSEDPLTVKDPICAHGNDDLLPPVDRIDKNSTASYLKNYPLYRQDYNPKPKPSNEITREYIPKIGMTTYKIVPPKSLEISKDWQSETIEYKDDQDMHALGKKHTHENVKETAIQTEDSAISESPEEPLPNLKPKPNLRTEHQVPSSVSSPDDAMVSPLKPAPKMTRDTGTAPFAPNLEEINNILESKFKSRASNAQAKPSSFFLQMQKRVSGHYVTSAAAKSVHAAPNPAPKELTNKEAERDMLPSPEQTLSPLSKMPHSVPQPLVEKTDDDVIGQAPAEASPPPIAPKPVTIPASQVSTQNLKTLKTFGAPRPYSSSGPSPFALAVVKRSQSFSKERTESPSASALVQPPANTEEGKTHSVNKFVDIPQLGVSDKENNSAHNEQNSQIPTPTDGPSFTVMRQSSLTFQSSDPEQMRQSLLTAIRSGEAAAKLKRDG

SEQ ID NO: 754817 - protein, 382 aa, Homo sapiens
MVLGKVKSLTISFDCLNDSNVPVYSSGDTVSGRVNLEVTGEIRVKSLKIHARGHAKVRWTESRNAGSNTAYTQNYTEEVEYFNHKDILIGHERDDDNSEEGFHTIHSGRHEYAFSFELPQTPLATSFEGRHGSVRYWVKAELHRPWLLPVKLKKEFTVFEHIDINTPSLLSPQAGTKEKTLCCWFCTSGPISLSAKIERKGYTPGESIQIFAEIENCSSRMVVPKAAIYQTQAFYAKGKMKEVKQLVANLRGESLSSGKTETWNGKLLKIPPVSPSILDCSIIRVEYSLMVYVDIPGAMDLFLNLPLVIGTIPLHPFGSRTSSVSSQCSMNMNWLSLSLPERPEDMQTVVLEGLSQSHHKHSLVQDCSAFVPLLPLLHSWVV

SEQ ID NO: 754818 - protein, 414 aa, Homo sapiens
MVLGKVKSLTISFDCLNDSNVPVYSSGDTVSGRVNLEVTGEIRVKSLKIHARGHAKVRWTESRNAGSNTAYTQNYTEEVEYFNHKDILIGHERDDDNSEEGFHTIHSGRHEYAFSFELPQTPLATSFEGRHGSVRYWVKAELHRPWLLPVKLKKEFTVFEHIDINTPSLLSPQAGTKEKTLCCWFCTSGPISLSAKIERKGYTPGESIQIFAEIENCSSRMVVPKAAIYQTQAFYAKGKMKEVKQLVANLRGESLSSGKTETWNGKLLKIPPVSPSILDCSIIRVEYSLMVYVDIPGAMDLFLNLPLVIGTIPLHPFGSRTSSVSSQCSMNMNWLSLSLPERPEAPPSYAEVVTEEQRRNNLAPVSACDDFERALQGPLFAYIQEFRFLPPPLYSEIDPNPDQSADDRPSCPSR

SEQ ID NO: 754819 - protein, 414 aa, Homo sapiens; identical to SEQ ID NO: 754818

SEQ ID NO: 754820 - protein, 414 aa, Homo sapiens; identical to SEQ ID NO: 754818

SEQ ID NO: 754821 - protein, 225 aa, Homo sapiens
FTLLKTHPDPPRSDTMVSSCCGSVCSDQGCGQVLCQETCCRPSCCQTTCCRTTCYRPSCCVSSCCRPQCCQSVCCQPTCCRPSCCETTCCHPRCCISSCCRPSCCMSSCCKPQCCQSVCCQPTCCHPSCCISSCCRPSCCVSRCCRPQCCQSVCCQPTCCRPSCCISSCCRPSCCESSCCRPCCCRPCCCLRPVCGRVSCHTTCYRPTCVISTCPRPLCCASSCC

SEQ ID NO: 754822 - protein, 277 aa, Homo sapiens
MNGFASLLRRNQFILLVLFLLQIQSLGLDIDSRPTAEVCATHTISPGPKGDDGEKGDPGEEGKHGKVGRMGPKGIKGELGDMGDRGNIGKTGPIGKKGDKGEKGLLGIPGEKGKAGTVCDCGRYRKFVGQLDISIARLKTSMKFVKNVIAGIRETEEKFYYIVQEEKNYRESLTHCRIRGGMLAMPKDEAANTLIADYVAKSGFFRVFIGVNDLEREGQYMFTDNTPLQNYSNWNEGEPSDPYGHEDCVEMLSSGRWNDTECHLTMYFVCEFIKKKK

SEQ ID NO: 754823 - protein, 277 aa, Homo sapiens; identical to SEQ ID NO: 754822

SEQ ID NO: 754824 - protein, 463 aa, Homo sapiens
MVPALRYLVGACGRARGLFAGGSPGACGFASGRPRPLCGGSRSASTSSFDIVIVGGGIVGLASARALILRHPSLSIGVLEKEKDLAVHQTGHNSGVIHSGIYYKPESLKAKLCVQGAALLYEYCQQKGISYKQCGKLIVAVEQEEIPRLQALYEKGLQNGVPGLRLIQQEDIKKKEPYCRGLMAIDCPHTGIVDYRQVALSFAQDFQEAGGSVLTNFEVKGIEMAKESPSRSIDGMQYPIVIKNTKGEEIRCQYVVTCAGLYSDRISELSGCTPDPRIVPFRGDYLLLKPEKCYLVKGNIYPVPDSRFPFLGVHFTPRMDGSIWLGPNAVLAFKREGYRPFDFSATDVMDIIINSGLIKLASQNFSYGVTEMYKACFLGATVKYLQKFIPEITISDILRGPAGVRAQALDRDGNLVEDFVFDAGVGDIGNRILHVRNAPSPAATSSIAISGMIADEVQQRFEL

SEQ ID NO: 754825 - protein, 463 aa, Homo sapiens; identical to SEQ ID NO: 754824

SEQ ID NO: 754826 - protein, 489 aa, Homo sapiens
MVPALRYLVGACGRARGLFAGGSPGACGFASGRPRPLCGGSRSASTSSFDIVIVGGGIVGLASARALILRHPSLSIGVLEKEKDLAVHQTGHNSGVIHSGIYYKPESLKAKLCVQGAALLYEYCQQKGISYKQCGKLIVAVEQEEIPRLQALYEKGLQNGVPGLRLIQQEDIKKKEPYCRISSCVSITYQKTIIFPLCCSIAFMYQGLMAIDCPHTGIVDYRQVALSFAQDFQEAGGSVLTNFEVKGIEMAKESPSRSIDGMQYPIVIKNTKGEEIRCQYVVTCAGLYSDRISELSGCTPDPRIVPFRGDYLLLKPEKCYLVKGNIYPVPDSRFPFLGVHFTPRMDGSIWLGPNAVLAFKREGYRPFDFSATDVMDIIINSGLIKLASQNFSYGVTEMYKACFLGATVKYLQKFIPEITISDILRGPAGVRAQALDRDGNLVEDFVFDAGVGDIGNRILHVRNAPSPAATSSIAISGMIADEVQQRFEL

SEQ ID NO: 754827 - protein, 435 aa, Homo sapiens
MVPALRYLVGACGRARGLFAGGSPGACGFASGRPRPLCGGSRSASTSSFDIVIVGGGIVGLASARALILRHPSLSIGVLEKEKDLAVHQTGHNSGVIHSGIYYKPESLKAKLCVQGAALLYEYCQQKGISYKQCGKLIVAVEQEEIPRLQALYEKGLQNGVPGLRLIQQEDIKKKEPYCRGLMAIDCPHTGIVDYRQVALSFAQDFQEAGGSVLTNFEVKGIEMAKESPSRSIDGMQYPIVIKNTKGEEIRCQYVVTCAGLYSDRISELSGCTPDPRIVPFRGDYLLLKPEKCYLVKGNIYPVPDSRFPFLGVHFTPRMDGSIWLGPNAVLAFKREGYRPFDFSATDVMDIIINSGLIKLASQNFSYGVTEMYKACFLGATVKYLQKFIPEITISDILRQVAVRGPSWLWQQPMKVSDNNIYCFLWRCFGFAIDW

SEQ ID NO: 754828 - protein, 426 aa, Homo sapiens
MTQKDYITASSFDIVIVGGGIVGLASARALILRHPSLSIGVLEKEKDLAVHQTGHNSGVIHSGIYYKPESLKAKLCVQGAALLYEYCQQKGISYKQCGKLIVAVEQEEIPRLQALYEKGLQNGVPGLRLIQQEDIKKKEPYCRGLMAIDCPHTGIVDYRQVALSFAQDFQEAGGSVLTNFEVKGIEMAKESPSRSIDGMQYPIVIKNTKGEEIRCQYVVTCAGLYSDRISELSGCTPDPRIVPFRGDYLLLKPEKCYLVKGNIYPVPDSRFPFLGVHFTPRMDGSIWLGPNAVLAFKREGYRPFDFSATDVMDIIINSGLIKLASQNFSYGVTEMYKACFLGATVKYLQKFIPEITISDILRGPAGVRAQALDRDGNLVEDFVFDAGVGDIGNRILHVRNAPSPAATSSIAISGMIADEVQQRFEL

SEQ ID NO: 754829 - protein, 181 aa, Homo sapiens
MGLTISSLFSRLFGKKQMRILMVGLDAAGKTTILYKLKLGEIVTTIPTIGFNVETVEYKNICFTVWDVGGQDRIRPLWKHYFQNTQGLIFVVDSNDRERIQEVADELQKMLLVDELRDAVLLLFANKQDLPNAMAISEMTDKLGLQSLRNRTWYVQATCAATQGTGLYEGLDWLSNELSKR

SEQ ID NO: 754830 - protein, 181 aa, Homo sapiens; identical to SEQ ID NO: 754829

SEQ ID NO: 754831 - protein, 77 aa, Homo sapiens
SGRYYYYYSTPAAAPPKRFSNTACTSQRKIQNTTQLSCTEEIFPPTLTPGLHQPNLTLVGFGFDSQLVLCWLQRIDI

SEQ ID NO: 754832 - protein, 189 aa, Homo sapiens
MGLTISSLFSRLFGKKQMRILMVGLDAAGKTTILYKLKLGEIVTTIPTIGSFLFFFVGFNVETVEYKNICFTVWDVGGQDRIRPLWKHYFQNTQGLIFVVDSNDRERIQEVADELQKMLLVDELRDAVLLLFANKQDLPNAMAISEMTDKLGLQSLRNRTWYVQATCAATQGTGLYEGLDWLSNELSKR

SEQ ID NO: 754833 - protein, 104 aa, Homo sapiens
VPCVEICHTGLIFVVDSNDRERIQEVADELQKMLLVDELRDAVLLLFANKQDLPNAMAISEMTDKLGLQSLRNRTWYVQATCAATQGTGLYEGLDWLSNELSKR

SEQ ID NO: 754834 - protein, 181 aa, Homo sapiens; identical to SEQ ID NO: 754829

SEQ ID NO: 754835 - protein, 181 aa, Homo sapiens; identical to SEQ ID NO: 754829

SEQ ID NO: 754836 - protein, 181 aa, Homo sapiens; identical to SEQ ID NO: 754829

SEQ ID NO: 754837 - protein, 181 aa, Homo sapiens; identical to SEQ ID NO: 754829

SEQ ID NO: 754838 - protein, 181 aa, Homo sapiens; identical to SEQ ID NO: 754829

SEQ ID NO: 754839 - protein, 181 aa, Homo sapiens; identical to SEQ ID NO: 754829

SEQ ID NO: 754840 - protein, 181 aa, Homo sapiens; identical to SEQ ID NO: 754829

SEQ ID NO: 754841 - protein, 187 aa, Homo sapiens
RIPYIASGLTISSLFSRLFGKKQMRILMVGLDAAGKTTILYKLKLGEIVTTIPTIGFNVETVEYKNICFTVWDVGGQDRIRPLWKHYFQNTQGLIFVVDSNDRERIQEVADELQKMLLVDELRDAVLLLFANKQDLPNAMAISEMTDKLGLQSLRNRTWYVQATCAATQGTGLYEGLDWLSNELSKR

SEQ ID NO: 754842 - protein, 134 aa, Homo sapiens
MGGFNVETVEYKNICFTVWDVGGQDRIRPLWKHYFQNTQGLIFVVDSNDRERIQEVADELQKMLLVDELRDAVLLLFANKQDLPNAMAISEMTDKLGLQSLRNRTWYVQATCAATQGTGLYEGLDWLSNELSKR

SEQ ID NO: 754843 - protein, 181 aa, Homo sapiens; identical to SEQ ID NO: 754829

SEQ ID NO: 754844 - protein, 181 aa, Homo sapiens; identical to SEQ ID NO: 754829

SEQ ID NO: 754845 - protein, 181 aa, Homo sapiens; identical to SEQ ID NO: 754829

SEQ ID NO: 754846 - protein, 181 aa, Homo sapiens; identical to SEQ ID NO: 754829

SEQ ID NO: 754847 - protein, 181 aa, Homo sapiens; identical to SEQ ID NO: 754829

SEQ ID NO: 754848 - protein, 371 aa, Homo sapiens
ILLHINGYTRERSLISARSVGKASVNEVVSLSTRDSTLDRNPTSVLFVREASGIRVTLLFTGEFTVVEALLEKAYAKINGCYEALSGGATTEGFEDFTGGIAEWYELKKPPPNLFKIIQKALQKGSLLGCSIDITSAADSEAITFQKLVKGHAYSVTGAEEVESNGSLQKLIRIRNPWGEVEWTGRWNDNCPSWNTIDPEERERLTRRHEDGEFWMSFSDFLRHYSRLEICNLTPDTLTSDTYKKWKLTKMDGNWRRGSTAGGCRNYPNTFWMNPQYLIKLEEEDEDEEDGESGCTFLVGLIQKHRRRQRKMGEDMHTIGFGIYEVPEEVPEEVRLAHVPGCSGHQKSERLRLLELRERREARAGAGGHEG

SEQ ID NO: 754849 - protein, 81 aa, Homo sapiens
ECVRVVPATSRGGAPPPVPIGLASMRFQRRFQRRYVWPMSRGAQVTKKARGLDCWSSGSVVKPGQGLVVMKDESWPPLGPC

SEQ ID NO: 754850 - protein, 700 aa, Homo sapiens
MAGIAAKLAKDREAAEGLGSHERAIKYLNQDYEALRNECLEAGTLFQDPSFPAIPSALGFKELGPYSSKTRGIEWKRPTEICADPQFIIGGATRTDICQGALGDCWLLAAIASLTLNEEILARVVPLNQSFQENYAGIFHFQFWQYGEWVEVVVDDRLPTKDGELLFVHSAEGSEFWSALLEKAYAKINGCYEALSGGATTEGFEDFTGGIAEWYELKKPPPNLFKIIQKALQKGSLLGCSIDITSAADSEAITFQKLVKGHAYSVTGAEEVESNGSLQKLIRIRNPWGEVEWTGRWNDNCPSWNTIDPEERERLTRRHEDGEFWMSFSDFLRHYSRLEICNLTPDTLTSDTYKKWKLTKMDGNWRRGSTAGGCRNYPNTFWMNPQYLIKLEEEDEDEEDGESGCTFLVGLIQKHRRRQRKMGEDMHTIGFGIYEVPEELSGQTNIHLSKNFFLTNRARERSDTFINLREVLNRFKLPPGEYILVPSTFEPNKDGDFCIRVFSEKKADYQAVDDEIEANLEEFDISEDDIDDGFRRLFAQLAGEDAEISAFELQTILRRVLAKRQDIKSDGFSIETCKIMVDMLDSDGSGKLGLKEFYILWTKIQKYQKIYREIDVDRSGTMNSYEMRKALEEAGFKMPCQLHQVIVARFADDQLIIDFDNFVRCLVRLETLFKIFKQLDPENTGTIELDLISWLCFSVL

SEQ ID NO: 754851 - protein, 700 aa, Homo sapiens; identical to SEQ ID NO: 754850

SEQ ID NO: 754852 - protein, 627 aa, Homo sapiens [sequence omitted]

SEQ ID NO: 754853 - protein, 700 aa, Homo sapiens; identical to SEQ ID NO: 754850

SEQ ID NO: 754854 - protein, 622 aa, Homo sapiens
MEICADPQFIIGGATRTDICQGALGDCWLLAAIASLTLNEEILARVVPLNQSFQENYAGIFHFQFWQYGEWVEVVVDDRLPTKDGELLFVHSAEGSEFWSALLEKAYAKINGCYEALSGGATTEGFEDFTGGIAEWYELKKPPPNLFKIIQKALQKGSLLGCSIDITSAADSEAITFQKLVKGHAYSVTGAEEVESNGSLQKLIRIRNPWGEVEWTGRWNDNCPSWNTIDPEERERLTRRHEDGEFWMSFSDFLRHYSRLEICNLTPDTLTSDTYKKWKLTKMDGNWRRGSTAGGCRNYPNTFWMNPQYLIKLEEEDEDEEDGESGCTFLVGLIQKHRRRQRKMGEDMHTIGFGIYEVPEELSGQTNIHLSKNFFLTNRARERSDTFINLREVLNRFKLPPGEYILVPSTFEPNKDGDFCIRVFSEKKADYQAVDDEIEANLEEFDISEDDIDDGFRRLFAQLAGEDAEISAFELQTILRRVLAKRQDIKSDGFSIETCKIMVDMLDSDGSGKLGLKEFYILWTKIQKYQKIYREIDVDRSGTMNSYEMRKALEEAGFKMPCQLHQVIVARFADDQLIIDFDNFVRCLVRLETLFKIFKQLDPENTGTIELDLISWLCFSVL

SEQ ID NO: 754855 - protein, 599 aa, Homo sapiens
ALPLDAPGFAGVGPQLLEAQGRVVPLNQSFQENYAGIFHFQFWQYGEWVEVVVDDRLPTKDGELLFVHSAEGSEFWSALLEKAYAKINGCYEALSGGATTEGFEDFTGGIAEWYELKKPPPNLFKIIQKALQKGSLLGCSIDITSAADSEAITFQKLVKGHAYSVTGAEEVESNGSLQKLIRIRNPWGEVEWTGRWNDNCPSWNTIDPEERERLTRRHEDGEFWMSFSDFLRHYSRLEICNLTPDTLTSDTYKKWKLTKMDGNWRRGSTAGGCRNYPNTFWMNPQYLIKLEEEDEDEEDGESGCTFLVGLIQKHRRRQRKMGEDMHTIGFGIYEVPEELSGQTNIHLSKNFFLTNRARERSDTFINLREVLNRFKLPPGEYILVPSTFEPNKDGDFCIRVFSEKKADYQAVDDEIEANLEEFDISEDDIDDGFRRLFAQLAGEDAEISAFELQTILRRVLAKRQDIKSDGFSIETCKIMVDMLDSDGSGKLGLKEFYILWTKIQKYQKIYREIDVDRSGTMNSYEMRKALEEAGFKMPCQLHQVIVARFADDQLIIDFDNFVRCLVRLETLFKIFKQLDPENTGTIELDLISWLCFSVL

SEQ ID NO: 754856 - protein, 741 aa, Homo sapiens
MAGIAAKLAKDREAAEGLGSHERAIKYLNQDYEALRNECLEAGTLFQDPSFPAIPSALGFKELGPYSSKTRGIEWKRPTEICADPQFIIGGATRTDICQGALGDCWLLAAIASLTLNEEILARVVPLNQSFQENYAGIFHFQFWQYGEWVEVVVDDRLPTKDGELLFVHSAEGSEFWSALLEKAYAKINGCYEALSGGATTEGFEDFTGGIAEWYELKKPPPNLFKIIQKALQKGSLLGCSIDITSAADSEAITFQKLVKGHAYSVTGAEEVESNGSLQKLIRIRNPWGEVEWTGRWNDNCPSWNTIDPEERERLTRRHEDGEFWMSFSDFLRHYSRLEICNLTPDTLTSDTYKKWKLTKMDGNWRRGSTAGGCRNYPNTFWMNPQYLIKLEEEDEDEEDGESGCTFLVGLIQKHRRRQRKMGEDMHTIGFGIYEVPEELSGQTNIHLSKNFFLTNRARERSDTFINLREVLNRFKLPPGEYILVPSTFEPNKDGDFCIRVFSEKKADYQAVDDEIEANLEEVFVTLGISPTLSWTIQRAEEQKNSKSFWTSRTKPETKDKAVFDISEDDIDDGFRRLFAQLAGEDAEISAFELQTILRRVLAKRQDIKSDGFSIETCKIMVDMLDSDGSGKLGLKEFYILWTKIQKYQKIYREIDVDRSGTMNSYEMRKALEEAGFKMPCQLHQVIVARFADDQLIIDFDNFVRCLVRLETLFKIFKQLDPENTGTIELDLISWLCFSVL

SEQ ID NO: 754857 - protein, 532 aa, Homo sapiens
SILLFLCNLYPAMVEGYAKINGCYEALSGGATTEGFEDFTGGIAEWYELKKPPPNLFKIIQKALQKGSLLGCSIDITSAADSEAITFQKLVKGHAYSVTGAEEVESNGSLQKLIRIRNPWGEVEWTGRWNDNCPSWNTIDPEERERLTRRHEDGEFWMSFSDFLRHYSRLEICNLTPDTLTSDTYKKWKLTKMDGNWRRGSTAGGCRNYPNTFWMNPQYLIKLEEEDEDEEDGESGCTFLVGLIQKHRRRQRKMGEDMHTIGFGIYEVPEELSGQTNIHLSKNFFLTNRARERSDTFINLREVLNRFKLPPGEYILVPSTFEPNKDGDFCIRVFSEKKADYQAVDDEIEANLEEFDISEDDIDDGFRRLFAQLAGEDAEISAFELQTILRRVLAKRQDIKSDGFSIETCKIMVDMLDSDGSGKLGLKEFYILWTKIQKYQKIYREIDVDRSGTMNSYEMRKALEEAGFKMPCQLHQVIVARFADDQLIIDFDNFVRCLVRLETLFKIFKQLDPENTGTIELDLISWLCFSVL

SEQ ID NO: 754858 - protein, 590 aa, Homo sapiens
ILLHINGYTRERSLISARSVGKASVNEVVSLSTRDSTLDRNPTSVLFVREASGIRVTLLFTGEFTVVEALLEKAYAKINGCYEALSGGATTEGFEDFTGGIAEWYELKKPPPNLFKIIQKALQKGSLLGCSIDITSAADSEAITFQKLVKGHAYSVTGAEEVESNGSLQKLIRIRNPWGEVEWTGRWNDNCPSWNTIDPEERERLTRRHEDGEFWMSFSDFLRHYSRLEICNLTPDTLTSDTYKKWKLTKMDGNWRRGSTAGGCRNYPNTFWMNPQYLIKLEEEDEDEEDGESGCTFLVGLIQKHRRRQRKMGEDMHTIGFGIYEVPEELSGQTNIHLSKNFFLTNRARERSDTFINLREVLNRFKLPPGEYILVPSTFEPNKDGDFCIRVFSEKKADYQAVDDEIEANLEEFDISEDDIDDGFRRLFAQLAGEDAEISAFELQTILRRVLAKRQDIKSDGFSIETCKIMVDMLDSDGSGKLGLKEFYILWTKIQKYQKIYREIDVDRSGTMNSYEMRKALEEAGFKMPCQLHQVIVARFADDQLIIDFDNFVRCLVRLETLFKIFKQLDPENTGTIELDLISWLCFSVL

SEQ ID NO: 754859 - protein, 417 aa, Homo sapiens
RARYPHSIPDVGRWNDNCPSWNTIDPEERERLTRRHEDGEFWMSFSDFLRHYSRLEICNLTPDTLTSDTYKKWKLTKMDGNWRRGSTAGGCRNYPNTFWMNPQYLIKLEEEDEDEEDGESGCTFLVGLIQKHRRRQRKMGEDMHTIGFGIYEVPEELSGQTNIHLSKNFFLTNRARERSDTFINLREVLNRFKLPPGEYILVPSTFEPNKDGDFCIRVFSEKKADYQAVDDEIEANLEEFDISEDDIDDGFRRLFAQLAGEDAEISAFELQTILRRVLAKRQDIKSDGFSIETCKIMVDMLDSDGSGKLGLKEFYILWTKIQKYQKIYREIDVDRSGTMNSYEMRKALEEAGFKMPCQLHQVIVARFADDQLIIDFDNFVRCLVRLETLFKIFKQLDPENTGTIELDLISWLCFSVL

SEQ ID NO: 754860 - protein, 173 aa, Homo sapiens
MAGIAAKLAKDREAAEGLGSHERAIKYLNQDYEALRNECLEAGTLFQDPSFPAIPSALGFKELGPYSSKTRGIEWKRPTEICADPQFIIGGATRTDICQGALGDCWLLAAIASLTLASQSAGIKRHEPPCLASFIFFFSFLFFLGGTESHSVAQDEVQWHDLDSLQPLPPGFK

SEQ ID NO: 754861 - protein, 134 aa, Homo sapiens
MSHHAWPLLSFSFLFFSFWGAQSLTLLPRMKCSGMISTHCNLYLLGSSDSPASASPVAGTTGTHQDARPIFVFLVETGFHHGGQAGLELLTSGDPPPSASQSARITGVATVPGCISVYFSVKLVNHPPHCTTVE

SEQ ID NO: 754862 - protein, 285 aa, Homo sapiens
AEVIYEDPNDGPQLSAGIYEVPEELSGQTNIHLSKNFFLTNRARERSDTFINLREVLNRFKLPPGEYILVPSTFEPNKDGDFCIRVFSEKKADYQAVDDEIEANLEEFDISEDDIDDGFRRLFAQLAGEDAEISAFELQTILRRVLAKRQDIKSDGFSIETCKIMVDMLDSDGSGKLGLKEFYILWTKIQKYQKIYREIDVDRSGTMNSYEMRKALEEAGFKMPCQLHQVIVARFADDQLIIDFDNFVRCLVRLETLFKIFKQLDPENTGTIELDLISWLCFSVL

SEQ ID NO: 754863 - protein, 310 aa, Homo sapiens
YRHYPWPVGVVHDMVSTYLLLWADSACVRWKRARRSSHHRLGIYEVPEELSGQTNIHLSKNFFLTNRARERSDTFINLREVLNRFKLPPGEYILVPSTFEPNKDGDFCIRVFSEKKADYQAVDDEIEANLEEFDISEDDIDDGFRRLFAQLAGEDAEISAFELQTILRRVLAKRQDIKSDGFSIETCKIMVDMLDSDGSGKLGLKEFYILWTKIQKYQKIYREIDVDRSGTMNSYEMRKALEEAGFKMPCQLHQVIVARFADDQLIIDFDNFVRCLVRLETLFKIFKQLDPENTGTIELDLISWLCFSVL

SEQ ID NO: 754864 - protein, 290 aa, Homo sapiens
LKFSSSSAALYIYLLKFSCTETNFSIYSSLSGQTNIHLSKNFFLTNRARERSDTFINLREVLNRFKLPPGEYILVPSTFEPNKDGDFCIRVFSEKKADYQAVDDEIEANLEEFDISEDDIDDGFRRLFAQLAGEDAEISAFELQTILRRVLAKRQDIKSDGFSIETCKIMVDMLDSDGSGKLGLKEFYILWTKIQKYQKIYREIDVDRSGTMNSYEMRKALEEAGFKMPCQLHQVIVARFADDQLIIDFDNFVRCLVRLETLFKIFKQLDPENTGTIELDLISWLCFSVL

SEQ ID NO: 754865 - protein, 700 aa, Homo sapiens; identical to SEQ ID NO: 754850

SEQ ID NO: 754866 - protein, 700 aa, Homo sapiens; identical to SEQ ID NO: 754850

SEQ ID NO: 754867 - protein, 700 aa, Homo sapiens; identical to SEQ ID NO: 754850

SEQ ID NO: 754868 - protein, 700 aa, Homo sapiens; identical to SEQ ID NO: 754850

SEQ ID NO: 754869 - protein, 109 aa, Homo sapiens
MLGQGVAHEVARNGLHFLPQKTAIALMKLKRISADPLKALEEAGFKMPCQLHQVIVARFADDQLIIDFDNFVRCLVRLETLFKIFKQLDPENTGTIELDLISWLCFSVL

SEQ ID NO: 754870 - protein, 627 aa, Homo sapiens [sequence omitted]

SEQ ID NO: 754871 - protein, 712 aa, Homo sapiens
MAGIAAKLAKDREAAEGLGSHERAIKYLNQDYEALRNECLEAGTLFQDPSFPAIPSALGFKELGPYSSKTRGIEWKRPTEICADPQFIIGGATRTDICQGALGDCWLLAAIASLTLNEEILARVVPLNQSFQENYAGIFHFQFWQYGEWVEVVVDDRLPTKDGELLFVHSAEGSEFWSALLEKAYAKINGCYEALSGGATTEGFEDFTGGIAEWYELKKPPPNLFKIIQKALQKGSLLGCSIDITSAADSEAITFQKLVKGHAYSVTGAEEVESNGSLQKLIRIRNPWGEVEWTGRWNDNCPSWNTIDPEERERLTRRHEDGEFWMSFSDFLRHYSRLEICNLTPDTLTSDTYKKWKLTKMDGNWRRGSTAGGCRNYPNTFWMNPQYLIKLEEEDEDEEDGESGCTFLVGLIQKHRRRQRKMGEDMHTIGFGIYEVPEELSGQTNIHLSKNFFLTNRARERSDTFINLREVLNRFKLPPGEYILVPSTFEPNKDGDFCIRVFSEKKADYQAVDDEIEANLEEFDISEDDIDDGFRRLFAQLAGEDAEISAFELQTILRRVLAKRQDIKSDGFSIETCKIMVDMLDSDGSGKLGLKEFYILWTKIQKYQKIYREIDVDRSGTMNSYEMRKALEEAGFKMPCQLHQVIVARFADDQLIIDFDNFVRCLVRLETLFKIFKQLDPENTGTIELDLISLFSNHLFSSPKCTPGSLFS

SEQ ID NO: 754872 - protein, 594 aa, Homo sapiens
MAGIAAKLAKDREAAEGLGSHERAIKYLNQDYEALRNECLEAGTLFQDPSFPAIPSALGFKELGPYSSKTRGIEWKRPTEICADPQFIIGGATRTDICQGALGDCWLLAAIASLTLNEEILARVVPLNQSFQENYAGIFHFQFWQYGEWVEVVVDDRLPTKDGELLFVHSAEGSEFWSALLEKAYAKINGCYEALSGGATTEGFEDFTGGIAEWYELKKPPPNLFKIIQKALQKGSLLGCSIDITSAADSEAITFQKLVKGHAYSVTGAEEVESNGSLQKLIRIRNPWGEVEWTGRWNDNCPSWNTIDPEERERLTRRHEDGEFWMSFSDFLRHYSRLEICNLTPDTLTSDTYKKWKLTKMDGNWRRGSTAGGCRNYPNTFWMNPQYLIKLEEEDEDEEDGESGCTFLVGLIQKHRRRQRKMGEDMHTIGFGIYEVPEELSGQTNIHLSKNFFLTNRARERSDTFINLREVLNRFKLPPGEYILVPSTFEPNKDGDFCIRVFSEKKADYQAVDDEIEANLEEFDISEDDIDDGFRRLFAQLAGEDAEISAFELQTILRRVLAKRQDIKSDGFSIETCKIMVDMLDSARLVAKPG

SEQ ID NO: 754873 - protein, 481 aa, Homo sapiens
MAGIAAKLAKDREAAEGLGSHERAIKYLNQDYEALRNECLEAGTLFQDPSFPAIPSALGFKELGPYSSKTRGIEWKRPTEICADPQFIIGGATRTDICQGALGDCWLLAAIASLTLNEEILARVVPLNQSFQENYAGIFHFQFWQYGEWVEVVVDDRLPTKDGELLFVHSAEGSEFWSALLEKAYAKINGCYEALSGGATTEGFEDFTGGIAEWYELKKPPPNLFKIIQKALQKGSLLGCSIDITSAADSEAITFQKLVKGHAYSVTGAEEVESNGSLQKLIRIRNPWGEVEWTGRWNDNCPSWNTIDPEERERLTRRHEDGEFWMSFSDFLRHYSRLEICNLTPDTLTSDTYKKWKLTKMDGNWRRGSTAGGCRNYPNTFWMNPQYLIKLEEEDEDEEDGESGCTFLVGLIQKHRRRQRKMGEDMHTIGFGIYEVPEEVPEEVRLAHVPGCSGHQKSERLRLLELRERREARAGAGGHEG

SEQ ID NO: 754874 - protein, 449 aa, Homo sapiens
MAGIAAKLAKDREAAEGLGSHERAIKYLNQDYEALRNECLEAGTLFQDPSFPAIPSALGFKELGPYSSKTRGIEWKRPTEICADPQFIIGGATRTDICQGALGDCWLLAAIASLTLNEEILARVVPLNQSFQENYAGIFHFQFWQYGEWVEVVVDDRLPTKDGELLFVHSAEGSEFWSALLEKAYAKINGCYEALSGGATTEGFEDFTGGIAEWYELKKPPPNLFKIIQKALQKGSLLGCSIDITSAADSEAITFQKLVKGHAYSVTGAEEVESNGSLQKLIRIRNPWGEVEWTGRWNDNCPSWNTIDPEERERLTRRHEDGEFWMSFSDFLRHYSRLEICNLTPDTLTSDTYKKWKLTKMDGNWRRGSTAGGCRNYPNTFWMNPQYLIKLEEEDEDEEDGESGCTFLVGLIQKHRRRQLEALNNSTKKEKVTEAHPARFVRKKICKGD

SEQ ID NO: 754875 - protein, 366 aa, Homo sapiens
MAGIAAKLAKDREAAEGLGSHERAIKYLNQDYEALRNECLEAGTLFQDPSFPAIPSALGFKELGPYSSKTRGIEWKRPTEICADPQFIIGGATRTDICQGALGDCWLLAAIASLTLNEEILARVVPLNQSFQENYAGIFHFQFWQYGEWVEVVVDDRLPTKDGELLFVHSAEGSEFWSALLEKAYAKINGCYEALSGGATTEGFEDFTGGIAEWYELKKPPPNLFKIIQKALQKGSLLGCSIDITSAADSEAITFQKLVKGHAYSVTGAEEVESNGSLQKLIRIRNPWGEVEWTGRWNDNCPSWNTIDPEERERLTRRHEDGEFWMSFSDFLRHYSRLEICNLTPDTLTSDTYKKWKLTTSVCPWS

SEQ ID NO: 754876 - protein, 314 aa, Homo sapiens
MAGIAAKLAKDREAAEGLGSHERAIKYLNQDYEALRNECLEAGTLFQDPSFPAIPSALGFKELGPYSSKTRGIEWKRPTEICADPQFIIGGATRTDICQGALGDCWLLAAIASLTLNEEILARVVPLNQSFQENYAGIFHFQFWQYGEWVEVVVDDRLPTKDGELLFVHSAEGSEFWSALLEKAYAKINGCYEALSGGATTEGFEDFTGGIAEWYELKKPPPNLFKIIQKALQKGSLLGCSIDITSAADSEAITFQKLVKGHAYSVTGAEEVTAGADVQGSCCPDTMATGTVCGDAQGPARPHGGPVYTRAPHS

SEQ ID NO: 754877 - protein, 117 aa, Homo sapiens
MAGIAAKLAKDREAAEGLGSHERAIKYLNQDYEALRNECLEAGTLFQDPSFPAIPSALGFKELGPYSSKTRGIEWKRPTEICADPQFIIGGATRTDICQGALGDCWLAGRHLPPLFG

SEQ ID NO: 754878 - protein, 301 aa, Homo sapiens
QRGAQPRARVPEPSRRGAGAVQAEVSERLAMAGPQQQPPYLHLAELTASQFLEIWKHFDADGNGYIEGKELENFFQELEKARKGSGMMSKSDNFGEKMKEFMQKYDKNSDGKIEMAELAQILPTEENFLLCFRQHVGSSAEFMEAWRKYDTDRSGYIEANELKGFLSDLLKKANRPYDEPKLQEYTQTILRMFDLNGDGKLGLSEMSRLLPVQENFLLKFQGMKLTSEEFNAIFTFYDKDRSGYIDEHELDALLKDLYEKNKKEMNIQQLTNYRKSVMSLAEAGKLYRKDLEIVLCSEPPM

SEQ ID NO: 754879 - protein, 222 aa, Homo sapiens
QRGAQPRARVPEPSRRGAGAVQAEVSERLAMAGPQQQPPYLHLAELTASQFLEIWKHFDADGNGYIEGKELENFFQELEKARKGSGMMSKSDNFGEKMKEFMQKYDKNSDGKIEMAELAQILPTEENFLLCFRQHVGSSAEFMEAWRKYDTDRSGYIEANELKGFLSDLLKKANRPYDEPKLQEYTQTILRMFDLNGDGKLGLSEMSRIEAATLTSMSWMPF

SEQ ID NO: 754880 - protein, 209 aa, Homo sapiens
QRGAQPRARVPEPSRRGAGAVQAEVSERLAMAGPQQQPPYLHLAELTASQFLEIWKHFDADGNGYIEGKELENFFQELEKARKGSGMMSKSDNFGEKMKEFMQKYDKNSDGKIEMAELAQILPTEENFLLCFRQHVGSSAEFMEAWRKYDTDRSGYIEANELKGFLSDLLKKANRPYDEPKLQEYTQTILRMFDLNGDGKLGLSEMSRA

SEQ ID NO: 754881 - protein, 277 aa, Homo sapiens
QRGAQPRARVPEPSRRGAGAVQAEVSERLAMAGPQQQPPYLHLAELTASQFLEIWKHFDADGNGYIEGKELENFFQELEKARKGSGMMSKSDNFGEKMKEFMQKYDKNSDGKIEMAELAQILPTEENFLLCFRQHVGSSAEFMEAWRKYDTDRSGYIEANELKGFLSDLLKKANRPYDEPKLQEYTQTILRMFDLNGDGKLGLSEMSRLLPVQENFLLKFQGMKLTSEEFNAIFTFYDKEMNIQQLTNYRKSVMSLAEAGKLYRKDLEIVLCSEPPM

SEQ ID NO: 754882 - protein, 246 aa, Homo sapiens
MGDREQLLQRARLAEQAERYDDMASAMKAVTELNEPLSNEDRNLLSVAYKNVVGARRSSWRVISSIEQKTMADGNEKKLEKVKAYREKIEKELETVCNDVLSLLDKFLIKNCNDFQYESKVFYLKMKGDYYRYLAEVASGEKKNSVVEASEAAYKEAFEISKEQMQPTHPIRLGLALNFSVFYYEIQNAPEQACLLAKQAFDDAIAELDTLNEDSYKDSTLIMQLLRDNLTLWTSDQQDEEAGEGN

SEQ ID NO: 754883 - protein, 246 aa, Homo sapiens; identical to SEQ ID NO: 754882

SEQ ID NO: 754884 - protein, 246 aa, Homo sapiens; identical to SEQ ID NO: 754882

SEQ ID NO: 754885 - protein, 233 aa, Homo sapiens
MIDVPHSTSVTWRTVLVTELNEPLSNEDRNLLSVAYKNVVGARRSSWRVISSIEQKTMADGNEKKLEKVKAYREKIEKELETVCNDVLSLLDKFLIKNCNDFQYESKVFYLKMKGDYYRYLAEVASGEKKNSVVEASEAAYKEAFEISKEQMQPTHPIRLGLALNFSVFYYEIQNAPEQACLLAKQAFDDAIAELDTLNEDSYKDSTLIMQLLRDNLTLWTSDQQDEEAGEGN

SEQ ID NO: 754886 - protein, 241 aa, Homo sapiens
MLKGRLLTKIFRFAFNVYLFGVLQVTELNEPLSNEDRNLLSVAYKNVVGARRSSWRVISSIEQKTMADGNEKKLEKVKAYREKIEKELETVCNDVLSLLDKFLIKNCNDFQYESKVFYLKMKGDYYRYLAEVASGEKKNSVVEASEAAYKEAFEISKEQMQPTHPIRLGLALNFSVFYYEIQNAPEQACLLAKQAFDDAIAELDTLNEDSYKDSTLIMQLLRDNLTLWTSDQQDEEAGEGN

SEQ ID NO: 754887 - protein, 246 aa, Homo sapiens; identical to SEQ ID NO: 754882

SEQ ID NO: 754888 - protein, 246 aa, Homo sapiens; identical to SEQ ID NO: 754882

SEQ ID NO: 754889 - protein, 246 aa, Homo sapiens; identical to SEQ ID NO: 754882

SEQ ID NO: 754890 - protein, 266 aa, Homo sapiens
MGDREQLLQRARLAEQAERYDDMASAMKAVTELNEPLSNEDRNLLSVAYKNVVGARRSSWRVISSIEQKTMADGNEKKLEKVKAYREKIEKELETVCNDGSPLGGFPLFPFGGFLVNQRAFPWIKENLVKNCNDFQYESKVFYLKMKGDYYRYLAEVASGEKKNSVVEASEAAYKEAFEISKEQMQPTHPIRLGLALNFSVFYYEIQNAPEQACLLAKQAFDDAIAELDTLNEDSYKDSTLIMQLLRDNLTLWTSDQQDEEAGEGN

SEQ ID NO: 754891 - protein, 142 aa, Homo sapiens
MVETLKNCNDFQYESKVFYLKMKGDYYRYLAEVASGEKKNSVVEASEAAYKEAFEISKEQMQPTHPIRLGLALNFSVFYYEIQNAPEQACLLAKQAFDDAIAELDTLNEDSYKDSTLIMQLLRDNLTLWTSDQQDEEAGEGN

SEQ ID NO: 754892 - protein, 230 aa, Homo sapiens
MGDREQLLQRARLAEQAERYDDMASAMKAVTELNEPLSNEDRNLLSVAYKNVVGARRSSWRVISSIEQKTMADGNEKKLEKVKAYREKIEKELETVCNDVLSLLDKFLIKNCNDFQYESKVFYLKMKGDYYRYLAEVASGEKKNSVVEASEAAYKEAFEISKFSVFYYEIQNAPEQACLLAKQAFDDAIAELDTLNEDSYKDSTLIMQLLRDNLTLWTSDQQDEEAGEGN

SEQ ID NO: 754893 - protein, 246 aa, Homo sapiens; identical to SEQ ID NO: 754882

SEQ ID NO: 754894 - protein, 736 aa, Homo sapiens
LKLCNPSAHALRSALPGRHGRAAQEVGPAPGRLRDASARGAGTPESQQARRPAEGEPIAPREIRGSGRGPGGSRAEPRPGVWGRSPACLQLPSLGSSSCARDPGGGGGRRSCSWTVAAGGRGPGSPGGAALGRLADRGHAVLTESLGRRGAAAGAPSREGAPERRQQHFICDSPAQREAKRFTMEPVTKWSPKQVVDWTRGLDDCLQQYVHKFEREKINGEQLLQISHQDLEELGVTRIGHQELVLEAVDLLCALNYGLETDNMKNLVLKLRASSHNLQNYISSRRKSPAYDGNTSRKAPNEFLTSVVELIGAAKALLAWLDRAPFTGITDFSVTKNKIIQLCLDLTTTVQKDCFVAEMEDKVLTVVKVLNGICDKTIRSTTDPVMSQCACLEEVHLPNIKPGEGLGMYIKSTYDGLHVITGTTENSPADRSQKIHAGDEVIQVNQQTVVGWQLKNLVKKLRENPTGVVLLLKKRPTGSFNFTPAPLKNLRWKPPLVQTSPPPATTQSPESTMDTSLKKEKSAILDLYIPPPPAVPYSPRDENGSFVYGGSSKCKQPLPGPKGSESPNSFLDQESRRRRFTIADSDQLPGYSVETNILPTKMREKTPGKPRPLSMPADGNWMGIVDPFARPRGHGRKGEDALCRYFSNERIPPIIEESSSPPYRFSRPTTERHLVRGADYIRGSRCYINSDLHSSATIPFQEEGTKKKSGSSATKSSSTEPSLLVSWFTRLKLLTH

SEQ ID NO: 754895 - protein, 713 aa, Homo sapiens
LKLCNPSAHALRSALPGRHGRAAQEVGPAPGRLRDASARGAGTPESQQARRPAEGEPIAPREIRGSGRGPGGSRAEPRPGVWGRSPACLQLPSLGSSSCARDPGGGGGRRSCSWTVAAGGRGPGSPGGAALGRLADRGHAVLTESLGRRGAAAGAPSREGAPERRQQHFICDSPAQREAKRFTMEPVTKWSPKQVVDWTRGLDDCLQQYVHKFEREKINGEQLLQISHQDLEELGVTRIGHQELVLEAVDLLCALNYGLETDNMKNLVLKLRASSHNLQNYISSRRKSPAYDGNTSRKAPNEFLTSVVELIGAAKALLAWLDRAPFTGITDFSVTKNKIIQLCLDLTTTVQKDCFVAEMEDKVLTVVKVLNGICDKTIRSTTDPVMSQCACLEEVHLPNIKPGEGLGMYIKSTYDGLHVITGTTENVGWQLKNLVKKLRENPTGVVLLLKKRPTGSFNFTPAPLKNLRWKPPLVQTSPPPATTQSPESTMDTSLKKEKSAILDLYIPPPPAVPYSPRDENGSFVYGGSSKCKQPLPGPKGSESPNSFLDQESRRRRFTIADSDQLPGYSVETNILPTKMREKTPGKPRPLSMPADGNWMGIVDPFARPRGHGRKGEDALCRYFSNERIPPIIEESSSPPYRFSRPTTERHLVRGADYIRGSRCYINSDLHSSATIPFQEEGTKKKSGSSATKSSSTEPSLLVSWFTRLKLLTH

SEQ ID NO: 754896 - protein, 724 aa, Homo sapiens
LKLCNPSAHALRSALPGRHGRAAQEVGPAPGRLRDASARGAGTPESQQARRPAEGEPIAPREIRGSGRGPGGSRAEPRPGVWGRSPACLQLPSLGSSSCARDPGGGGGRRSCSWTVAAGGRGPGSPGGAALGRLADRGHAVLTESLGRRGAAAGAPSREGAPERRQQHFICDSPAQREAKRFTMEPVTKWSPKQVVDWTRGLDDCLQQYVHKFEREKINGEQLLQISHQDLEELGVTRIGHQELVLEAVDLLCALNYGLETDNMKNLVLKLRASSHNLQNYISSRRKSPAYDGNTSRKAPNEFLTSVVELIGAAKALLAWLDRAPFTGITDFSVTKNKIIQLCLDLTTTVQKDCFVAEMEDKVLTVVKVLNGICDKTIRSTTDPVMSQCACLEEVHLPNIKPGEGLGMYIKSTYDGLHVITGTTENSPADRSQKIHAGDEVIQVNQQTVVGWQLKNLVKKLRENPTGVVLLLKKRPTGSFNFTPAPLKNLRWKPPLVQTSPPPATTQSPESTMDTSLKKEKSAILDLYIPPPPAVPYSPRDENGSFVYGGSSKCKQPLPGPKGSESPNSFLDQESRRRRFTIADSDQLPGYSVETNILPTKMREKTPMWMGIVDPFARPRGHGRKGEDALCRYFSNERIPPIIEESSSPPYRFSRPTTERHLVRGADYIRGSRCYINSDLHSSATIPFQEEGTKKKSGSSATKSSSTEPSLLVSWFTRLKLLTH

SEQ ID NO: 754897 - protein, 378 aa, Homo sapiens
MEDKVLTVVKVLNGICDKTIRSTTDPVMSQCACLEEVHLPNIKPGEGLGMYIKSTYDGLHVITGTTENSPADRSQKIHAGDEVIQVNQQTVVGWQLKNLVKKLRENPTGVVLLLKKRPTGSFNFTPAPLKNLRWKPPLVQTSPPPATTQSPESTMDTSLKKEKSAILDLYIPPPPAVPYSPRDENGSFVYGGSSKCKQPLPGPKGSESPNSFLDQESRRRRFTIADSDQLPGYSVETNILPTKMREKTPGKPRPLSMPADGNWMGIVDPFARPRGHGRKGEDALCRYFSNERIPPIIEESSSPPYRFSRPTTERHLVRGADYIRGSRCYINSDLHSSATIPFQEEGTKKKSGSSATKSSSTEPSLLVSWFTRLKLLTH

SEQ ID NO: 754898 - protein, 736 aa, Homo sapiens; identical to SEQ ID NO: 754894

SEQ ID NO: 754899 - protein, 517 aa, Homo sapiens
LKLCNPSAHALRSALPGRHGRAAQEVGPAPGRLRDASARGAGTPESQQARRPAEGEPIAPREIRGSGRGPGGSRAEPRPGVWGRSPACLQLPSLGSSSCARDPGGGGGRRSCSWTVAAGGRGPGSPGGAALGRLADRGHAVLTESLGRRGAAAGAPSREGAPERRQQHFICDSPAQREAKRFTMEPVTKWSPKQVVDWTRGLDDCLQQYVHKFEREKINGEQLLQISHQDLEELGVTRIGHQELVLEAVDLLCALNYGLETDNMKNLVLKLRASSHNLQNYISSRRKSPAYDGNTSRKAPNEFLTSVVELIGAAKALLAWLDRAPFTGITDFSVTKNKIIQLCLDLTTTVQKDCFVAEMEDKVLTVVKVLNGICDKTIRSTTDPVMSQCACLEEVHLPNIKPGEGLGMYIKSTYDGLHVITGTTENSPADRSQKIHAGDEVIQVNQQTVVGWQLKNLVKKLRENPTGVVLLLKKRPTGSFNFTPAPLKNLRWKPPLVQTFTSTRTTHSPEIECEDTR

SEQ ID NO: 754900 - protein, 736 aa, Homo sapiens; identical to SEQ ID NO: 754894

SEQ ID NO: 754901 - protein, 269 aa, Homo sapiens
LKLCNPSAHALRSALPGRHGRAAQEVGPAPGRLRDASARGAGTPESQQARRPAEGEPIAPREIRGSGRGPGGSRAEPRPGVWGRSPACLQLPSLGSSSCARDPGGGGGRRSCSWTVAAGGRGPGSPGGAALGRLADRGHAVLTESLGRRGAAAGAPSREGAPERRQQHFICDSPAQREAKRFTMEPVTKWSPKQVVDWTRGLDDCLQQYVHKFEREKINGEQLLQISHQDLEELGVTRIGHQELVLEAVDLLCALVSSGKDGLYRDDVL

SEQ ID NO: 754902 - protein, 30 aa, Homo sapiens
MSTADKTALTVVISPTLQIGLLRFLVIELH

SEQ ID NO: 754903 - protein, 59 aa, Homo sapiens
GFTLVLTPRHLLMGEGNGATLVQEVSVDGWQGVSPSRKSRAPGGSRQGHEGSWNLYQGP

SEQ ID NO: 754904 - protein, 101 aa, Homo sapiens
GYSPQLRQKSLKLSISFNSNFPHWTAEVTSWLHPNNFQFFRFFCLFHFFSPISLDLPFKSCLCFKIFPYRSSLLASSPFLLSLGSHRHKMDTKTLFIQVFY

SEQ ID NO: 754905 - protein, 77 aa, Homo sapiens
KNAVIKADGKKRMLILKKALKSDIGQYTCDCGTDKTSGKLDIEDREIKLVRPLHSVEVMETETARFETEISEDDIHA

SEQ ID NO: 754906 - protein, 110 aa, Homo sapiens
MGYDRGSAQLQLDFLTKTLGRGFRLLHLDVGDREPVRERHQRGDARKGPLVPFPNQKSEAAEPPKTPPSSCDSTNAAIAKQALKKPIKGKQAPRKKAQGKTQQNHKLTDF

SEQ ID NO: 754907 - protein, 109 aa, Homo sapiens
VTHHEVKCQGKPLAGIYRKREEKRNTGNAVQSAMKSKKQKIKDARKGPLVPFPNQKSEAAEPPKTPPSSCDSTNAAIAKQALKKPIKGKQAPRKKAQGKTQQNHKLTDF

SEQ ID NO: 754908 - protein, 79 aa, Homo sapiens
MLKKRHSPSAHASWAIVPTAIILQDAVGYSLGGHLEFTVFVWVWWLMLVILELWEAEAGRLLEVREFKTNLANVAKPRL

SEQ ID NO: 754909 - protein, 122 aa, Homo sapiens
YKIPHTTLSIPVPNNIMWSPLSDSSSSSSTLSAFGPASYFSGGMEQIRREFLHAPQQHGCPPLCVCTHTAAFLPVLWMTCLSWLQPPLSLCARSHSFSFTQGHHSAIIPSPSFNLRCFLSIG

SEQ ID NO: 754910 - protein, 111 aa, Homo sapiens
LTASCYTFQEVNQWQTATYFLMDSKPRALLRPLIPAPWSFLPVKAKRGRREEPPLTMLRKAFILLRVDEPICILGPCPASGKVSWSQQRMNQSHTGEGWSRTPIFEHFPDT

SEQ ID NO: 754911 - protein, 98 aa, Homo sapiens
KKLLFDSSSCFTIGQPDTRMSTKKSPEELKRIFEKYAAKEGDPDQLSKDELKLLIQAEFPSLLKGPNTLDDLFQELDKNGDGEVSFEEFQVLVKKISQ

SEQ ID NO: 754912 - protein, 108 aa, Homo sapiens
MLAPKALWAIKSVMWQRPLDSQSSFLPGELQGLLCRHLPVIVSVIHTSTQTFSWCFPLPWAPVSITEDGDSWETPAWMSVEAMGPLPPQVSGLRSCSFHRNECPFPCL

SEQ ID NO: 754913 - protein, 148 aa, Homo sapiens
EQTLQNLEQSYVETIDWDLAKSQACSATRSIMCALNAGEAFARDQTLSSTRGHTPGRSHTCVLSVGVGLSRRPPSPYTRGSTRGRSRMCAGNVGDTSGIHPLFTKSQEGFHSGGGGPFVIVQGVVGRGFSPGRIRPSFLHQRTHLEEK

SEQ ID NO: 754914 - protein, 134 aa, Homo sapiens
RLECSGAISAHHSLHLVGSSDSPASASWVAEITGTYHHAQLIFVFLVELGFHHVGQAGLELQTLGDLPTSASQSARITGVCHCARPEEKLSKRQEHFLELIEQEPSVCKGTPLRETSLKNVKIATLTEILELLR

SEQ ID NO: 754915 - protein, 125 aa, Homo sapiens
GTPAPPSPAPSARLPPTQAEKRFPYTEKARPMEISVKSTIYDPACNPSPQLGAVEGGDALCPSQLHPSSPSLTVPVLDLKRIDPWGTPHLPNPDFGAGGSCKTNQNTDDKEDIAVYTPGRGGAEF

SEQ ID NO: 754916 - protein, 95 aa, Homo sapiens
AAAYYYYCSNSSFYRCTGTCYLLLPYVGWGGNLSGLHISPSLTVPVLDLKRIDPWGTPHLPNPDFGAGGSCKTNQNTDDKEDIAVYTPGRGGAEF

SEQ ID NO: 754917 - protein, 84 aa, Homo sapiens
GTPAPPSPAPSARLPPTQAEKRFPYTEKARPMEISVKSTIYDPACNPSPQLGAVEGGDALCPSQLHPSSLLQGCEHPLPVLVSA

SEQ ID NO: 754918 - protein, 116 aa, Homo sapiens
  misc_feature (2)..(2): Xaa can be any naturally occurring amino acid
MXPPIRVIWLQADRLNGYLNPNFQSITFFLSTSALSGPPRPPQPLVHKALPKTPLSLHRTEWLQALLPYLSTATCLGPPARLLAPFALAPHPRLPPQDGAIFLAPLSPHRSQPSTC

SEQ ID NO: 754919 - protein, 341 aa, Homo sapiens
VPARKPGSGARAARASAAAVAAAATLTPPTMDSFDLALLQEWDLESLCVYEPDRNALRRKERERRNQETQQDDGTFNSSYSLFSEPYKTNKGDELSNRIQNTLGNYDEMKDFLTDRSNQSHLVGVPKPGVPQTPVNKIDEHFVADSRAQNQPSSICSTTTSTPAAVPVQQSKRGTMGWQKAGHPPSDGQQRATQQGSLRTLLGDGVGRQQPRAKQVCNVEVGLQTQERPPAMAAKHSSSGHCVQNFPPSLASKPSLVQQKPTAYVRPMDGQDQAPDESPKLKSSSETSQAGACQSQGQALQVQHPQAGGGESLSAPFTCNCIVTSDNLTLVNSVSMFLFFQ

SEQ ID NO: 754920 - protein, 311 aa, Homo sapiens
MDSFDLALLQEWDLESLCVYEPDRNALRRKERERRNQETQQDDGTFNSSYSLFSEPYKTNKGDELSNRIQNTLGNYDEMKDFLTDRSNQSHLVGVPKPGVPQTPVNKIDEHFVADSRAQNQPSSICSTTTSTPAAVPVQQSKRGTMGWQKAGHPPSDGQQRATQQGSLRTLLGDGVGRQQPRAKQVCNVEVGLQTQERPPAMAAKHSSSGHCVQNFPPSLASKPSLVQQKPTAYVRPMDGQDQAPDESPKLKSSSETSQAGACQSQGQALQVQHPQAGGGESLSAPFTCNCIVTSDNLTLVNSVSMFLFFQ

SEQ ID NO: 754921 - protein, 336 aa, Homo sapiens
MDSFDLALLQEWDLESLWGEDILNQRNDSLVVEFQSSASRCRSVYEPDRNALRRKERERRNQETQQDDGTFNSSYSLFSEPYKTNKGDELSNRIQNTLGNYDEMKDFLTDRSNQSHLVGVPKPGVPQTPVNKIDEHFVADSRAQNQPSSICSTTTSTPAAVPVQQSKRGTMGWQKAGHPPSDGQQRATQQGSLRTLLGDGVGRQQPRAKQVCNVEVGLQTQERPPAMAAKHSSSGHCVQNFPPSLASKPSLVQQKPTAYVRPMDGQDQAPDESPKLKSSSETSQAGACQSQGQALQVQHPQAGGGESLSAPFTCNCIVTSDNLTLVNSVSMFLFFQ

SEQ ID NO: 754922 - protein, 905 aa, Homo sapiens [sequence omitted]

SEQ ID NO: 754923 - protein, 746 aa, Homo sapiens
MPCLGLLANLCRHNLSVQTHIKTLSNVKSFYRTLITLLAHSSLTVVVFALSILSSLTLNEEVGEKLFHARNIHQTFQLIFNILINGDGTLTRKYSVDLLMDLLKNPKIADYLTRYEHFSSCLHQVLGLLNGKDPDSSSKVLELLLAFCSVTQLRHMLTQMMFEQSPPGSATLGSHTKCLEPTVALLRWLSQPLDGSENCSVLALELFKEIFEDVIDAANCSSADRFVTLLLPTILDQLQFTEQNLDEALTRKKCERIAKAIEVLLTLCGDDTLKMHIAKILTTVKCTTLIEQQFTYGKIDLGFGTKVADSELCKLAADVILKTLDLINKLKPLVPGMEVSFYKILQDPRLITPLAFALTSDNREQVQSGLRILLEAAPLPDFPALVLGESIAANNAYRQQETEHIPRKMPWQSSNHSFPTSIKCLTPHLKDGVPGLNIEELIEKLQSGMVVKDQICDVRISDIMDVYEMKLSTLASKESRLQDLLETKALALAQADRLIAQHRCQRTQAETEARTLASMLREVERKNEELSVLLKAQQVESERAQSDIEHLFQHNRKLESVAEEHEILTKSYMELLQRNESTEKKNKDLQITCDSLNKQIETVKKLNESLKEQNEKSIAQLIEKEEQRKEVQNQLVDREHKLANLHQKTKVQEEKIKTLQKEREDKEETIDILRKELSRTEQIRKELSIKASSLEVQKAQLEGRLEEKESLVKLQQEELNKHSHMIAMIHSLSGGKINPETVNLSI

SEQ ID NO: 754924 - protein, 905 aa, Homo sapiens [sequence omitted]

SEQ ID NO: 754925 - protein, 448 aa, Homo sapiens
MSIWDSYKVADSELCKLAADVILKTLDLINKLKPLVPGMEVSFYKILQDPRLITPLAFALTSDNREQVQSGLRILLEAAPLPDFPALVLGESIAANNAYRQQETEHIPRKMPWQSSNHSFPTSIKCLTPHLKDGVPGLNIEELIEKLQSGMVVKDQICDVRISDIMDVYEMKLSTLASKESRLQDLLETKALALAQADRLIAQHRCQRTQAETEARTLASMLREVERKNEELSVLLKAQQVESERAQSDIEHLFQHNRKLESVAEEHEILTKSYMELLQRNESTEKKNKDLQITCDSLNKQIETVKKLNESLKEQNEKSIAQLIEKEEQRKEVQNQLVDREHKLANLHQKTKVQEEKIKTLQKEREDKEETIDILRKELSRTEQIRKELSIKASSLEVQKAQLEGRLEEKESLVKLQQEELNKHSHMIAMIHSLSGGKINPETVNLSI

SEQ ID NO: 754926 - protein, 746 aa, Homo sapiens; identical to SEQ ID NO: 754923

SEQ ID NO: 754927 - protein, 787 aa, Homo sapiens
MDSTACLKSLLLTVSQYKAVKSEANATQLLRHLEVISGQKLTRLFTSNQILTSECLSCLVELLEDPNISASLILSIIGLLSQLAVDIETRDCLQNTYNLNSVLAGVVCRSSHTDSVFLQCIQLLQKLTYNVKIFYSGANIDELITFLIDHIQSSEDELKMPCLGLLANLCRHNLSVQTHIKTLSNVKSFYRTLITLLAHSSLTVVVFALSILSSLTLNEEVGEKLFHARNIHQTFQLIFNILINGDGTLTRKYSVDLLMDLLKNPKIADYLTRYEHFSSCLHQVLGLLNGKDPDSSSKVLELLLAFCSVTQLRHMLTQMMFEQSPPGSATLGSHTKCLEPTVALLRWLSQPLDGSENCSVLALELFKEIFEDVIDAANCSSADRFVTLLLPTILDQLQFTEQNLDEALTRKKCERIAKAIEVLLTLCGDDTLKMHIAKILTTVKCTTLIEQQFTYGKIDLGFGTKVADSELCKLAADVILKTLDLINKLKPLVPGMEVSFYKILQDPRLITPLAFALTSDNREQVQSGLRILLEAAPLPDFPALVLGESIAANNAYRQQETEHIPRKMPWQSSNHSFPTSIKCLTPHLKDGVPGLNIEELIEKLQSGMVVKDQICDVRISDIMDVYEMKLSTLASKESRLQDLLETKALALAQADRLIAQHRCQRTQAETEARTLASMLREVERKNEELSVLLKAQQVESERAQSDIEHLFQHNRKLESVAEEHEILTKSYMELLQRNESTEKKNKDLQITCDSLNKQIETVKKLNESLKEQNEKFASKNKSTRRKD

SEQ ID NO: 754928 - protein, 286 aa, Homo sapiens
MDSTACLKSLLLTVSQYKAVKSEANATQLLRHLEVISGQKLTRLFTSNQILTSECLSCLVELLEDPNISASLILSIIGLLSQLAVDIETRDCLQNTYNLNSVLAGVVCRSSHTDSVFLQCIQLLQKLTYNVKIFYSGANIDELITFLIDHIQSSEDELKMPCLGLLANLCRHNLSVQTHIKTLSNVKSFYRTLITLLAHSSLTVVVFALSILSSLTLNEEVGEKLFHARNIHQTFQLIFNILINGDGTLTRKYSVDLLMDLLKNPKIADYLTRYDSLQSILELFYF

SEQ ID NO: 754929 - protein, 423 aa, Homo sapiens
MAGKVKWVTDIEKSVLINNFEKRGWVQVTENEDWNFYWMSVQTIRNVFSVEAGYRLSDDQIVNHFPNHYELTRKDLMVKNIKRYRKELEKEGSPLAEKDENGKYLYLDFVPVTYMLPADYNLFVEEFRKSPSSTWIMKPCGKAQGKGIFLINKLSQIKKWSRDSKTSSFVSQSNKEAYVISLYINNPLLIGGRKFDLRLYVLVSTYRPLRCYMYKLGFCRFCTVKYTPSTSELDNMFVHLTNVAIQKHGEDYNHIHGGKWTVSNLRLYLESTRGKEVTSKLFDEIHWIIVQSLKAVAPVMNNDKHCFECYGYDIIIDDKLKPWLIEVNASPSLTSSTANDRILKYNLINDTLNIAVPNGEIPDCKWNKSPPKEVLGNYEILYDEELAQGDGADRELRSRQGQSLGPRAGRSRDSGRAVLTTWK

SEQ ID NO: 754930 - protein, 127 aa, Homo sapiens
MPVMNNDKHCFECYGYDIIIDDKLKPWLIEVNASPSLTSSTANDRILKYNLINDTLNIAVPNGEIPDCKWNKSPPKEVLGNYEILYDEELAQGDGADRELRSRQGQSLGPRAGRSRDSGRAVLTTWK

SEQ ID NO: 754931 - protein, 423 aa, Homo sapiens; identical to SEQ ID NO: 754929

SEQ ID NO: 754932 - protein, 385 aa, Homo sapiens
MSVQTIRNVFSVEAGYRLSDDQIVNHFPNHYELTRKDLMVKNIKRYRKELEKEGSPLAEKDENGKYLYLDFVPVTYMLPADYNLFVEEFRKSPSSTWIMKPCGKAQGKGIFLINKLSQIKKWSRDSKTSSFVSQSNKEAYVISLYINNPLLIGGRKFDLRLYVLVSTYRPLRCYMYKLGFCRFCTVKYTPSTSELDNMFVHLTNVAIQKHGEDYNHIHGGKWTVSNLRLYLESTRGKEVTSKLFDEIHWIIVQSLKAVAPVMNNDKHCFECYGYDIIIDDKLKPWLIEVNASPSLTSSTANDRILKYNLINDTLNIAVPNGEIPDCKWNKSPPKEVLGNYEILYDEELAQGDGADRELRSRQGQSLGPRAGRSRDSGRAVLTTWK

SEQ ID NO: 754933 - protein, 394 aa, Homo sapiens
MAGKVKWVTDIEKSVLINNFEKRGWVQVTENEDWNFYWMSVQTIRNVFSVEAGYRLSDDQIVNHFPNHYELTRKDLMVKNIKRYRKELEKEGSPLAEKDENGKYLYLDFVPVTYMLPADYNLFVEEFRKSPSSTWIMKPCGKAQGKGIFLINKLSQIKKWSRDSKTSSFVSQSNKEAYVISLYINNPLLIGGRKFDLRLYVLVSTYRPLRCYMYKLGFCRFCTVKYTPSTSELDNMFVHLTNVAIQKHGEDYNHIHGGKWTVSNLRLYLESTRGKEVTSKLFDEIHWIIVQSLKAVAVNASPSLTSSTANDRILKYNLINDTLNIAVPNGEIPDCKWNKSPPKEVLGNYEILYDEELAQGDGADRELRSRQGQSLGPRAGRSRDSGRAVLTTWK

SEQ ID NO: 754934 - protein, 396 aa, Homo sapiens
MSVQTIRNVFSVEAGYRLSDDQIVNHFPNHYELTRKDLMVKNIKRYRKELEKEGSPLAEKDENGKYLYLGLCVFHRLMFFNFVPVTYMLPADYNLFVEEFRKSPSSTWIMKPCGKAQGKGIFLINKLSQIKKWSRDSKTSSFVSQSNKEAYVISLYINNPLLIGGRKFDLRLYVLVSTYRPLRCYMYKLGFCRFCTVKYTPSTSELDNMFVHLTNVAIQKHGEDYNHIHGGKWTVSNLRLYLESTRGKEVTSKLFDEIHWIIVQSLKAVAPVMNNDKHCFECYGYDIIIDDKLKPWLIEVNASPSLTSSTANDRILKYNLINDTLNIAVPNGEIPDCKWNKSPPKEVLGNYEILYDEELAQGDGADRELRSRQGQSLGPRAGRSRDSGRAVLTTWK

SEQ ID NO: 754935 - protein, 423 aa, Homo sapiens; identical to SEQ ID NO: 754929

SEQ ID NO: 754936 - protein, 385 aa, Homo sapiens; identical to SEQ ID NO: 754932

SEQ ID NO: 754937 - protein, 141 aa, Homo sapiens
GYHGDGLNAVILFASCYLPRSSIPNYTYVMEHLFRYMVGTLELLVAENYLLVHLSGGTSRAQVPPLSWIRQCYRTLDRRLRKNLRALVVVHATWYVKAFLALLRPFISSKFTRKIRFLDSLGELAQLISLDQVHIPEAVRQ

SEQ ID NO: 754938 - protein, 91 aa, Homo sapiens
MPSLLGAPPYSGLGGVGDPYVPLMVLMCRVCLEDKPIKPLPCCKKAVCEECLKVYLSAQTESHSVTRLECSGMISAHGNLHIPGSSDSPAS

SEQ ID NO: 754939 - protein, 242 aa, Homo sapiens
MRLGTRSALWACRGWRQQHMHAWLTEQPLGVLFPEELYGDFEDLETGDMHKGKSGPDTQNEDIENKEEIDPDEEESAKKKHLDKKRKLKEMFDAEYDEGESTYFDDLKGEMQKEAQLNHVEFEDQDDEARVQYDGFRPGMYVRVEIENVPCEFVQNFDPHYPIILGGLGNSEGNVGHVQMRLKKHRWYKKILKSQDPIIFSVGWRRFQTILLYYIEDHNGRQRLLKYTPQHMHCGAAFWGKI

SEQ ID NO: 754940 - protein, 836 aa, Homo sapiens
MAVYTYLRLIVDHHGTAQLQALRQKEVDFCISLLRERFMECLMIGRDLVRLLQNVARIPEFELLWKDIIHNPQALSPQFTGILQLLQSRTSRKFLACRLTPDMETKLLFMTSRVRFGQQKRYQDWFQRQYLSTPDSQSLRCDLIRYICGVVHPSNEVLSSDILPRWAIIGWLLTTCTSNVAASNAKLALFYDWLFFSPDKDSIMNIEPAILVMHHSMKPHPAITATLLDFMCRIIPNFYPPLEGHVRQGVFSSLNHIVEKRVLAHLAPLFDNPKLDKELRAMLREKFPEFCSSPSPPVEVKIEEPVSMEMDNHMSDKDESCYDNAEAAFSDDEEDLNSKGKKREFRFHPIKETVVEEPVDITPYLDQLDESLRDKVLQLQKGSDTEAQCEVMQEIVDQVLEEDFDSEQLSVLASCLQELFKAHFRGEVLPEEITEESLEESVGKPLYLIFRNLCQMQEDNSSFSLLLDLLSELYQKQPKIGYHLLYYLRASKAAAGKMNLYESFAQATQLGDLHTCLMMDMKACQEDDVRLLCHLTPSIYTEFPDETLRSGELLNMIVAVIDSAQLQELVCHVMMGNLVMFRKDSVLNILIQSLDWETFEQYCAWQLFLAHNIPLETIIPILQHLKYKEHPEALSCLLLQLRREKPSEEMVKMVLSRPCHPDDQFTTSILRHWCMKHDELLAEHIKSLLIKNNSLPRKRQSLRSSSSKLAQLTLEQILEHLDNLRLNLTNTKQNFFSQTPILQALQHVQASCDEAHKMKFSDLFSLAEEYEDSSTKPPKSRRKAALSSPRSRKNATQPPNAEEESGSSSASEEEDTKPKPTKRKRKGSSAVGSDSD

SEQ ID NO: 754941 - protein, 836 aa, Homo sapiens; identical to SEQ ID NO: 754940

SEQ ID NO: 754942 - protein, 832 aa, Homo sapiens
MNIVLIVDHHGTAQLQALRQKEVDFCISLLRERFMECLMIGRDLVRLLQNVARIPEFELLWKDIIHNPQALSPQFTGILQLLQSRTSRKFLACRLTPDMETKLLFMTSRVRFGQQKRYQDWFQRQYLSTPDSQSLRCDLIRYICGVVHPSNEVLSSDILPRWAIIGWLLTTCTSNVAASNAKLALFYDWLFFSPDKDSIMNIEPAILVMHHSMKPHPAITATLLDFMCRIIPNFYPPLEGHVRQGVFSSLNHIVEKRVLAHLAPLFDNPKLDKELRAMLREKFPEFCSSPSPPVEVKIEEPVSMEMDNHMSDKDESCYDNAEAAFSDDEEDLNSKGKKREFRFHPIKETVVEEPVDITPYLDQLDESLRDKVLQLQKGSDTEAQCEVMQEIVDQVLEEDFDSEQLSVLASCLQELFKAHFRGEVLPEEITEESLEESVGKPLYLIFRNLCQMQEDNSSFSLLLDLLSELYQKQPKIGYHLLYYLRASKAAAGKMNLYESFAQATQLGDLHTCLMMDMKACQEDDVRLLCHLTPSIYTEFPDETLRSGELLNMIVAVIDSAQLQELVCHVMMGNLVMFRKDSVLNILIQSLDWETFEQYCAWQLFLAHNIPLETIIPILQHLKYKEHPEALSCLLLQLRREKPSEEMVKMVLSRPCHPDDQFTTSILRHWCMKHDELLAEHIKSLLIKNNSLPRKRQSLRSSSSKLAQLTLEQILEHLDNLRLNLTNTKQNFFSQTPILQALQHVQASCDEAHKMKFSDLFSLAEEYEDSSTKPPKSRRKAALSSPRSRKNATQPPNAEEESGSSSASEEEDTKPKPTKRKRKGSSAVGSDSD

SEQ ID NO: 754943 - protein, 866 aa, Homo sapiens
MAVYTYLRLIVDHHGTAQLQALRQKEVDFCISLLRERFMECLMIGRDLVRLLQNVARIPEFELLWKDIIHNPQALSPQFTGILQLLQSRTSRKFLACRLTPDMETKLLFMTSRVRFGQQKRYQDWFQRQYLSTPDSQSLRCDLIRYICGVVHPSNEVLSSDILPRWAIIGWLLTTCTSNVAASNAKLALFYDWLFFSPDKDSIMNIEPAILVMHHSMKPHPAITATLLDFMCRIIPNFYPPLEGHVRQGVFSSLNHIVEKRVLACKKYWLYLRLLGICLLGSERNFSPAIVLQRHLAPLFDNPKLDKELRAMLREKFPEFCSSPSPPVEVKIEEPVSMEMDNHMSDKDESCYDNAEAAFSDDEEDLNSKGKKREFRFHPIKETVVEEPVDITPYLDQLDESLRDKVLQLQKGSDTEAQCEVMQEIVDQVLEEDFDSEQLSVLASCLQELFKAHFRGEVLPEEITEESLEESVGKPLYLIFRNLCQMQEDNSSFSLLLDLLSELYQKQPKIGYHLLYYLRASKAAAGKMNLYESFAQATQLGDLHTCLMMDMKACQEDDVRLLCHLTPSIYTEFPDETLRSGELLNMIVAVIDSAQLQELVCHVMMGNLVMFRKDSVLNILIQSLDWETFEQYCAWQLFLAHNIPLETIIPILQHLKYKEHPEALSCLLLQLRREKPSEEMVKMVLSRPCHPDDQFTTSILRHWCMKHDELLAEHIKSLLIKNNSLPRKRQSLRSSSSKLAQLTLEQILEHLDNLRLNLTNTKQNFFSQTPILQALQHVQASCDEAHKMKFSDLFSLAEEYEDSSTKPPKSRRKAALSSPRSRKNATQPPNAEEESGSSSASEEEDTKPKPTKRKRKGSSAVGSDSD

SEQ ID NO: 754944 - protein, 538 aa, Homo sapiens
MLREKFPEFCSSPSPPVEEDESCYDNAEAAFSDDEEDLNSKGKKREFRFHPIKETVVEEPVDITPYLDQLDESLRDKVLQLQKGSDTEAQCEVMQEIVDQVLEEDFDSEQLSVLASCLQELFKAHFRGEVLPEEITEESLEESVGKPLYLIFRNLCQMQEDNSSFSLLLDLLSELYQKQPKIGYHLLYYLRASKAAAGKMNLYESFAQATQLGDLHTCLMMDMKACQEDDVRLLCHLTPSIYTEFPDETLRSGELLNMIVAVIDSAQLQELVCHVMMGNLVMFRKDSVLNILIQSLDWETFEQYCAWQLFLAHNIPLETIIPILQHLKYKEHPEALSCLLLQLRREKPSEEMVKMVLSRPCHPDDQFTTSILRHWCMKHDELLAEHIKSLLIKNNSLPRKRQSLRSSSSKLAQLTLEQILEHLDNLRLNLTNTKQNFFSQTPILQALQHVQASCDEAHKMKFSDLFSLAEEYEDSSTKPPKSRRKAALSSPRSRKNATQPPNAEEESGSSSASEEEDTKPKPTKRKRKGSSAVGSDSD

SEQ ID NO: 754945 - protein, 866 aa, Homo sapiens; identical to SEQ ID NO: 754943

SEQ ID NO: 754946 - protein, 836 aa, Homo sapiens; identical to SEQ ID NO: 754940

SEQ ID NO: 754947 - protein, 820 aa, Homo sapiens
MAVYTYLRLIVDHHGTAQLQALRQKEVDFCISLLRERFMECLMIGRDLVRLLQNVARIPEFELLWKDIIHNPQALSPQFTGILQLLQSRTSRKFLACRLTPDMETKLLFMTSRVRFGQQKRYQDWFQRQYLSTPDSQSLRCDLIRYICGVVHPSNEVLSSDILPRWAIIGWLLTTCTSNVAASNAKLALFYDWLFFSPDKDSIMNIEPAILVMHHSMKPHPAITATLLDFMCRIIPNFYPPLEGHVRQGVFSSLNHIVEKRVLAHLAPLFDNPKLDKELRAMLREKFPEFCSSPSPPVEVKIEEPVSMEMDNHMSDKDESCYDNAEAAFSDDEEDLNSKGKKREFRFHPIKETVVEEPVDITPYLDHDTEAQCEVMQEIVDQVLEEDFDSEQLSVLASCLQELFKAHFRGEVLPEEITEESLEESVGKPLYLIFRNLCQMQEDNSSFSLLLDLLSELYQKQPKIGYHLLYYLRASKAAAGKMNLYESFAQATQLGDLHTCLMMDMKACQEDDVRLLCHLTPSIYTEFPDETLRSGELLNMIVAVIDSAQLQELVCHVMMGNLVMFRKDSVLNILIQSLDWETFEQYCAWQLFLAHNIPLETIIPILQHLKYKEHPEALSCLLLQLRREKPSEEMVKMVLSRPCHPDDQFTTSILRHWCMKHDELLAEHIKSLLIKNNSLPRKRQSLRSSSSKLAQLTLEQILEHLDNLRLNLTNTKQNFFSQTPILQALQHVQASCDEAHKMKFSDLFSLAEEYEDSSTKPPKSRRKAALSSPRSRKNATQPPNAEEESGSSSASEEEDTKPKPTKRKRKGSSAVGSDSD

SEQ ID NO: 754948 - protein, 759 aa, Homo sapiens
MAVYTYLRLIVDHHGTAQLQALRQKEVDFCISLLRERFMECLMIGRDLVRLLQNVARIPEFELLWKDIIHNPQALSPQFTGILQLLQSRTSRKFLACRLTPDMETKLLFMTSRVRFGQQKRYQDWFQRQYLSTPDSQSLRCDLIRYICGVVHPSNEVLSSDILPRWAIIGWLLTTCTSNVAASNAKLALFYDWLFFSPDKDSIMNIEPAILVMHHSMKPHPAITATLLDFMCRIIPNFYPPLEGHVRQGVFSSLNHIVEKRVLAHLAPLFDNPKLDKELRAMLREKFPEFCSSPSPPVEVKIEEPVSMEMDNHMSDKDESCYDNAEAAFSDDEEDLNSKGKKREFRFHPIKETVVEEPVDITPYLDQLDESLRDKVLQLQKGSDTEAQCEVMQEIVDQVLEEDFDSEQLSVLASCLQELFKAHFRGEVLPEEITEESLEESVGKPLYLIFRNLCQMQEDNSSFSLLLDLLSELYQKQPKIGYHLLYYLRASKAAAGKMNLYESFAQATQLGDLHTCLMMDMKACQEDDVRLLCHLTPSIYTEFPDETLRSGELLNMIVAVIDSAQLQELVCHVMMGNLVMFRKDSVLNILIQSLDWETFEQYCAWQLFLAHNIPLETIIPILQHLKYKEHPEALSCLLLQLRREKPSEEMVKMVLSRPCHPDDQFTTSILRHWCMKHDELLAEHIKSLLIKNNSLPRKRQSLRSSSSKLAQLTLEQILEHLDNLRLNLTNTKQNFFSQTPILQALQHVQASCDEAHKMK

SEQ ID NO: 754949 - protein, 397 aa, Homo sapiens
GRVGRPTRPIFRNLCQMQEDNSSFSLLLDLLSELYQKQPKIGYHLLYYLRASKAAAGKMNLYESFAQATQLGDLHTCLMMDMKACQEDDVRLLCHLTPSIYTEFPDETLRSGELLNMIVAVIDSAQLQELVCHVMMGNLVMFRKDSVLNILIQSLDWETFEQYCAWQLFLAHNIPLETIIPILQHLKYKEHPEALSCLLLQLRREKPSEEMVKMVLSRPCHPDDQFTTSILRHWCMKHDELLAEHIKSLLIKNNSLPRKRQSLRSSSSKLAQLTLEQILEHLDNLRLNLTNTKQNFFSQTPILQALQHVQASCDEAHKMKFSDLFSLAEEYEDSSTKPPKSRRKAALSSPRSRKNATQPPNAEEESGSSSASEEEDTKPKPTKRKRKGSSAVGSDSD

SEQ ID NO: 754950 - protein, 836 aa, Homo sapiens; identical to SEQ ID NO: 754940

SEQ ID NO: 754951 - protein, 836 aa, Homo sapiens; identical to SEQ ID NO: 754940

SEQ ID NO: 754952 - protein, 312 aa, Homo sapiens
KSASRGRCEFGGGSIYTEFPDETLRSGELLNMIVAVIDSAQLQELVCHVMMGNLVMFRKDSVLNILIQSLDWETFEQYCAWQLFLAHNIPLETIIPILQHLKYKEHPEALSCLLLQLRREKPSEEMVKMVLSRPCHPDDQFTTSILRHWCMKHDELLAEHIKSLLIKNNSLPRKRQSLRSSSSKLAQLTLEQILEHLDNLRLNLTNTKQNFFSQTPILQALQHVQASCDEAHKMKFSDLFSLAEEYEDSSTKPPKSRRKAALSSPRSRKNATQPPNAEEESGSSSASEEEDTKPKPTKRKRKGSSAVGSDSD

SEQ ID NO: 754953 - protein, 343 aa, Homo sapiens
TFMKQIAGGDVTAKNIWLAESVLDILTEQREWVLKSSILIAMAVYTYLRFPDETLRSGELLNMIVAVIDSAQLQELVCHVMMGNLVMFRKDSVLNILIQSLDWETFEQYCAWQLFLAHNIPLETIIPILQHLKYKEHPEALSCLLLQLRREKPSEEMVKMVLSRPCHPDDQFTTSILRHWCMKHDELLAEHIKSLLIKNNSLPRKRQSLRSSSSKLAQLTLEQILEHLDNLRLNLTNTKQNFFSQTPILQALQHVQASCDEAHKMKFSDLFSLAEEYEDSSTKPPKSRRKAALSSPRSRKNATQPPNAEEESGSSSASEEEDTKPKPTKRKRKGSSAVGSDSD

SEQ ID NO: 754954 - protein, 783 aa, Homo sapiens
MAVYTYLRLIVDHHGTAQLQALRQKEVDFCISLLRERFMECLMIGRDLVRLLQNVARIPEFELLWKDIIHNPQALSPQFTGILQLLQSRTSRKFLACRLTPDMETKLLFMTSRVRFGQQKRYQDWFQRQYLSTPDSQSLRCDLIRYICGVVHPSNEVLSSDILPRWAIIGWLLTTCTSNVAASNAKLALFYDWLFFSPDKDSIMNIEPAILVMHHSMKPHPAITATLLDFMCRIIPNFYPPLEGHVRQGVFSSLNHIVEKRVLAHLAPLFDNPKLDKELRAMLREKFPEFCSSPSPPVEVKIEEPVSMEMDNHMSDKDESCYDNAEAAFSDDEEDLNSKGKKREFRFHPIKETVVEEPVDITPYLDQLDESLRDKVLQLQKGSDTEAQCEVMQEIVDQVLEEDFDSEQLSVLASCLQELFKAHFRGEVLPEEITEESLEESVGKPLYLIFRNLCQMQEDNSSFSLLLDLLSELYQKQPKIGYHLLYYLRASKAAAGKMNLYESFAQATQLGDLHTCLMMDMKACQEDDVRLLCHLTPSIYTEFPDETLRSGELLNMIVAVIDSAQLQELVCHVMMGNLVMFRKDSVLNILIQSLDWETFEQYCAWQLFLAHNIPLETIIPILQHLKYKEHPEALSCLLLQLRREKPSEEMVKMVLSRPCHPDDQFTTSILRHWCMKHDELLAEHIKSLLIKNNSLPRKRQSLRSSSSKLAQLTLEQILEHLDNLRLNLTNTKQNFFSQTPILQALQHVQASCDEAHKMKFSDLFSLAEEYEDSSTKSTCSGVL

SEQ ID NO: 754955 - protein, 146 aa, Homo sapiens
MASKTLGSRVEEKEGLGLGAEKRMGGAVGAAGSHSKSYRSFSLDSVISSPWRRNMRTLPPSHPRAGEKQLCPALEVERMPHSPPMPKKSRAPAVLQKRKTRNRSLPSGNEKGPLQWALTVTEALHSPSHPRLDCPLLLGDSKVNRG

SEQ ID NO: 754956 - protein, 704 aa, Homo sapiens
MAVYTYLRLIVDHHGTAQLQALRQKEVDFCISLLRERFMECLMIGRDLVRLLQNVARIPEFELLWKDIIHNPQALSPQFTGILQLLQSRTSRKFLACRLTPDMETKLLFMTSRVRFGQQKRYQDWFQRQYLSTPDSQSLRCDLIRYICGVVHPSNEVLSSDILPRWAIIGWLLTTCTSNVAASNAKLALFYDWLFFSPDKDSIMNIEPAILVMHHSMKPHPAITATLLDFMCRIIPNFYPPLEGHVRQGVFSSLNHIVEKRVLAHLAPLFDNPKLDKELRAMLREKFPEFCSSPSPPVEVKIEEPVSMEMDNHMSDKDESCYDNAEAAFSDDEEDLNSKGKKREFRFHPIKETVVEEPVDITPYLDQLDESLRDKVLQLQKGSDTEAQCEVMQEIVDQVLEEDFDSEQLSVLASCLQELFKAHFRGEVLPEEITEESLEESVGKPLYLIFRNLCQMQEDNSSFSLLLDLLSELYQKQPKIGYHLLYYLRASKAAAGKMNLYESFAQATQLGDLHTCLMMDMKACQEDDVRLLCHLTPSIYTEFPDETLRSGELLNMIVAVIDSAQSQELGLPVMMGTWVCSEKIQSQIIIQSLTGKPCAVWPETFGTKFPWDNNSQNEETTINIGTPKAPRGDKRTPPKKAAGRRYIAVGRDAHLTYKTNHRQGTITKVAAKPLKKRATQSEQTRRQSRVDRQTSHEQRSTTNR

SEQ ID NO: 754957 - protein, 577 aa, Homo sapiens
MAVYTYLRLIVDHHGTAQLQALRQKEVDFCISLLRERFMECLMIGRDLVRLLQNVARIPEFELLWKDIIHNPQALSPQFTGILQLLQSRTSRKFLACRLTPDMETKLLFMTSRVRFGQQKRYQDWFQRQYLSTPDSQSLRCDLIRYICGVVHPSNEVLSSDILPRWAIIGWLLTTCTSNVAASNAKLALFYDWLFFSPDKDSIMNIEPAILVMHHSMKPHPAITATLLDFMCRIIPNFYPPLEGHVRQGVFSSLNHIVEKRVLAHLAPLFDNPKLDKELRAMLREKFPEFCSSPSPPVEVKIEEPVSMEMDNHMSDKDESCYDNAEAAFSDDEEDLNSKGKKREFRFHPIKETVVEEPVDITPYLDQLDESLRDKVLQLQKGSDTEAQCEVMQEIVDQVLEEDFDSEQLSVLASCLQELFKAHFRGEVLPEEITEESLEESVGKPLYLIFRNLCQMQEDNSSFSLLLDLLSELYQKQPKIGYHLLYYLRASKAAAGKMNLYESFAQATQLGDLHTCRMRETDCRQKQNQNQPLPTSPKLPLKNCSEKQGISLCKLIPCVVHGCHVITYSLVYLFPAL

SEQ ID NO: 754958 - protein, 240 aa, Homo sapiens
LTGQRAFASPGTYQYLTVVEEPVDITPYLDQLDESLRDKVLQLQKGSDTEAQCEVMQEIVDQVLEEDFDSEQLSVLASCLQELFKAHFRGEVLPEEITEESLEESVGKPLYLIFRNLCQMQEDNSSFSLLLDLLSELYQKQPKIGYHLLYYLRASKAAAGKMNLYESFAQATQLGDLHTCRMRETDCRQKQNQNQPLPTSPKLPLKNCSEKQGISLVLSKLFFPRVCLHKTCHLELACTI

SEQ ID NO: 754959 - protein, 334 aa, Homo sapiens
MAVYTYLRLIVDHHGTAQLQALRQKEVDFCISLLRERFMECLMIGRDLVRLLQNVARIPEFELLWKDIIHNPQALSPQFTGILQLLQSRTSRKFLACRLTPDMETKLLFMTSRVRFGQQKRYQDWFQRQYLSTPDSQSLRCDLIRYICGVVHPSNEVLSSDILPRWAIIGWLLTTCTSNVAASNAKLALFYDWLFFSPDKDSIMNIEPAILVMHHSMKPHPAITATLLDFMCRIIPNFYPPLEGHVRQGVFSSLNHIVEKRVLAHLAPLFDNPKLDKELRAMLREKFPEFCSSPSPPVEVKIEEPVSMEMDNHMSDILHSRKDMNNTETAFSAV

SEQ ID NO: 754960 - protein, 185 aa, Homo sapiens
MAVYTYLRLIVDHHGTAQLQALRQKEVDFCISLLRERFMECLMIGRDLVRLLQNVARIPEFELLWKDIIHNPQALSPQFTGILQLLQSRTSRKFLACRLTPDMETKLLFMTSRVRFGQQKRYQDWFQRQYLSTPDSQSLRCDLIRYICGVVHPSNEVLSSDILPRWAIIGWLLTTCTVRAKDTGW

SEQ ID NO: 754961 - protein, 73 aa, Homo sapiens
MNLYESFAQATQLGDLHTCLMMDMKACQEDDVRLLCHLTPSIYTEVSACIRICAGGLTGTHLSEHSEYTQTLN

SEQ ID NO: 754962 - protein, 83 aa, Homo sapiens
MTAGVSEREANDALNAYVCKGLPQHEEICLGLFTLILTEPAQAQKCYRDLALVSRDGMNIVLNKINQILMEKYLKLQDTCRTQ

SEQ ID NO: 754963 - protein, 895 aa, Homo sapiens
MSIVTSMTAGVSEREANDALNAYVCKGLPQHEEICLGLFTLILTEPAQAQKCYRDLALVSRDGMNIVLIVDHHGTAQLQALRQKEVDFCISLLRERFMECLMIGRDLVRLLQNVARIPEFELLWKDIIHNPQALSPQFTGILQLLQSRTSRKFLACRLTPDMETKLLFMTSRVRFGQQKRYQDWFQRQYLSTPDSQSLRCDLIRYICGVVHPSNEVLSSDILPRWAIIGWLLTTCTSNVAASNAKLALFYDWLFFSPDKDSIMNIEPAILVMHHSMKPHPAITATLLDFMCRIIPNFYPPLEGHVRQGVFSSLNHIVEKRVLAHLAPLFDNPKLDKELRAMLREKFPEFCSSPSPPVEVKIEEPVSMEMDNHMSDKDESCYDNAEAAFSDDEEDLNSKGKKREFRFHPIKETVVEEPVDITPYLDQLDESLRDKVLQLQKGSDTEAQCEVMQEIVDQVLEEDFDSEQLSVLASCLQELFKAHFRGEVLPEEITEESLEESVGKPLYLIFRNLCQMQEDNSSFSLLLDLLSELYQKQPKIGYHLLYYLRASKAAAGKMNLYESFAQATQLGDLHTCLMMDMKACQEDDVRLLCHLTPSIYTEFPDETLRSGELLNMIVAVIDSAQLQELVCHVMMGNLVMFRKDSVLNILIQSLDWETFEQYCAWQLFLAHNIPLETIIPILQHLKYKEHPEALSCLLLQLRREKPSEEMVKMVLSRPCHPDDQFTTSILRHWCMKHDELLAEHIKSLLIKNNSLPRKRQSLRSSSSKLAQLTLEQILEHLDNLRLNLTNTKQNFFSQTPILQALQHVQASCDEAHKMKFSDLFSLAEEYEDSSTKPPKSRRKAALSSPRSRKNATQPPNAEEESGSSSASEEEDTKPKPTKRKRKGSSAVGSDSD

SEQ ID NO: 754964 - protein, 734 aa, Homo sapiens
METKLLFMTSRVRFGQQKRYQDWFQRQYLSTPDSQSLRCDLIRYICGVVHPSNEVLSSDILPRWAIIGWLLTTCTSNVAASNAKLALFYDWLFFSPDKDSIMNIEPAILVMHHSMKPHPAITATLLDFMCRIIPNFYPPLEGHVRQGVFSSLNHIVEKRVLAHLAPLFDNPKLDKELRAMLREKFPEFCSSPSPPVEVKIEEPVSMEMDNHMSDKDESCYDNAEAAFSDDEEDLNSKGKKREFRFHPIKETVVEEPVDITPYLDQLDESLRDKVLQLQKGSDTEAQCEVMQEIVDQVLEEDFDSEQLSVLASCLQELFKAHFRGEVLPEEITEESLEESVGKPLYLIFRNLCQMQEDNSSFSLLLDLLSELYQKQPKIGYHLLYYLRASKAAAGKMNLYESFAQATQLGDLHTCLMMDMKACQEDDVRLLCHLTPSIYTEFPDETLRSGELLNMIVAVIDSAQLQELVCHVMMGNLVMFRKDSVLNILIQSLDWETFEQYCAWQLFLAHNIPLETIIPILQHLKYKEHPEALSCLLLQLRREKPSEEMVKMVLSRPCHPDDQFTTSILRHWCMKHDELLAEHIKSLLIKNNSLPRKRQSLRSSSSKLAQLTLEQILEHLDNLRLNLTNTKQNFFSQTPILQALQHVQASCDEAHKMKFSDLFSLAEEYEDSSTKPPKSRRKAALSSPRSRKNATQPPNAEEESGSSSASEEEDTKPKPTKRKRKGSSAVGSDSD

SEQ ID NO: 754965 - protein, 673 aa, Homo sapiens
IRYHQSRLALTTCTSNVAASNAKLALFYDWLFFSPDKDSIMNIEPAILVMHHSMKPHPAITATLLDFMCRIIPNFYPPLEGHVRQGVFSSLNHIVEKRVLAHLAPLFDNPKLDKELRAMLREKFPEFCSSPSPPVEVKIEEPVSMEMDNHMSDKDESCYDNAEAAFSDDEEDLNSKGKKREFRFHPIKETVVEEPVDITPYLDQLDESLRDKVLQLQKGSDTEAQCEVMQEIVDQVLEEDFDSEQLSVLASCLQELFKAHFRGEVLPEEITEESLEESVGKPLYLIFRNLCQMQEDNSSFSLLLDLLSELYQKQPKIGYHLLYYLRASKAAAGKMNLYESFAQATQLGDLHTCLMMDMKACQEDDVRLLCHLTPSIYTEFPDETLRSGELLNMIVAVIDSAQLQELVCHVMMGNLVMFRKDSVLNILIQSLDWETFEQYCAWQLFLAHNIPLETIIPILQHLKYKEHPEALSCLLLQLRREKPSEEMVKMVLSRPCHPDDQFTTSILRHWCMKHDELLAEHIKSLLIKNNSLPRKRQSLRSSSSKLAQLTLEQILEHLDNLRLNLTNTKQNFFSQTPILQALQHVQASCDEAHKMKFSDLFSLAEEYEDSSTKPPKSRRKAALSSPRSRKNATQPPNAEEESGSSSASEEEDTKPKPTKRKRKGSSAVGSDSD

SEQ ID NO: 754966 - protein, 529 aa, Homo sapiens
MEMDNHMSDKDESCYDNAEAAFSDDEEDLNSKGKKREFRFHPIKETVVEEPVDITPYLDQLDESLRDKVLQLQKGSDTEAQCEVMQEIVDQVLEEDFDSEQLSVLASCLQELFKAHFRGEVLPEEITEESLEESVGKPLYLIFRNLCQMQEDNSSFSLLLDLLSELYQKQPKIGYHLLYYLRASKAAAGKMNLYESFAQATQLGDLHTCLMMDMKACQEDDVRLLCHLTPSIYTEFPDETLRSGELLNMIVAVIDSAQLQELVCHVMMGNLVMFRKDSVLNILIQSLDWETFEQYCAWQLFLAHNIPLETIIPILQHLKYKEHPEALSCLLLQLRREKPSEEMVKMVLSRPCHPDDQFTTSILRHWCMKHDELLAEHIKSLLIKNNSLPRKRQSLRSSSSKLAQLTLEQILEHLDNLRLNLTNTKQNFFSQTPILQALQHVQASCDEAHKMKFSDLFSLAEEYEDSSTKPPKSRRKAALSSPRSRKNATQPPNAEEESGSSSASEEEDTKPKPTKRKRKGSSAVGSDSD

SEQ ID NO: 754967 - protein, 836 aa, Homo sapiens; identical to SEQ ID NO: 754940

SEQ ID NO: 754968 - protein, 902 aa, Homo sapiens
MAVYTYLRLIVDHHGTAQLQALRQKEVDFCISLLRERFMECLMIGRDLVRLLQNVARIPEFELLWKDIIHNPQALSPQFTGILQLLQSRTSRKFLACRLTPDMETKLLFMTSRVRFGQQKRYQDWFQRQYLSTPDSQSLRCDLIRYICGVVHPSNEVLSSDILPRWAIIGWLLTTCTSNVAASNAKLALFYDWLFFSPDKDSIMNIEPAILVMHHSMKPHPAITATLLDFMCRIIPNFYPPLEGHVRQGVFSSLNHIVEKRVLAHLAPLFDNPKLDKELRAMLREKFPEFCSSPSPPVEVKIEEPVSMEMDNHMSDKDESCYDNAEAAFSDDEEDLNSKGKKREFRFHPIKETVVEEPVDITPYLDQLDESLRDKVLQLQKGSDTEAQCEVMQEIVDQVLEEDFDSEQLSVLASCLQELFKAHFRGEVLPEEITEESLEESVGKPLYLIFRNLCQMQEDNSSFSLLLDLLSELYQKQPKIGYHLLYYLRASKAAAGKMNLYESFAQATQLGDLHTCLMMDMKACQEDDVRLLCHLTPSIYTEFPDETLRSGELLNMIVAVIDSAQLQELVCHVMMGNLVMFRKDSVLNILIQSLDWETFEQYCAWQLFLAHNIPLETIIPILQHLKYKEHPEALSCLLLQLRREKPSEEMVKMVLSRPCHPDDQFTTSILRHWCMKHDELLAEHIKSLLIKNNSLPRKRQSLRSSSSKLAQLTLEQILEHLDNLRLNLTNTKQNCMPSTLGVQCRRCCPGPDYAWSQAGGRGRTPGATTHTRDKTTCACCLISSQTSDCFSFPALPFLPLVFSQTPILQALQHVQASCDEAHKMKFSDLFSLAEEYEDSSTKPPKSRRKAALSSPRSRKNATQPPNAEEESGSSSASEEEDTKPKPTKRKRKGSSAVGSDSD

SEQ ID NO: 754969 - protein, 287 aa, Homo sapiens
LEDTRNTVDGCYDSATLQELVCHVMMGNLVMFRKDSVLNILIQSLDWETFEQYCAWQLFLAHNIPLETIIPILQHLKYKEHPEALSCLLLQLRREKPSEEMVKMVLSRPCHPDDQFTTSILRHWCMKHDELLAEHIKSLLIKNNSLPRKRQSLRSSSSKLAQLTLEQILEHLDNLRLNLTNTKQNFFSQTPILQALQHVQASCDEAHKMKFSDLFSLAEEYEDSSTKPPKSRRKAALSSPRSRKNATQPPNAEEESGSSSASEEEDTKPKPTKRKRKGSSAVGSDSD

SEQ ID NO: 754970 - protein, 576 aa, Homo sapiens
MAVYTYLRLIVDHHGTAQLQALRQKEVDFCISLLRERFMECLMIGRDLVRLLQNVARIPEFELLWKDIIHNPQALSPQFTGILQLLQSRTSRKFLACRLTPDMETKLLFMTSRVRFGQQKRYQDWFQRQYLSTPDSQSLRCDLIRYICGVVHPSNEVLSSDILPRWAIIGWLLTTCTSNVAASNAKLALFYDWLFFSPDKDSIMNIEPAILVMHHSMKPHPAITATLLDFMCRIIPNFYPPLEGHVRQGVFSSLNHIVEKRVLAHLAPLFDNPKLDKELRAMLREKFPEFCSSPSPPVEVKIEEPVSMEMDNHMSDKDESCYDNAEAAFSDDEEDLNSKGKKREFRFHPIKETVVEEPVDITPYLDQLDESLRDKVLQLQKGSDTEAQCEVMQEIVDQVLEEDFDSEQLSVLASCLQELFKAHFRGEVLPEEITEESLEESVGKPLYLIFRNLCQMQEDNSSFSLLLDLLSELYQKQPKIGYHLLYYLRASKAAAGKMNLYESFAQATQLGDLHTCRMRETDCRQKQNQNQPLPTSPKLPLKNCSEKQGISLVLSKLFFPRVCLHKTCHLELACTI

SEQ ID NO: 754971 - protein, 541 aa, Homo sapiens
MAVYTYLRLIVDHHGTAQLQALRQKEVDFCISLLRERFMECLMIGRDLVRLLQNVARIPEFELLWKDIIHNPQALSPQFTGILQLLQSRTSRKFLACRLTPDMETKLLFMTSRVRFGQQKRYQDWFQRQYLSTPDSQSLRCDLIRYICGVVHPSNEVLSSDILPRWAIIGWLLTTCTSNVAASNAKLALFYDWLFFSPDKDSIMNIEPAILVMHHSMKPHPAITATLLDFMCRIIPNFYPPLEGHVRQGVFSSLNHIVEKRVLAHLAPLFDNPKLDKELRAMLREKFPEFCSSPSPPVEVKIEEPVSMEMDNHMSDKDESCYDNAEAAFSDDEEDLNSKGKKREFRFHPIKETVVEEPVDITPYLDQLDESLRDKVLQLQKGSDTEAQCEVMQEIVDQVLEEDFDSEQLSVLASCLQELFKAHFRGEVLPEEITEESLEESVGKPLYLIFRNLCQMQEDNSSFSLLLDLLSELYQKQPKIGYHLLYYLRASKAAAGKMNLYESFAQATQLGDLHTCSALRMRETDYVGFHGPKLTPHTAPN

SEQ ID NO: 754972 - protein, 208 aa, Homo sapiens
MAVYTYLRLIVDHHGTAQLQALRQKEVDFCISLLRERFMECLMIGRDLVRLLQNVARIPEFELLWKDIIHNPQALSPQFTGILQLLQSRTSRKFLACRLTPDMETKLLFMTSRVRFGQQKRYQDWFQRQYLSTPDSQSLRCDLIRYICGVVHPSNEVLSSDILPRWAIIGWLLTTCTSNVAASNAKLALFYDWLFFSPDKDSIMNIGM

SEQ ID NO: 754973 - protein, 47 aa, Homo sapiens
VFLHSLRSSSSKLAQLTLEQILEHLDNLRLNLTNTKQNCMPSTLGVQ

SEQ ID NO: 754974 - protein, 147 aa, Homo sapiens
MLFFINVQTKKDTSKERTYAFLVNTRHPKIRRQIEQGMDMVISSVIGESYRLQFDFQEAVKNFFPPGNEVVNGENLSFAYEFKADALFDFFYWFGLSNSVVKVNGKSSIDDVFNCNLSPRSSLTEPLLAELPFPSVLESEETPNQFI

SEQ ID NO: 754975 - protein, 329 aa, Homo sapiens
ASGSLGGAARAVRLAPERPPRPGQAGRPTPSSPRARLTQAGRPAPPGDHQVPAGGCRHRTEAGGVRTDDAGMAGAACEPVARPSLTSISSGELRSLWTCDCELALLPLAQLLRLQPGAFQLSGDQLVVAGPGEPAAARGGFNVFGDGLVRLDGQLYRLSSYIKRYVELTNYCDYKDYRETILSKPMLFFINVQTKKDTSKERTYAFLVNTRHPKIRRQIEQGMDMVISSVIGESYRLQFDFQEAVKNFFPPGNEVVNGENLSFAYEFKADALFDFFYWFGLSNSVVKVNGKVLNLSSTSPEKKETIKLFLEKMSEPLIRRAVSLTESSV

SEQ ID NO: 754976 - protein, 338 aa, Homo sapiens
ASGSLGGAARAVRLAPERPPRPGQAGRPTPSSPRARLTQAGRPAPPGDHQVPAGGCRHRTEAGGVRTDDAGMAGAACEPVARPSLTSISSGELRSLWTCDCELALLPLAQLLRLQPGAFQLSGDQLVVAGPGEPAAARGGFNVFGDGLVRLDGQLYRLSSYIKRYVELTNYCDYKDYRETILSKPMLFFINVQTKKDTSKERTYAFLVNTRHPKIRRQIEQGMDMVISSVIGESYRLQSMQCSSLFQFDFQEAVKNFFPPGNEVVNGENLSFAYEFKADALFDFFYWFGLSNSVVKVNGKVLNLSSTSPEKKETIKLFLEKMSEPLIRRAVSLTESSV

SEQ ID NO: 754977 - protein, 103 aa, Homo sapiens
HKHTCTHTCTHAQTQNHTHIHTFTQTCTNTCTNTHTHTQTHEKDKSPDACPACLLTPGMQFPDMLAEVLEHIPSHPTIRIHTPRPRETPESADMHHYQGPYRT

SEQ ID NO: 754978 - protein, 272 aa, Homo sapiens
IEYLARVRLSSNLFQRRIFYQGATLKNEINFLLGPVGSYFMFHMNQRFSRRPYLPGQLPPPPLYRPRWVPPSPPPPYDSRLNSPLSLPFVPGRVPPSSFSRFSQAVILSQLFPLESIRQPRLFPGYPNLHFPLRPYYVGPIRILKPPFPPIPFFLAIYLPISNPEPQINITTADTTITTNPPTTATATTSTSTKPTMTISSSTVPISSTPEPATSISAATPAASTENTTQILANRPHTVLLNATVQVTTSNQTILSSPAFKSFWQKLFAIFG

SEQ ID NO: 754979 - protein, 229 aa, Homo sapiens
MNQRFSRRPYLPGQLPPPPLYRPRWVPPSPPPPYDSRLNSPLSLPFVPGRVPPSSFSRFSQAVILSQLFPLESIRQPRLFPGYPNLHFPLRPYYVGPIRILKPPFPPIPFFLAIYLPISNPEPQINITTADTTITTNPPTTATATTSTSTKPTMTISSSTVPISSTPEPATSISAATPAASTENTTQILANRPHTVLLNATVQVTTSNQTILSSPAFKSFWQKLFAIFG

SEQ ID NO: 754980 - protein, 251 aa, Homo sapiens
  misc_feature (15)..(15): Xaa can be any naturally occurring amino acid
  misc_feature (22)..(22): Xaa can be any naturally occurring amino acid
DIQMNNVSHTIKNTXAAFAGCXMNQRFSRRPYLPGQLPPPPLYRPRWVPPSPPPPYDSRLNSPLSLPFVPGRVPPSSFSRFSQAVILSQLFPLESIRQPRLFPGYPNLHFPLRPYYVGPIRILKPPFPPIPFFLAIYLPISNPEPQINITTADTTITTNPPTTATATTSTSTKPTMTISSSTVPISSTPEPATSISAATPAASTENTTQILANRPHTVLLNATVQVTTSNQTILSSPAFKSFWQKLFAIFG

SEQ ID NO: 754981 - protein, 229 aa, Homo sapiens; identical to SEQ ID NO: 754979

SEQ ID NO: 754982 - protein, 118 aa, Homo sapiens
MRLANSELRTSHRTEIGGSKMHVGTEYPGRASRRVRGNYTEGRAAASRYRPGTAGGAQAGAGRAAASWSPAGGRASSHRSGIPPRGKKASEGHGGRSAQPQRLGEPGPGPAFGVGGAR

SEQ ID NO: 754983 - protein, 266 aa, Homo sapiens
SPTFSTPQMLRAPAPAPAMAPGAPSSSPSPILAVLLFSSLVLSPAQAIVVYTDREVHGAVGSRVTLHCSFWSSEWVSDDISFTWRYQPEGGRDAISIFHYAKGQPYIDEVGTFKERIQWVGDPRWKDGSIVIHNLDYSDNGTFTCDVKNPPDIVGKTSQVTLYVFEKVPTRYGVVLGAVIGGVLGVVLLLLLLFYVVRYCWLRRQAALQRRLSAMEKGKLHKPGKDASKRGRQTPVLYAMLDHSRSTKAVSEKKAKGLGESRKDKK

SEQ ID NO: 754984 - protein, 266 aa, Homo sapiens; identical to SEQ ID NO: 754983

SEQ ID NO: 754985 - protein, 254 aa, Homo sapiens
SPTFSTPQMLRAPAPAPAMAPGAPSSSPSPILAVLLFSSLVLSPAQAIVVYTDREVHGAVGSRVTLHCSFWSSEWVSDDISFTWRYQPEGGRDAISIFHYAKGQPYIDEVGTFKERIQWVGDPRWKDGSIVIHNLDYSDNGTFTCDVKNPPDIVGKTSQVTLYVFEKVPTRYGVVLGAVIGGVLGVVLLLLLLFYVVRYCWLRRQAALQRRLSAMEKGKLHKPGKDASKRGRQVSGTWGLDKMGRRTLGAAGQQ

SEQ ID NO: 754986 - protein, 266 aa, Homo sapiens; identical to SEQ ID NO: 754983

SEQ ID NO: 754987 - protein, 237 aa, Homo sapiens
MVHLIPHFVLAVLSPAQAIVVYTDREVHGAVGSRVTLHCSFWSSEWVSDDISFTWRYQPEGGRDAISIFHYAKGQPYIDEVGTFKERIQWVGDPRWKDGSIVIHNLDYSDNGTFTCDVKNPPDIVGKTSQVTLYVFEKVPTRYGVVLGAVIGGVLGVVLLLLLLFYVVRYCWLRRQAALQRRLSAMEKGKLHKPGKDASKRGRQTPVLYAMLDHSRSTKAVSEKKAKGLGESRKDKK

SEQ ID NO: 754988 - protein, 31 aa, Homo sapiens
MEKGKLHKPGKDASKRGRQVSGTWGLDKMGR

SEQ ID NO: 754989 - protein, 285 aa, Homo sapiens
MSDDFLWFEGIAFPTMGFRSETLRKVRDEFVIRDEDVIILTYPKSGTNWLAEILCLMHSKGDAKWIQSVPIWERSPWVESEIGYTALSETESPRLFSSHLPIQLFPKSFFSSKAKVIYLMRNPRDVLVSGYFFWKNMKFIKKPKSWEEYFEWFCQGTVLYGSWFDHIHGWMPMREEKNFLLLSYEELKQDTGRTIEKICQFLGKTLEPEELNLILKNSSFQSMKENKMSNYSLLSVDYVVDKAQLLRKGVSGDWKNHFTVAQAEDFDKLFQEKMADLPRELFPWE

SEQ ID NO: 754990 - protein, 285 aa, Homo sapiens; identical to SEQ ID NO: 754989

SEQ ID NO: 754991 - protein, 229 aa, Homo sapiens
MHSKGDAKWIQSVPIWERSPWVESEIGYTALSETESPRLFSSHLPIQLFPKSFFSSKAKVIYLMRNPRDVLVSGYFFWKNMKFIKKPKSWEEYFEWFCQGTVLYGSWFDHIHGWMPMREEKNFLLLSYEELKQDTGRTIEKICQFLGKTLEPEELNLILKNSSFQSMKENKMSNYSLLSVDYVVDKAQLLRKGVSGDWKNHFTVAQAEDFDKLFQEKMADLPRELFPWE

SEQ ID NO: 754992 - protein, 218 aa, Homo sapiens
MSDDFLWFEGIAFPTMGFRSETLRKVRDEFVIRDEDVIILTYPKSGTNWLAEILCLMHSKGDAKWIQSVPIWERSPWVESEIGYTALSETESPRLFSSHLPIQLFPKSFFSSKAKVIYLMRNPRDVLVSGYFFWKNMKFIKKPKSWEEYFEWFCQGTVLYGSWFDHIHGWMPMREEKKEDLSIPGKDVRTRRTELNSQEQLLSEHERKQDVQLFPPEC

SEQ ID NO: 754993 - protein, 285 aa, Homo sapiens; identical to SEQ ID NO: 754989

SEQ ID NO: 754994 - protein, 229 aa, Homo sapiens; identical to SEQ ID NO: 754991

SEQ ID NO: 754995 - protein, 268 aa, Homo sapiens
MEFPDLGAHCSEPSCQRLDFLPLKCDACSGIFCADHVAYAQHHCGSAYQKDIQVPVCPLCNVPVPVARGEPPDRAVGEHIDRDCRSDPAQQKRKIFTNKCERAGCRQREMMKLTCERCSRNFCIKHRHPLDHDCSGEGHPTSRAGLAAISRAQAVASTSTVPSPSQTMPSCTSPSRATTRSPSWTAPPVIALQNGLSEDEALQRALEMSLAETKPQVPSCQEEEDLALAQALSASEAEYQRQQGPEPQLEAVQLQPVLGPWAWGGRFT

SEQ ID NO: 754996 - protein, 268 aa, Homo sapiens; identical to SEQ ID NO: 754995

SEQ ID NO: 754997 - protein, 289 aa, Homo sapiens
REERAPGAGWRGGSQTLPGLAMEFPDLGAHCSEPSCQRLDFLPLKCDACSGIFCADHVAYAQHHCGSAYQKDIQVPVCPLCNVPVPVARGEPPDRAVGEHIDRDCRSDPAQQKRKIFTNKCERAGCRQREMMKLTCERCSRNFCIKHRHPLDHDCSGEGHPTSRAGLAAISRAQAVASTSTVPSPSQTMPSCTSPSRATTRSPSWTAPPVIALQNGLSEDEALQRALEMSLAETKPQVPSCQEEEDLALAQALSASEAEYQRQQGPEPQLEAVQLQPVLGPWAWGGRFT

SEQ ID NO: 754998 - protein, 282 aa, Homo sapiens
AGWRGGSQTLPGLAMEFPDLGAHCSEPSCQRLDFLPLKCDACSGIFCADHVAYAQHHCGSAYQKDIQVPVCPLCNVPVPVARGEPPDRAVGEHIDRDCRSDPAQQKRKIFTNKCERAGCRQREMMKLTCERCSRNFCIKHRHPLDHDCSGEGHPTSRAGLAAISRAQAVASTSTVPSPSQTMPSCTSPSRATTRSPSWTAPPVIALQNGLSEDEALQRALEMSLAETKPQVPSCQEEEDLALAQALSASEAEYQRQQGPEPQLEAVQLQPVLGPWAWGGRFT

SEQ ID NO: 754999 - protein, 273 aa, Homo sapiens
GGEEFRTSALTVGAICHREGGRENFLPLKCDACSGIFCADHVAYAQHHCGSAYQKDIQVPVCPLCNVPVPVARGEPPDRAVGEHIDRDCRSDPAQQKRKIFTNKCERAGCRQREMMKLTCERCSRNFCIKHRHPLDHDCSGEGHPTSRAGLAAISRAQAVASTSTVPSPSQTMPSCTSPSRATTRSPSWTAPPVIALQNGLSEDEALQRALEMSLAETKPQVPSCQEEEDLALAQALSASEAEYQRQQGPEPQLEAVQLQPVLGPWAWGGRFT

SEQ ID NO: 755000 - protein, 224 aa, Homo sapiens
MEFPDLGAHCSEPSCQRLDFLPLKCDACSGIFCADHVAYAQHHCGSAYQKIFTNKCERAGCRQREMMKLTCERCSRNFCIKHRHPLDHDCSGEGHPTSRAGLAAISRAQAVASTSTVPSPSQTMPSCTSPSRATTRSPSWTAPPVIALQNGLSEDEALQRALEMSLAETKPQVPSCQEEEDLALAQALSASEAEYQRQQGPEPQLEAVQLQPVLGPWAWGGRFT

SEQ ID NO: 755001 - protein, 239 aa, Homo sapiens
AGWRGGSQTLPGLAMEFPDLGAHCSEPSCQRLDFLPLKCDACSGIFCADHVAYAQHHCGSAYQKDIQVPVCPLCNVPVPVARGEPPDRAVGEHIDRDCRSDPAQQKRKIFTNKCERAGCRQREMMKLTCERCSRNFCIKHRHPLDHDCSGEGHPTSRAGLAAISRAQAVASTSTVPSPSQTMPSCTSPSRATTRSPSWTAPPVIALQNGLVSWAEVGWTETNTQRVKSKDAGLLSPFVE

SEQ ID NO: 755002 - protein, 246 aa, Homo sapiens
REERAPGAGWRGGSQTLPGLAMEFPDLGAHCSEPSCQRLDFLPLKCDACSGIFCADHVAYAQHHCGSAYQKDIQVPVCPLCNVPVPVARGEPPDRAVGEHIDRDCRSDPAQQKRKIFTNKCERAGCRQREMMKLTCERCSRNFCIKHRHPLDHDCSGEGHPTSRAGLAAISRAQAVASTSTVPSPSQTMPSCTSPSRATTRSPSWTAPPVIALQNGLVSWAEVGWTETNTQRVKSKDAGLLSPFVE

SEQ ID NO: 755003 - protein, 224 aa, Homo sapiens
MEFPDLGAHCSEPSCQRLDFLPLKCDACSGIFCADHVAYAQHHCGSAYQKDIQVPVCPLCNVPVPVARGEPPDRAVGEHIDRDCRSDPAQQKRKIFTNKCERAGCRQREMMKLTCERCSRNFCIKHRHPLDHDCSGEGHPTSRAGLAAISRAQAVASTSTVPSPSQTMPSCTSPSRATTRSPSWTAPPVIALQNGLSEDEALQRALEMSLAETKPQVPRYLTLL

SEQ ID NO: 755004 - protein, 105 aa, Homo sapiens
SSLAGSPVSISMQSHNPISVLDSPSSDCFAEWPGELGRGWMDRNKHTESEVQGRWSSFSLCRVRMKLCSGPWKCPWQKPNPRFQGTLPSCERERKLWARAWSGGR

SEQ ID NO: 755005 - protein, 186 aa, Homo sapiens
SARRALGAAGAGAQTLPGLAMEFPDLGAHCSEPSCQRLDFLPLKCDACSGIFCADHVAYAQHHCGSAYQKDIQVPVCPLCNVPVPVARGEPPDRAVGEHIDRDCRSDPAQQKRKIFTNKCERAGCRQREMMKLTCERCSRNFCIKHRHPLDHDCSGEGHPTSRAGLAAISRAQAVEVALGASGRPC

SEQ ID NO: 755006 - protein, 94 aa, Homo sapiens
TVLVLKLGLLPPDNLEPGVWFLPGTFPGPAAELHPHSGHSAKQSLEGLSRTEMGCGGRPGSLWKALLVLQLHGRERLATVPWLGPQWMLARPYS

SEQ ID NO: 755007 - protein, 224 aa, Homo sapiens; identical to SEQ ID NO: 755003

SEQ ID NO: 755008 - protein, 288 aa, Homo sapiens
SARRALGAAGAGAQTLPGLAMEFPDLGAHCSEPSCQRLDFLPLKCDACSGIFCADHVAYAQHHCGSAYQKDIQVPVCPLCNVPVPVARGEPPDRAVGEHIDRDCRSDPAQQKRKIFTNKCERAGCRQREMMKLTCERCSRNFCIKHRHPLDHDCSGEGHPTSRAGLAAISRAQAVASTSTVPSPSQTMPSCTSPSRATTRSPSWTAPPVIALQNGLSEDEALQRALEMSLAETKPQVPSCQEEEDLALAQALSASEAEYQRQQGPEPQLEAVQLQPVLGPWAWGGRFT

SEQ ID NO: 755009 - protein, 225 aa, Homo sapiens
MEFPDLGAHCSEPSCQRLDFLPLKCDACSGIFCADHVAYAQHHCGSAYQKDIQVPVCPLCNVPVPVARGEPPDRAVGEHIDRDCRSDPAQQKRKIFTNKCERAGCRQREMMKLTCERCSRNFCIKHRHPLDHDCSGEGHPTSRAGLAAISRAQAVASTSTVPSPSQTMPSCTSPSRATTRSPSWTAPPVIALQNGLVSWAEVGWTETNTQRVKSKDAGLLSPFVE

SEQ ID NO: 755010 - protein, 196 aa, Homo sapiens
SARRALGAAGAGAQTLPGLAMEFPDLGAHCSEPSCQRLDFLPLKCDACSGIFCADHVAYAQHHCGSAYQKDIQVPVCPLCNVPVPVARGEPPDRAVGEHIDRDCRSDPAQQKRKIFTNKCERAGCRQREMMKLTCERCSRNFCIKHRHPLDHDCSGEGHPTSRAGLAAISRAQAVASTSTVPSPSQTMPSCTSPSR

SEQ ID NO: 755011 - protein, 222 aa, Homo sapiens
RTCESRWTCNPTNSLQNFLPLKCDACSGIFCADHVAYAQHHCGSAYQKDIQVPVCPLCNVPVPVARGEPPDRAVGEHIDRDCRSDPAQQKRKIFTNKCERAGCRQREMMKLTCERCSRNFCIKHRHPLDHDCSGEGHPTSRAGLAAISRAQAVASTSTVPSPSQTMPSCTSPSRATTRSPSWTAPPVIALQNGLSEDEALQRALEMSLAETKPQVPRYLTLL

SEQ ID NO: 755012 - protein, 233 aa, Homo sapiens
MEFPDLGAHCSEPSCQRLDFLPLKCDACSGIFCADHVAYAQHHCGSAYQKDIQVPVCPLCNVPVPVARGEPPDRAVGEHIDRDCRSDPAQQKRKIFTNKCERAGCRQREMMKLTCERCSRNFCIKHRHPLDHDCSGEGHPTSRAGLAAISRAQAVASTSTVPSPSQTMPSCTSPSRATTRSPSWTAPPVIALQNGLSEDEALQRALEMSLAETKPQVPRAQSRSSKPSNCSLC

SEQ ID NO: 755013 - protein, 152 aa, Homo sapiens
SARRALGAAGAGAQTLPGLAMEFPDLGAHCSEPSCQRLDFLPLKCDACSGIFCADHVAYAQHHCGSAYQKIFTNKCERAGCRQREMMKLTCERCSRNFCIKHRHPLDHDCSGEGHPTSRAGLAAISRAQAVASTSTVPSPSQTMPSCTSPSR

SEQ ID NO: 755014 - protein, 139 aa, Homo sapiens
MEFPDLGAHCSEPSCQRLDFLPLKCDACSGIFCADHVAYAQHHCGSAYQKDIQVPVCPLCNVPVPVARGEPPDRAVGEHIDRDCRSDPAQQKRKIFTNKCERAGCRQREMMKLTCERCSRNFCINHGPVDAGADAEVVD

SEQ ID NO: 755015 - protein, 124 aa, Homo sapiens
TVTAGHFSIKGKMATLLIVFSMSFYRNCTCTSAQCCSMLALSLNSDWCLAVGRSSCRGSLLWEKGKYVEEERDFNNGRRSLNGTLPPVMKLTLCDFQGKGYNAKTLQAMSNIYWCKCKFILYPY

SEQ ID NO: 755016 - protein, 170 aa, Homo sapiens
LNRTPPSTPDTMTHCCSPCCQPTCCRTTCWKPTTVTTCSSTPCCQPSCCVSSCCQPCCRPTCCQNTCCQPICVTSCCQPSCCSTPCCQPTCCGQTSCGSSCGQSSSCAPVYCRRTCYHPTTVCLPGCLNQSCGSSCCQPCCRPACCETTCCRTTCFQPTCVYSCCQPSCC

SEQ ID NO: 755017 - protein, 147 aa, Homo sapiens
RLSINSSHRSLAGGTRSSATAQISTMKLLTGLVFCSLVLSVSSRSFFSFLGEAFDGARDMWRAYSDMREANYIGSDKYFHARGNYDAAKRGPGGAWAAEVISNARENIQRLTGHGAEDSLADQAANKWGRSGRDPNHFRPAGLPEKY

SEQ ID NO: 755018 - protein, 147 aa, Homo sapiens; identical to SEQ ID NO: 755017

SEQ ID NO: 755019 - protein, 122 aa, Homo sapiens
MKLLTGLVFCSLVLSVSSRSFFSFLGEAFDGARDMWRAYSDMREANYIGSDKYFHARGNYDAAKRGPGGAWAAEVISNARENIQRLTGHGAEDSLADQAANKWGRSGRDPNHFRPAGLPEKY

SEQ ID NO: 755020 - protein, 138 aa, Homo sapiens
RLSINSSHRSLAGGTRSSATAQISTMKLLTGLVFCSLVLSVSSRSFFSFLGEAFDGARDMWRAYSDMREANYIGSDKYFHARGNYDAAKRGPGGAWAAEVIRLKCHGMIMAHCNLDLPGLKRSSHFSLLNNWDCRCAP

SEQ ID NO: 755021 - protein, 108 aa, Homo sapiens
RLSINSSHRSLAGGTRSSATAQISTMKLLTGLVFCSLVLSVSSRSFFSFLGEAFDGARDMWRAYSDMREANYIGSDKYFHARGNYDAAKRGPGGAWAAEVISLFSAEL

SEQ ID NO: 755022 - protein, 247 aa, Homo sapiens
RLSINSSHRSLAGGTRSSATAQISTMKLLTGLVFCSLVLSVSSRSFFSFLGEAFDGARDMWRAYSDMREANYIGSDKYFHARGNYDAAKRGPGGAWAAEVISTMRLFTGIVFCSLVMGVTSESWRSFFKEALQGVGDMGRAYWDIMISNHQNSNRYLYARGNYDAAQRGPGGVWAAKLISRSRVYLQGLIDYYLFGNSSTVSEDSKSNEKAEEWGRSGKEPGRFRTDRLPKKYLSFLVPLVSGNLGL

SEQ ID NO: 755023 - protein, 71 aa, Homo sapiens
HSPLRWCWSLYVLLMSLLPFLSFPGARDMWRAYSDMREANYIGSDKYFHARGNYDAAKRGPGGAWAAEVIR

SEQ ID NO: 755024 - protein, 862 aa, Homo sapiens
MNIQEQGFPLDLGASFTEDAPRPPVPGEEGELVSTDPRPASYSFCSGKGVGIKGETSTATPRRSDLDLGYEPEGSASPTPPYLKWAESLHSLLDDQDGISLFRTFLKQEGCADLLDFWFACTGFRKLEPCDSNEEKRLKLARAIYRKYILDNNGIVSRQTKPATKSFIKGCIMKQLIDPAMFDQAQTEIQATMEENTYPSFLKSDIYLEYTRTGSESPKVCSDQSSGSGTGKGISGYLPTLNEDEEWKCDQDMDEDDGRDAAPPGRLPQKLLLETAAPRVSSSRRYSEGREFRYGSWREPVNPYYVNAGYALAPATSANDSEQQSLSSDADTLSLTDSSVDGIPPYRIRKQHRREMQESVQVNGRVPLPHIPRTYRVPKEVRVEPQKFAEELIHRLEAVQRTREAEEKLEERLKRVRMEEEGEDGDPSSGPPGPCHKLPPAPAWHHFPPRCVDMGCAGLRDAHEENPESILDEHVQRVLRTPGRQSPGPGHRSPDSGHVAKMPVALGGAASGHGKHVPKSGAKLDAAGLHHHRHVHHHVHHSTARPKEQVEAEATRRAQSSFAWGLEPHSHGARSRGYSESVGAAPNASDGLAHSGKVGVACKRNAKKAESGKSASTEVPGASEDAEKNQKIMQWIIEGEKEISRHRRTGHGSSGTRKPQPHENSRPLSLEHPWAGPQLRTSVQPSHLFIQDPTMPPHPAPNPLTQLEEARRRLEEEEKRASRAPSKQRYVQEVMRRGRACVRPACAPVLHVVPAVSDMELSETETRSQRKVGGGSAQPCDSIVVAYYFCGEPIPYRTLVRGRAVTLGQFKELLTKKGSYRYYFKKVSDEFDCGVVFEEVREDEAVLPVFEEKIIGKVEKVD

SEQ ID NO: 755025 - protein, 845 aa, Homo sapiens
MNIQEQGFPLDLGASFTEDAPRPPVPGEEGELVSTDPRPASYSFCSGKGVGIKGETSTATPRRSDLDLGYEPEGSASPTPPYLKWAESLHSLLDDQDGISLFRTFLKQEGCADLLDFWFACTGFRKLEPCDSNEEKRLKLARAIYRKYILDNNGIVSRQTKPATKSFIKGCIMKQLIDPAMFDQAQTEIQATMEENTYPSFLKSDIYLEYTRTGSESPKVCSDQSSGSGTGKGISGYLPTLNEDEEWKCDQDMDEDDGRDAAPPGRLPQKLLLETAAPRVSSSRRYSEGREFRYGSWREPVNPYYVNAGYALAPATSANDSEQQSLSSDADTLSLTDSSVDGIPPYRIRKQHRREMQESVQVNGRVPLPHIPRTYRVPKEVRVEPQKFAEELIHRLEAVQRTREAEEKLEERLKRVRMEEEGEDGDPSSGPPGPCHKLPPAPAWHHFPPRCVDMGCAGLRDAHEENPESILDEHVQRVLRTPGRQSPGPGHRSPDSGHVAKMPVALGGAASGHGKHVPKSGAKLDAAGLHHHRHVHHHVHHSTARPKEQVEAEATRRAQSSFAWGLEPHSHGARSRGYSESVGAAPNASDGLAHSGKVGVACKRNAKKAESGKSASTEVPGASEDAEKNQKIMQWIIEGEKEISRHRRTGHGSSGTRKPQPHENSRPLSLEHPWAGPQLRTSVQPSHLFIQDPTMPPHPAPNPLTQLEEARRRLEEEEKRASRAPSKQRTRSQRKVGGGSAQPCDSIVVAYYFCGEPIPYRTLVRGRAVTLGQFKELLTKKGSYRPPSHLRCCLLTALLTSVCRYYFKKVSDEFDCGVVFEEVREDEAVLPVFEEKIIGKVEKVD

SEQ ID NO: 755026 - protein, 790 aa, Homo sapiens
MNIQEQGFPLDLGASFTEDAPRPPVPGEEGELVSTDPRPASYSFCSGKGVGIKGETSTATPRRSDLDLGYEPEGSASPTPPYLKWAESLHSLLDDQDGISLFRTFLKQEGCADLLDFWFACTGFRKLEPCDSNEEKRLKLARAIYRKYILDNNGIVSRQTKPATKSFIKGCIMKQLIDPAMFDQAQTEIQATMEENTYPSFLKSDIYLEYTRTGSESPKVCSDQSSGSGTGKGISGYLPTLNEDEEWKCDQDMDEDDGRDAAPPGRLPQKLLLETAAPRVSSSRRYSEGREFRYGSWREPVNPYYVNAGYALAPATSANDSEQQSLSSDADTLSLTDSSVDGIPPYRIRKQHRREMQESVQVNGRVPLPHIPRTYRVPKEVRVEPQKFAEELIHRLEAVQRTREAEEKLEERLKRVRMEEEGEDGDPSSGPPGPCHKLPPAPAWHHFPPRCVDMGCAGLRDAHEENPESILDEHVQRVLRTPGRQSPGPGHRSPDSGHVAKMPVALGGAASGHGKHVPKSGAKLDAAGLHHHRHVHHHVHHSTARPKEQVEAEATRRAQSSFAWGLEPHSHGARSRGYSESVGAAPNASDGLAHSGKVGVACKRNAKKAESGKSASTEVPGASEDAEKNQKIMQWIIEGEKEISRHRRTGHGSSGTRKPQPHENSRPLSLEHPWAGPQLRTSVQPSHLFIQDPTMPPHPAPNPLTQLEEARRRLEEEEKRASRAPSKQRTRSQRKVGGGSAQPCDSIVVAYYFCGEPIPYRTLVRGRAVTLGQFKELPPAAGCAVLGPPF

SEQ ID NO: 755027 - protein, 719 aa, Homo sapiens
MNIQEQGFPLDLGASFTEDAPRPPVPGEEGELVSTDPRPASYSFCSGKGVGIKGETSTATPRRSDLDLGYEPEGSASPTPPYLKWAESLHSLLDDQDGISLFRTFLKQEGCADLLDFWFACTGFRKLEPCDSNEEKRLKLARAIYRKYILDNNGIVSRQTKPATKSFIKGCIMKQLIDPAMFDQAQTEIQATMEENTYPSFLKSDIYLEYTRTGSESPKVCSDQSSGSGTGKGISGYLPTLNEDEEWKCDQDMDEDDGRDAAPPGRLPQKLLLETAAPRVSSSRRYSEGREFRYGSWREPVNPYYVNAGYALAPATSANDSEQQSLSSDADTLSLTDSSVDGIPPYRIRKQHRREMQESVQVNGRVPLPHIPRTYRVPKEVRVEPQKFAEELIHRLEAVQRTREAEEKLEERLKRVRMEEEGEDGDPSSGPPGPCHKLPPAPAWHHFPPRCVDMGCAGLRDAHEENPESILDEHVQRVLRTPGRQSPGPGHRSPDSGHVAKMPVALGGAASGHGKHVPKSGAKLDAAGLHHHRHVHHHVHHSTARPKEQVEAEATRRAQSSFAWGLEPHSHGARSRGYSESVGAAPNASDGLAHSGKVGVACKRNAKKAESGKSASTEVPGASEDAEKNQKIMQWIIEGEKEISRHRRTGHGSSGTRKPQPHENSRPLSLEHPWAGPQLRTSVQPSHLFIQDPTMPPHPAPNPLTQLMIAAGILRVTVN

SEQ ID NO: 755028 - protein, 826 aa, Homo sapiens
MNIQEQGFPLDLGASFTEDAPRPPVPGEEGELVSTDPRPASYSFCSGKGVGIKGETSTATPRRSDLDLGYEPEGSASPTPPYLKWAESLHSLLDDQDGISLFRTFLKQEGCADLLDFWFACTGFRKLEPCDSNEEKRLKLARAIYRKYILDNNGIVSRQTKPATKSFIKGCIMKQLIDPAMFDQAQTEIQATMEENTYPSFLKSDIYLEYTRTGSESPKVCSDQSSGSGTGKGISGYLPTLNEDEEWKCDQDMDEDDGRDAAPPGRLPQKLLLETAAPRVSSSRRYSEGREFRYGSWREPVNPYYVNAGYALAPATSANDSEQQSLSSDADTLSLTDSSVDGIPPYRIRKQHRREMQESVQVNGRVPLPHIPRTYRVPKEVRVEPQKFAEELIHRLEAVQRTREAEEKLEERLKRVRMEEEGEDGDPSSGPPGPCHKLPPAPAWHHFPPRCVDMGCAGLRDAHEENPESILDEHVQRVLRTPGRQSPGPGHRSPDSGHVAKMPVALGGAASGHGKHVPKSGAKLDAAGLHHHRHVHHHVHHSTARPKEQVEAEATRRAQSSFAWGLEPHSHGARSRGYSESVGAAPNASDGLAHSGKVGVACKRNAKKAESGKSASTEVPGASEDAEKNQKIMQWIIEGEKEISRHRRTGHGSSGTRKPQPHENSRPLSLEHPWAGPQLRTSVQPSHLFIQDPTMPPHPAPNPLTQLEEARRRLEEEEKRASRAPSKQRTRSQRKVGGGSAQPCDSIVVAYYFCGEPIPYRTLVRGRAVTLGQFKELLTKKGSYRYYFKKVSDEFDCGVVFEEVREDEAVLPVFEEKIIGKVEKVD

SEQ ID NO: 755029 - protein, 640 aa, Homo sapiens
MYRDRGMLGRGTRPLTCTLSCISLRLLLTDPVWGDPIQSSGSGTGKGISGYLPTLNEDEEWKCDQDMDEDDGRDAAPPGRLPQKLLLETAAPRVSSSRRYSEGREFRYGSWREPVNPYYVNAGYALAPATSANDSEQQSLSSDADTLSLTDSSVDGIPPYRIRKQHRREMQESVQVNGRVPLPHIPRTYRVPKEVRVEPQKFAEELIHRLEAVQRTREAEEKLEERLKRVRMEEEGEDGDPSSGPPGPCHKLPPAPAWHHFPPRCVDMGCAGLRDAHEENPESILDEHVQRVLRTPGRQSPGPGHRSPDSGHVAKMPVALGGAASGHGKHVPKSGAKLDAAGLHHHRHVHHHVHHSTARPKEQVEAEATRRAQSSFAWGLEPHSHGARSRGYSESVGAAPNASDGLAHSGKVGVACKRNAKKAESGKSASTEVPGASEDAEKNQKIMQWIIEGEKEISRHRRTGHGSSGTRKPQPHENSRPLSLEHPWAGPQLRTSVQPSHLFIQDPTMPPHPAPNPLTQLEEARRRLEEEEKRASRAPSKQRTRSQRKVGGGSAQPCDSIVVAYYFCGEPIPYRTLVRGRAVTLGQFKELLTKKGSYRYYFKKVSDEFDCGVVFEEVREDEAVLPVFEEKIIGKVEKVD

SEQ ID NO: 755030 - protein, 458 aa, Homo sapiens
ILQDLVTFDDVAWYLTTREWFKLDPEQRALEYYGNVTSVGVPVLNPALVPHLAQGQVLLVSDPSPNTDPAKYSESTSATRHQMKGEDAQPQEMASTSFPRASGPSPEFRQHGDSDGKRGSPQNLPIEHHFACKECWGYLRLKVLLVQHQRVHSEEKGWECGDCGKVFRGVAEFNEHRKSHVAAEPQPGPSRALENAAEKREQMEREAKPFECEECGKRFKKNAGLSQHLRVHSREKPFDCEECGRSFKVNTHLFRHQKLHTSEKPFACKACSRDFLDRQELLKHQRMHTGHLPFDCDDCGKSFRGVNGLAEHQRIHSGAKPYGCPHCGKLFRRSSELTKHRRIHTGEKPYACGQCGKAFRQSSSLLEHARIHSGERPYACGECGKAFRGPSDLIKHRRIHSGLKPYECDKCGKAFRRSSGLSRHRRIHSGARRCECSQCGRVFKRRSALQKHQPTHHE

SEQ ID NO: 755031 - protein, 256 aa, Homo sapiens
MEREAKPFECEECGKRFKKNAGLSQHLRVHSREKPFDCEECGRSFKVNTHLFRHQKLHTSEKPFACKACSRDFLDRQELLKHQRMHTGHLPFDCDDCGKSFRGVNGLAEHQRIHSGAKPYGCPHCGKLFRRSSELTKHRRIHTGEKPYACGQCGKAFRQSSSLLEHARIHSGERPYACGECGKAFRGPSDLIKHRRIHSGLKPYECDKCGKAFRRSSGLSRHRRIHSGARRCECSQCGRVFKRRSALQKHQPTHHE

SEQ ID NO: 755032 - protein, 71 aa, Homo sapiens
  misc_feature (34)..(34): Xaa can be any naturally occurring amino acid
  misc_feature (43)..(43): Xaa can be any naturally occurring amino acid
SRAGQLAGRFGCCAGDMGGKSHEDTYMAAFNSTXRIREDNIKXKVNYRCLPISRKDAKVILTQRSNDVATS

SEQ ID NO: 755033 - protein, 190 aa, Homo sapiens
WDGWARTPRMEPMEALNTAQALRDFIYSLHSTERSCLLKELHRFESIAIAQEKLEAPPPTPGQLRYVFIHNAIPFIGFGFLDNAIMIVAGTHIEMSIGIILGISTMAAAALGNLVSDLAGLGLAGYVEALASRLGLSIPDLTPKQVDMWQTRLSTHLGKAVGVTIGCILGMFPLIFFGGGEEDEKLETKS

SEQ ID NO: 755034 - protein, 190 aa, Homo sapiens; identical to SEQ ID NO: 755033

SEQ ID NO: 755035 - protein, 299 aa, Homo sapiens
PGLLYLSSHGLWLITIAKCGILCIRDVYTLETFAWCRSHSHQGHGIQSMRISMDGQNILVNGRDDGTLVYLKWKRFGGHLASEILDYYQKLLISLSSAMDKENHYLSTTPKVSVDLGSDSEHTKQKASTDLSQDELVLTDVKKEIPWIQQKSQEAIKKEVNLFSKKRKEIKQGIKSLSKTILNMMEENDKLENIAKLDQQEFGLDLEELERLHDESQEEVAKMIKDVEMHNLAKSYLAELIKEECWNSMAVKGRALKCFHIPCVVENFPMKARTVEELKELERVLQQKKIEAECLKVLF

SEQ ID NO: 755036 - protein, 336 aa, Homo sapiens
PGLLYLSSHGLWLITIAKCGILCIRDVYTLETFAWCRSHSHQGHGIQSMRISMDGQNILVNGRDDGTLVYLKWKRFGGHLASEILDYYQKLLISLSSAMDKENHYLSTTPKVSVDLGSDSEHTKQKASTDLSQDELVLTDVKKEIPWIQQKSQEAIKKEVNLFSKKRKEIKQGIKSLSKTILNMMEENDKLENIAKLDQQEFGLDLEELERLHDESQEEVAKMIKDVEMHNLAKSYLAELIKEECWNSMAVKGRALKCFHIPCVVENFPMKARTVEELKELERVLQQKKIEAECLKLRKEIVEAQSGVKLIKQRHEEDDEEEEEEDKTVKYSNLPN

SEQ ID NO: 755037 - protein, 188 aa, Homo sapiens
ILVLFQAIKKEVNLFSKKRKEIKQGIKSLSKTILNMMEENDKLENIAKLDQQEFGLDLEELERLHDESQEEVAKMIKDVEMHNLAKSYLAELIKEECWNSMAVKGRALKCFHIPCVVENFPMKARTVEELKELERVLQQKKIEAECLKLRKEIVEAQSGVKLIKQRHEEDDEEEEEEDKTVKYSNLPN

SEQ ID NO: 755038 - protein, 164 aa, Homo sapiens
PGLLYLSSHGLWLITIAKCGILCIRDVYTLETFAWCRSHSHQGHGIQSMRISMDGQNILVNGRDDGTLVYLKWKRFGGHLASEILDYYQKLLISLSSAMDKENHYLSTTPKVSVDLGSDSEHTKQKASTDLSQDELVLTDVKKEIPWIQQKSQEVFVKHGVGLK

SEQ ID NO: 755039 - protein, 117 aa, Homo sapiens
MLRYNQVNCKVIYTCIKVQLRKDCLDCVYLALRRRESQGQSSHSQELYLVGFMKGFLVTQSRYIISKMWSAVQMSAHARDWLGASYQFFHPVPGSYLLPLGLAQPRVWLRLPRVWPL

SEQ ID NO: 755040 - protein, 381 aa, Homo sapiens
MREKVPLASQYDELPHYPGIVDGPAALASFPETVPAVPGPYGPHRPPQPLPPGLDSDGLKREKDEIYGHPLFPLLALVFEKCELATCSPRDGAGAGLGTPPGGDVCSSDSFNEDIAAFAKQVRSERPLFSSNPELDNLMIQAIQVLRFHLLELEKVHDLCDNFCHRYITCLKGKMPIDLVIEDRDGGCREDFEDYPASCPSLPDQNNMWIRDHEDSGSVHLGTPGPSSGGLASQSGDNSSDQGDGLDTSVASPSSGGEDEDLDQERRRNKKRGIFPKVATNIMRAWLFQHLSHPYPSEEQKKQLAQDTGLTILQVNNWFINARRRIVQPMIDQSNRTGQGAAFSPEGQPIGGYTETQPHVAVRPPGSVGMSLNLEGEWHYL

SEQ ID NO: 755041 - protein, 279 aa, Homo sapiens
MIQAIQVLRFHLLELEKVHDLCDNFCHRYITCLKGKMPIDLVIEDRDGGCREDFEDYPASCPSLPDQNNMWIRDHEDSGSVHLGTPGPSSGGLASQSGDNSSDQGDGLDTSVASPSSGGEDEDLDQERRRNKKRGIFPKVATNIMRAWLFQHLSHPYPSEEQKKQLAQDTGLTILQVNNWFLTARRRIVPAYDRTIPPTTAVAAFAQKGRPTGVPNGTHWPRARERRTRPDGQGTHSAAGPPVGQKRLAGPKPRPETTREGHHTTLTGDPAKYTPIKTQ

SEQ ID NO: 755042 - protein, 91 aa, Homo sapiens
RPVRHEKIWHHTFYNELRVPRRSTHVLLTEAPLNPKATQMDIEPNSPRYCPANSDITTLGPGLTTVPSCTHVTLATSQSGCSRDHTHTPLT

SEQ ID NO: 755043 - protein, 375 aa, Homo sapiens
MARRYDELPHYPGIVDGPAALASFPETVPAVPGPYGPHRPPQPLPPGLDSDGLKREKDEIYGHPLFPLLALVFEKCELATCSPRDGAGAGLGTPPGGDVCSSDSFNEDIAAFAKQVRSERPLFSSNPELDNLMIQAIQVLRFHLLELEKVHDLCDNFCHRYITCLKGKMPIDLVIEDRDGGCREDFEDYPASCPSLPDQNNMWIRDHEDSGSVHLGTPGPSSGGLASQSGDNSSDQGDGLDTSVASPSSGGEDEDLDQERRRNKKRGIFPKVATNIMRAWLFQHLSHPYPSEEQKKQLAQDTGLTILQVNNWFINARRRIVQPMIDQSNRTGQGAAFSPEGQPIGGYTETQPHVAVRPPGSVGMSLNLEGEWHYL

SEQ ID NO: 755044 - protein, 358 aa, Homo sapiens
MARRYDELPHYPGIVDGPAALASFPETVPAVPGPYGPHRPPQPLPPGLDSDGLKREKDEIYGHPLFPLLALVFEKCELATCSPRDGAGAGLGTPPGGDVCSSDSFNEDIAAFAKQVRSERPLFSSNPELDNLMIQAIQVLRFHLLELEKGKMPIDLVIEDRDGGCREDFEDYPASCPSLPDQNNMWIRDHEDSGSVHLGTPGPSSGGLASQSGDNSSDQGDGLDTSVASPSSGGEDEDLDQERRRNKKRGIFPKVATNIMRAWLFQHLSHPYPSEEQKKQLAQDTGLTILQVNNWFINARRRIVQPMIDQSNRTGQGAAFSPEGQPIGGYTETQPHVAVRPPGSVGMSLNLEGEWHYL

SEQ ID NO: 755045 - protein, 444 aa, Homo sapiens
MARRYDELPHYPGIVDGPAALASFPETVPAVPGPYGPHRPPQPLPPGLDSDGLKREKDEIYGHPLFPLLALVFEKCELATCSPRDGAGAGLGTPPGGDVCSSDSFNEDIAAFAKQVRSERPLFSSNPELDNLMIQAIQVLRFHLLELEKVHDLCDNFCHRYITCLKGKMPIDLVIEDRDGGCREDFEDYPASCPSLPDQNNMWIRDHEDSGSVHLGTPGPSSGGLASQSGDNSSDQGDGLDTSVASPSSGGEDEDLDQERRRNKKRGIFPKVATNIMRAWLFQHLSAGAGRHVIAPSLRLPWSPSWGAQRRSEAPVLPDVCLGLGSPSPGPRWARPWGSDCGRPGRQSDSCWWLQHPYPSEEQKKQLAQDTGLTILQVNNWFINARRRIVQPMIDQSNRTGQGAAFSPEGQPIGGYTETQPHVAVRPPGSVGMSLNLEGEWHYL

SEQ ID NO: 755046 - protein, 375 aa, Homo sapiens; identical to SEQ ID NO: 755043

SEQ ID NO: 755047 - protein, 411 aa, Homo sapiens
MARRYDELPHYPGIVDGPAALASFPETVPAVPGPYGPHRPPQPLPPGLDSDGLKREKDEIYGHPLFPLLALVFEKCELATCSPRDGAGAGLGTPPGGDVCSSDSFNEDIAAFAKQVRSERPLFSSNPELDNLMIQAIQVLRFHLLELEKVHDLCDNFCHRYITCLKGKMPIDLVIEDRDGGCREDFEDYPASCPSLPDQNNMWIRDHEDSGSVHLGTPGPSSGGLASQSGDNSSDQGDGLDTSVASPSSGGEDEDLDQERRRNKKRGIFPKVATNIMRAWLFQHLSHPYPSEEQKKQLAQDTGLTILQVNNWFLTARRRIVPAYDRTIPPTTAVAAFAQKGRPTGVPNGTHWPRARERRTRPDGQGTHSAAGPPVGQKRLAGPKPRPETTREGHHTTLTGDPAKYTPIKTQ

SEQ ID NO: 755048 - protein, 333 aa, Homo sapiens
MARRYDELPHYPGIVDGPAALASFPETVPAVPGPYGPHRPPQPLPPGLDSDGLKREKDEIYGHPLFPLLALVFEKCELATCSPRDGAGAGLGTPPGGDVCSSDSFNEDIAAFAKQVRSERPLFSSNPELDNLMIQAIQVLRFHLLELEKVHDLCDNFCHRYITCLKGKMPIDLVIEDRDGGCREDFEDYPASCPSLPDQVGPGRAPGIVLQPQLCLDIRMRAHVHYTASDEATVSLITGHAYAHSHTPTTQQLRRLGCGWATVHRHTHTSGCRCHPQIQLHPHRSTYSHTNSATAISAHSQTVASTGYSHTPPSPAIRQQHRTHSRVPHAVLN

SEQ ID NO: 755049 - protein, 108 aa, Homo sapiens
PLYPPLSALPHPQSLSSVPGLPPPSQPPAPHRPPFFLLSSVLPFALLLFQAAPASPGLGVGQGWERWSHQAAGPTEPVSLGMGTGIEDRGGGARPFWGFRVGCEDRFW

SEQ ID NO: 755050 - protein, 104 aa, Homo sapiens
GWGQELAEGGWREKRALERALRGLALALSLWSGGLATAACKKGGESRAGGFVSGRGSADTAQNGGGKGVSAQLAWVERTAIGWRRLERAASPSLRLSQRPPLVP

SEQ ID NO: 755051 - protein, 402 aa, Homo sapiens
MGVSKLDILYRRLLLTKLFIRGWGRPEDLKRLFEFRKMIGNRERCQNLVSSDYPVHIDKIEEQSDCKILDGHFVSPMAHYVPDIMPIESVIARFQFIVPKEWNSKYRPVCIHLAGTGDHHYWRRRTLMARPMIKEARMASLLLENPYYGLQETQGPSMASLAVSNWPKPMPLIPCLSWSTASGVFTTGVLSKSINWRELEKQYYTQTVYEEEIIHMLEYCGTDSFKMGQEFVKHFTSSADKLTNLNLVSRTLNLDISNQVVSQKPADCHNSSKTSVSATSEGLLLQDTSKMKRFNQTLSTNKSGYTSRNPQSYHLLSKEQSRNSLRKESLIFMKGVMDECTHVANFSVPVDPSLIIVVQAKEDAYIPRTGVRSLQEIWPGCEIRYLEGGHISAYLFKQGLFR

SEQ ID NO: 755052 - protein, 135 aa, Homo sapiens
MGQEFVKHFTSSADKLTNLNLVSRTLNLDISNQVVSQKPADCHNSSKTSVSATSEGLLLQDTSKMKRFNQTLSTNKSGYTSRNPQSYHLLSKEQSRNSLRKESLIFMKGVMDECTHVANFSGTNFYMKLRIFADV

SEQ ID NO: 755053 - protein, 444 aa, Homo sapiens
MGVSKLDILYRRLLLTKLFIRGWGRPEDLKRLFEFRKMIGNRERCQNLVSSDYPVHIDKIMDEMLDTNLILLPWFQFIVPKEWNSKYRPVCIHLAGTGDHHYWRRRTLMARPMIKEARMASLLLENPYYGAETQDSRRSSLKNVSDLFVMGGALVLESAALLHWLEREGYGPLGMTGISMGGHMASLAVSNWPKPMPLIPCLSWSTASGVFTTGVLSKSINWRELEKQYYTQTVYEEEIIHMLEYCGTDSFKMGQEFVKHFTSSADKLTNLNLVSRTLNLDISNQVVSQKPADCHNSSKTSVSATSEGLLLQDTSKMKRFNQTLSTNKSGYTSRNPQSYHLLSKEQSRNSLRKESLIFMKGVMDECTHVANFSVPVDPSLIIVVQAKEDAYIPRTGVRSLQEIWPGCEIRYLEGGHISAYLFKQGLFRQAIYDAFDRFLHKYAN

SEQ ID NO: 755054 - protein, 337 aa, Homo sapiens
MARPMIKEARMASLLLENPYYGCRKPKDQVRSSLKNVSDLFVMGGALVLESAALLHWLEREGYGPLGMTGISMGGHMASLAVSNWPKPMPLIPCLSWSTASGVFTTGVLSKSINWRELEKQYYTQTVYEEEIIHMLEYCGTDSFKMGQEFVKHFTSSADKLTNLNLVSRTLNLDISNQVVSQKPADCHNSSKTSVSATSEGLLLQDTSKMKRFNQTLSTNKSGYTSRNPQSYHLLSKEQSRNSLRKESLIFMKGVMDECTHVANFSVPVDPSLIIVVQAKEDAYIPRTGVRSLQEIWPGCEIRYLEGGHISAYLFKQGLFRQAIYDAFDRFLHKYAN

SEQ ID NO: 755055 - protein, 280 aa, Homo sapiens [sequence omitted]

SEQ ID NO: 755056 - protein, 147 aa, Homo sapiens
GGVTRKAGQRRAKGGCVLSLLPRHAPPILTGTESPGELGACPNCRAALLRVCLPPSVSPSAVSSISVPGKVTGAAIGAGTKVESWKGSLESGGAGRPGQLDRRLPPGGQCLFATDGCEQVRYSIPETSPNKTFYQRMGKARRSQKTL

SEQ ID NO: 755057 - protein, 337 aa, Homo sapiens; identical to SEQ ID NO: 755054

SEQ ID NO: 755058 - protein, 321 aa, Homo sapiens
MARPMIKEARMASLLLENPYYGCRKPKDQVRSSLKNVSDLFVMGGALVLESAALLHWLEREGYGPLGMTGISMGGHMASLAVSNWPKPMPLIPCLSWSTASGVFTTGVLSKSINWRELEKQYYTQTVYEEEIIHMLEYCGTDSFKMGQEFVKHFTSSADKLTNLNLVSRTLNLDISNQVVSQKPADCHNSSKTSVSATSEGLLLQDTSKMKRFNQTLSTNKSGYTSRNPQSYHLLSKEQSRNSLRKESLIFMKGVMDECTHVANFSVPVDPSLIIVVQAKEDAYIPRTGVRSLQEIWPGCEIRYLEGGHISAYLFKQGLFR

SEQ ID NO: 755059 - protein, 322 aa, Homo sapiens
MGVSKLDILYRRLLLTKLFIRGWGRPEDLKRLFEFRKMIGNRERCQNLVSSDYPVHIDKIEEQSDCKILDGHFVSPMAHYVPDIMPIESVIARFQFIVPKEWNSKYRPVCIHLAGTGDHHYWRRRTLMARPMIKEARMASLLLENPYYGCRKPKDQVVSPVGQAGLELPTSGDPPASAPQSAGITGSIHRAQLKNFHFGTKPRIQKRSSLKNVSDLFVMGGALVLESAALLHWLEREGYGPLGMTGISMGGHMASLAVSNWPKPMPLIPCLSWSTASGVFTTGVLSKSINWRELEKQYYTQTVYEEEIIHMLEYCGVSISLS

SEQ ID NO: 755060 - protein, 105 aa, Homo sapiens
SSLGRRSEMMKGTSSFGKHCNKTYTLCHHCGSKAYHLQKSTYGKCGYTAKRKRKYNWSTKAKRRNTTRTGQMRHLKIVYHRFRHGFREGTTPKPKRAAVAASSSS

SEQ ID NO: 755061 - protein, 117 aa, Homo sapiens
MEFSSPSREECPKPSGRVSIMAGSSQDCFYFRQCRGHQMSAFSRYKSRSSGHWMELSTGPYRLIAPAQESDITSSGYPWASCDFFHPHLTPMADTPDDFPVCTISASQRKIPSSRYP

SEQ ID NO: 755062 - protein, 116 aa, Homo sapiens
EDLFFEAYFSSCFVPLFIWVEHVRELLSCVPVLLSPGSLCQWAVAFKGLTAGLEAPIPALFPPASSSGFLLPLQSWKGSLISWLFLLMILVCLLPVQHQHGLLGLPVSLPLAFCLG

SEQ ID NO: 755063 - protein, 113 aa, Homo sapiens
METLSFPRYNVAEIVIHIRNKILTGADGKNLTKNDLYPNPKPEVLHMIYMRALQIVYGIRLEHFYMMPVNSEVMYPHLMEGFLPFSNLVTHLWSKERFYCLRLHSYLYYIKFS

SEQ ID NO: 755064 - protein, 464 aa, Homo sapiens
METLSFPRYNVAEIVIHIRNKILTGADGKNLTKNDLYPNPKPEVLHMIYMRALQIVYGIRLEHFYMMPVNSEVMYPHLMEGFLPFSNLVTHLDSFLPICRVNDFETADILCPKAKRTSRFLSGIINFIHFREACRETYMEFLWQYKSSADKMQQLNAAHQEALMKLERLDSVPVEEQEEFKQLSDGIQELQQSLNQDFHQKTIVLQEGNSQKKSNISEKTKRLNELKLSVVSLKEIQESLKTKIVDSPEKLKNYKEKMKDTVQKLKNARQEVVEKYEIYGDSVDCLPSCQLEVQLYQKKIQDLSDNREKLASILKESLNLEDQIESDESELKKLKTEENSFKRLMIVKKEKLATAQFKINKKHEDVKQYKRTVIEDCNKVQEKRGAVYERVTTINQEIQKIKLGIQQLKDAAEREKLKSQEIFLNLKTALEKYHDGIEKAAEDSYAKIDEKTAELKRKMFKMST

SEQ ID NO: 755065 - protein, 464 aa, Homo sapiens; identical to SEQ ID NO: 755064

SEQ ID NO: 755066 - protein, 464 aa, Homo sapiens; identical to SEQ ID NO: 755064

SEQ ID NO: 755067 - protein, 464 aa, Homo sapiens; identical to SEQ ID NO: 755064

SEQ ID NO: 755068 - protein, 326 aa, Homo sapiens
MEFLWQYKSSADKMQQLNAAHQEALMKLERLDSVPVEEQEEFKQLSDGIQELQQSLNQDFHQKTIVLQEGNSQKKSNISEKTKRLNELKLSVVSLKEIQESLKTKIVDSPEKLKNYKEKMKDTVQKLKNARQEVVEKYEIYGDSVDCLPSCQLEVQLYQKKIQDLSDNREKLASILKESLNLEDQIESDESELKKLKTEENSFKRLMIVKKEKLATAQFKINKKHEDVKQYKRTVIEDCNKVQEKRGAVYERVTTINQEIQKIKLGIQQLKDAAEREKLKSQEIFLNLKTALEKYHDGIEKAAEDSYAKIDEKTAELKRKMFKMST

SEQ ID NO: 755069 - protein, 207 aa, Homo sapiens [sequence omitted]

SEQ ID NO: 755070 - protein, 328 aa, Homo sapiens
METLSFPRYNVAEIVIHIRNKILTGADGKNLTKNDLYPNPKPEVLHMIYMRALQIVYGIRLEHFYMMPVNSEVMYPHLMEGFLPFSNLVTHLDSFLPICRVNDFETADILCPKAKRTSRFLSGIINFIHFREACRETYMEFLWQYKSSADKMQQLNAAHQEALMKLERLDSVPVEEQEEFKQLSDGIQELQQSLNQDFHQKTIVLQEGNSQKKSNISEKTKRLNELKLSVVSLKEIQESLKTKIVDSPEKLKNYKEKMKDTVQKLKNARQEVVEKYEIYGDSVDCLPSCQLEVQLYQKKIQDLSDNREKLASILKEVCIVWNFDVFII

SEQ ID NO: 755071 - protein, 124 aa, Homo sapiens
VQWHNHIPLQLLNLLGTSDSPTSFLSSWDYRSVNHLAELIFFFFLAVVMASHFVAQAGLKLLASNNLLACASQSSLDYRCEPLHLAFSFSSLLLVLHIPAALISLNSVLYFPSLSILSLYTFFP

SEQ ID NO: 755072 - protein, 93 aa, Homo sapiens
GRGSPLRPQPAQRGAPTVQLRAEGLLKRGQSGLRPRRRREPARGCQQAVTSQKYRKNINNVRSYKLRRPEVRKQGVCRTNLSSGCSRRSQLPC

SEQ ID NO: 755073 - protein, 93 aa, Homo sapiens; identical to SEQ ID NO: 755072

SEQ ID NO: 755074 - protein, 109 aa, Homo sapiens
TTHTNPLLDFGFRKHRCDPGLLKRQLHSPGNTPLSQTWLKTRSSLASSGRMDLLTFINSSHCQGQQHLRYSFLGVPAFLPPGGYFLSWASWPLSSLLHIAVLRAFAAAT

SEQ ID NO: 755075 - protein, 414 aa, Homo sapiens [sequence omitted]

SEQ ID NO: 755076 - protein, 414 aa, Homo sapiens [sequence omitted]

SEQ ID NO: 755077 - protein, 414 aa, Homo sapiens [sequence omitted]

SEQ ID NO: 755078 - protein, 414 aa, Homo sapiens [sequence omitted]

SEQ ID NO: 755079 - protein, 122 aa, Homo sapiens
HKAGRGRVVNRHRGFFSPLNPVRVHIEIGPDGRVTGEADVEFATHEEAVAAMSKDRANMQHRYIELFLNSTTGASNGAYSSQVMQGMGVSAAQATYSGLESQSVSGCYGAGYSGQNSMGGYD

SEQ ID NO: 755080 - protein, 146 aa, Homo sapiens
MLGPEGGEGFVVKLRGLPWSCSVEDVQNFLSDCTIHDGAAGVHFIYTREGRQSGEAFVELGSEDDVKMALKKDRESMGHRYIEVFKSHRTEMDWVLKHSGPNSADSANDGFVRLRGLPFGCTKAWPRFLGGKGAPGYMAVGPSKYS

SEQ ID NO: 755081 - protein, 128 aa, Homo sapiens
PAAPLAPPPARKLPPEPAQALGPTFLPGRAVRGCWSAVSRPRERRRHLVSGPRRCFPPKHVYRAPGPPTLRKGPHHHLDFCCRLRTKTCTWSFPGALCVVELRWNFGALGCQPRLPGSNRNQSCSPPW

SEQ ID NO: 755082 - protein, 414 aa, Homo sapiens [sequence omitted]

SEQ ID NO: 755083 - protein, 414 aa, Homo sapiens [sequence omitted]

SEQ ID NO: 755084 - protein, 414 aa, Homo sapiens [sequence omitted]

SEQ ID NO: 755085 - protein, 414 aa, Homo sapiens [sequence omitted]

SEQ ID NO: 755086 - protein, 414 aa, Homo sapiens [sequence omitted]

SEQ ID NO: 755087 - protein, 414 aa, Homo sapiens [sequence omitted]

SEQ ID NO: 755088 - protein, 414 aa, Homo sapiens [sequence omitted]

SEQ ID NO: 755089 - protein, 414 aa, Homo sapiens [sequence omitted]

SEQ ID NO: 755090 - protein, 414 aa, Homo sapiens [sequence omitted]

SEQ ID NO: 755091 - protein, 414 aa, Homo sapiens [sequence omitted]

SEQ ID NO: 755092 - protein, 414 aa, Homo sapiens [sequence omitted]

SEQ ID NO: 755093 - protein, 414 aa, Homo sapiens [sequence omitted]

SEQ ID NO: 755094 - protein, 414 aa, Homo sapiens [sequence omitted]

SEQ ID NO: 755095 - protein, 414 aa, Homo sapiens [sequence omitted]

SEQ ID NO: 755096 - protein, 414 aa, Homo sapiens [sequence omitted]

SEQ ID NO: 755097 - protein, 415 aa, Homo sapiens
MMLGPEGGEGFVVKLRGLPWSCSVEDVQNFLSDCTIHDGAAGVHFIYTREGRQSGEAFVELGSEDDVKMALKKDRESMGHRYIEVFKSHRTEMDWVLKHSGPNSADSANDGFVRLRGLPFGCTKEEIVQFFSGLEIVPNGITLPVDPEGKITGEAFVQFASQELAEKALGKHKERIGHRYIEVFKSSQEEVRSYSDPPLKFMSVQRPGPYDRPGTARRYIGIVKQAGLERMRPGAYSTGYGGYEEYSGLSDGYGFTTDLFGRDLSYCLSGMYDHRYGDSEFTVQSTTGHCVHMRGLPYKATENDIYNFFSPLNPVRVHIEIGPDGRVTGEADVEFATHEEAVAAMSKDRANMQHRYIELFLNSTTGASNGAYSSQVMQGMGVSAAQATYSGLESQSVSGCYGAGYSGQNSMGGYD

SEQ ID NO: 755098 - protein, 347 aa, Homo sapiens
MALKKDRESMGHRYIEVFKSHRTEMDWVLKHSGPNSADSANDGFVRLRGLPFGCTKEEIVQFFSGLEIVPNGITLPVDPEGKITGEAFVQFASQELAEKALGKHKERIGHRYIEVFKSSQEEVRSYSDPPLKFMSVQRPGPYDRPGTARRYIGIVKQAGLERMRPGAYSTGYGGYEEYSGLSDGYGFTTDLFGRDLSYCLSGMYDHRYGDSEFTVQSTTGHCVHMRGLPYKATENDIYNFFSPLNPVRVHIEIGPDGRVTGEADVEFATHEEAVAAMSKDRANMQHRYIELFLNSTTGASNGAYSSQVMQGMGVSAAQATYSGLESQSVSGCYGAGYSGQNSMGGYD

SEQ ID NO: 755099 - protein, 414 aa, Homo sapiens [sequence omitted]

SEQ ID NO: 755100 - protein, 414 aa, Homo sapiens [sequence omitted]

SEQ ID NO: 755101 - protein, 414 aa, Homo sapiens [sequence omitted]

SEQ ID NO: 755102 - protein, 414 aa, Homo sapiens [sequence omitted]

SEQ ID NO: 755103 - protein, 414 aa, Homo sapiens [sequence omitted]

SEQ ID NO: 755104 - protein, 278 aa, Homo sapiens
WLVGGGIGRPEGKITGEAFVQFASQELAEKALGKHKERIGHRYIEVFKSSQEEVRSYSDPPLKFMSVQRPGPYDRPGTARRYIGIVKQAGLERMRPGAYSTGYGGYEEYSGLSDGYGFTTDLFGRDLSYCLSGMYDHRYGDSEFTVQSTTGHCVHMRGLPYKATENDIYNFFSPLNPVRVHIEIGPDGRVTGEADVEFATHEEAVAAMSKDRANMQHRYIELFLNSTTGASNGAYSSQVMQGMGVSAAQATYSGLESQSVSGCYGAGYSGQNSMGGYD

SEQ ID NO: 755105 - protein, 214 aa, Homo sapiens [sequence omitted]

SEQ ID NO: 755106 - protein, 97 aa, Homo sapiens
RDPRPAAGLGSRGLRFPDSGPRASSGPTGQSLAWLRTKTCTWSFPGALCVVELRWNFGALGCQPRLPGSNRNQSCSPPWTFHYHPEVSPTEGIRGCF

SEQ ID NO: 755107 - protein, 179 aa, Homo sapiens
MLGPEGGEGFVVKLRGLPWSCSVEDVQNFLSDCTIHDGAAGVHFIYTREGRQSGEAFVELGSEDDVKMALKKDRESMGHRYIEVFKSHRTEMDWVLKHSGPNSADSANDGFVRLRGLPFGCTKEEIVQFFSGLEIVPNGITLPVDPEGKITGEAFVQFASQELAEKALGKHKEFFQVPG

SEQ ID NO: 755108 - protein, 77 aa, Homo sapiens
IACDTEKIKSDITLLLNDSISIHYAIEILLLGGRNSMFDVVSHSSHQSELAVRKCSQGVVKGASSLIQRNISHVCSF

SEQ ID NO: 755109 - protein, 75 aa, Homo sapiens
MLGPEGGEGFVVKLRGLPWSCSVEDVQNFLSDCTIHDGAAGVHFIYTREGRQSGEAFVELGFSDETVERGVTEAR

SEQ ID NO: 755110 - protein, 40 aa, Homo sapiens
MEHQSLLPFSRNQARRSSVNELPPRIPETGFHRAPQGKHW

SEQ ID NO: 755111 - protein, 234 aa, Homo sapiens
KRIHTGEKPYTCEECGKAFNQSSTLILHKRIHSGQKPYKCEECGKAFTRSTTLNEHKKIHTGEKPYKCEECGKAFIWSASLNEHKNIHTGEKPYKCKECGKAFNQSSGLIIHRSIHSEQKLYKCEECGKAFTRSTALNEHKKIHSGEKPYKCKECGKAYNLSSTLTKHKRIHTGEKPFTCEECGKAFNWSSSLTKHKIIHTGEKSYKCEECGKAFNRPSTLTVHKRIHTGKEHS

SEQ ID NO: 755112 - protein, 54 aa, Homo sapiens
SWNTGWRQQGRVSLARLTLRRWGAAEGRESRRDRWSDLDLRNDITHARSGMEVA

SEQ ID NO: 755113 - protein, 149 aa, Homo sapiens
MPNGIGCHVLPLLVYVSRSSVLISPLCRPAPSWGWILQERGKQPSKASFLLFHLQDPGLGTFGATGWKYSPLPHPPHPSSEALGRGLEPVVRSFPSKPCRGQPLNGPKIPWTQGIPCGIPSRAAEAGKLNHISQTLLQLVFLMAWKSCH

SEQ ID NO: 755114 - protein, 470 aa, Homo sapiens
MAGENHQWQGSILYNMLMSAKQTRAAPEAPETRLVDQCWGCSCGDEPGVGREGLLGGRNVALLYRCCFCGKDHPRQGSILYSMLTSAKQTYAAPKAPEATLGPCWGCSCGSDPGVGRAGLPGGRPVALLYRCCFCGEDHPRQGSILYSLLTSSKQTHVAPAAPEARPGGAWWDRSYFAQRPGGKEALPGGRATALLYRCCFCGEDHPQQGSTLYCVPTSTNQAQAAPEERPRAPWWDTSSGALRPVALKSPQVVCEAASAGLLKTLRFVKYLPCFQVLPLDQQLVLVRNCWASLLMLELAQDRLQFETVEVSEPSMLQKILTTRRRETGGNEPLPVPTLQHHLAPPAEARKVPSASQVQAIKCFLSKCWSLNISTKEYAYLKGTVLFNPDVPGLQCVKYIQGLQWGTQQILSEHTRMTHQGPHDRFIELNSTLFLLRFINANVIAELFFRPIIGTVSMDDMMLEMLCTKI

SEQ ID NO: 755115 - protein, 470 aa, Homo sapiens; identical to SEQ ID NO: 755114

SEQ ID NO: 755116 - protein, 228 aa, Homo sapiens
MLHVEMLTLVFLVLWMCVFSQDPGSKAVADRYAVYWNSSNPRFQRGDYHIDVCINDYLDVFCPHYEDSVPEDKTERYVLYMVNFDGYSACDHTSKGFKRWECNRPHSPNGPLKFSEKFQLFTPFSLGFEFRPGREYFYISSAIPDNGRRSCLKLKVFVRPTNSCMKTIGVHDRVFDVNDKVENSLEPADDTVHESAEPSRGENAAQTPRIPSRLLAILLFLLAMLLTL

SEQ ID NO: 755117 - protein, 148 aa, Homo sapiens
MVNFDGYSACDHTSKGFKRWECNRPHSPNGPLKFSEKFQLFTPFSLGFEFRPGREYFYISSAIPDNGRRSCLKLKVFVRPTNSCMKTIGVHDRVFDVNDKVENSLEPADDTVHESAEPSRGENAAQTPRIPSRLLAILLFLLAMLLTL

SEQ ID NO: 755118 - protein, 228 aa, Homo sapiens; identical to SEQ ID NO: 755116

SEQ ID NO: 755119 - protein, 175 aa, Homo sapiens
MALQLGRLSSGPCWLVARGGCGGPRAWSQCGGGGLRAWSQRSAAGRVCRPPGPAGTEQSRGLGHGSTSRGGPWVGTGLAAALAGLVGLATAAFGHVQRAEMLPKTSGTRATSLGRPEEEEDELAHRCSSFMAPPVTDLGELRRRPGDMKTKMELLILETQAQVCQALAQRKLQNK

SEQ ID NO: 755120 - protein, 454 aa, Homo sapiens
MALQLGRLSSGPCWLVARGGCGGPRAWSQCGGGGLRAWSQRSAAGRVCRPPGPAGTEQSRGLGHGSTSRGGPWVGTGLAAALAGLVGLATAAFGHVQRAEMLPKTSGTRATSLGRPEEEEDELAHRCSSFMAPPVTDLGELRRRPGDMKTKMELLILETQAQVCQALAQVDGGANFSVDRWERKEGGGGISCVLQDGCVFEKAGVSISVVHGNLSEEAAKQMRSRGKVLKTKDGKLPFCAMGVSSVIHPKNPHAPTIHFNYRYFEVEEADGNKQWWFGGGCDLTPTYLNQEDAVHFHRTLKEACDQHGPDLYPKFKKWCDDYFFIAHRGERRGIGGIFFDDLDSPSKEEVFRFVQSCARAVVPSYIPLVKKHCDDSFTPQEKLWQQLRRGRYVEFNLLYDRGTKFGLFTPGSRIESILMSLPLTARWEYMHSPSENSKEAEILEVLRHPRDWVR

SEQ ID NO: 755121 - protein, 436 aa, Homo sapiens
MALQLGRLSSGPCWLVARGGCGGPRAWSQCGGGGLRAWSQRSAAGRVCRPPGPAGTEQSRGLGHGSTSRGGPWVGTGLAAALAGLVGLATAAFGHVQRAEMLPKTSGTRATSLGRPEEEEDELAHRCSSFMAPPVTDLGELRRRPGDMKTKMELLILETQAQVCQALAQVDGGANFSVDRWERKEGGGGISCVLQDGCVFEKAGVSISVVHGNLSEEAAKQMRSRGSVIHPKNPHAPTIHFNYRYFEVEEADGNKQWWFGGGCDLTPTYLNQEDAVHFHRTLKEACDQHGPDLYPKFKKWCDDYFFIAHRGERRGIGGIFFDDLDSPSKEEVFRFVQSCARAVVPSYIPLVKKHCDDSFTPQEKLWQQLRRGRYVEFNLLYDRGTKFGLFTPGSRIESILMSLPLTARWEYMHSPSENSKEAEILEVLRHPRDWVR

SEQ ID NO: 755122 - protein, 249 aa, Homo sapiens
MALQLGRLSSGPCWLVARGGCGGPRAWSQCGGGGLRAWSQRSAAGRVCRPPGPAGTEQSRGLGHGSTSRGGPWVGTGLAAALAGLVGLATAAFGHVQRAEMLPKTSGTRATSLGRPEEEEDELAHRCSSFMAPPVTDLGELRRRPGDMKTKMELLILETQAQVCQALAQVDGGANFSVDRWERKEGGGGISCVLQDGCVFEKCWDYRHEPPRLAAFTSFFLPRPYWSSELKSVKIFFIVIHFMLKKLSC

SEQ ID NO: 755123 - protein, 249 aa, Homo sapiens; identical to SEQ ID NO: 755122

SEQ ID NO: 755124 - protein, 454 aa, Homo sapiens; identical to SEQ ID NO: 755120

SEQ ID NO: 755125 - protein, 374 aa, Homo sapiens
MALQLGRLSSGPCWLVARGGCGGPRAWSQCGGGGLRAWSQRSAAGRVCRPPGPAGTEQSRGLGHGSTSRGGPWVGTGLAAALAGLVGLATAAFGHVQRAEMLPKTSGTRATSLGRPEEEEDELAHRCSSFMAPPVTDLGELRRRPGDMKTKMELLILETQAQVCQALAQVDGGANFSVDRWERKEGGGGISCVLQDGCVFEKAGVSISVVHGNLSEEAAKQMRSRGKVLKTKDGKLPFCAMGVSSVIHPKNPHAPTIHFNYRYFEVEEADGNKQWWFGGGCDLTPTYLNQEDAVHFHRTLKEACDQHGPDLYPKFKKWCDDYFFIAHRGERRGIGGIFFDDLDSPSKEEVFRFVQSCARAVVPSYIPLVKKHCM

SEQ ID NO: 755126 - protein, 324 aa, Homo sapiens
MAPPVTDLGELRRRPGDMKTKMELLILETQAQVCQALAQVDGGANFSVDRWERKEGGGGISCVLQDGCVFEKAGVSISVVHGNLSEEAAKQMRSRGKVLKTKDGKLPFCAMGVSSVIHPKNPHAPTIHFNYRYFEVEEADGNKQWWFGGGCDLTPTYLNQEDAVHFHRTLKEACDQHGPDLYPKFKKWCDDYFFIAHRGERRGIGGIFFDDLDSPSKEEVFRFVQSCARAVVPSYIPLVKKHCDDSFTPQEKLWQQLRRGRYVEFNLLYDRGTKFGLFTPGSRIESILMSLPLTARWEYMHSPSENSKEAEILEVLRHPRDWVR

SEQ ID NO: 755127 - protein, 297 aa, Homo sapiens
MSPDGIRPGVVLNRAAKKCEFSVGSGWRPPPSRASGGGARGPAGPRGGLVSKSSPKKPRGRNIFKALFCCFRAQHVGQSSSSTELAAYKEEANTIAKSDLLQCLQYQFYQIPGTCLLPEVTEEDQGRICVVIDLDETLVHSSFKPINNADFIVPIEIEGTTHQVYVLKRPYVDEFLRRMGELFECVLFTASLAKYADPVTDLLDRCGVFRARLFRESCVFHQGCYVKDLSRLGRDLRKTLILDNSPASYIFHPENAVPVQSWFDDMADTELLNLIPIFEELSGAEDVYTSLGQLRAP

SEQ ID NO: 755128 - protein, 271 aa, Homo sapiens
MEHGSIITQARREDALVLTKQGLVSKSSPKKPRGRNIFKALFCCFRAQHVGQSSSSTELAAYKEEANTIAKSDLLQCLQYQFYQIPGTCLLPEVTEEDQGRICVVIDLDETLVHSSFKPINNADFIVPIEIEGTTHQVYVLKRPYVDEFLRRMGELFECVLFTASLAKYADPVTDLLDRCGVFRARLFRESCVFHQGCYVKDLSRLGRDLRKTLILDNSPASYIFHPENAVPVQSWFDDMADTELLNLIPIFEELSGAEDVYTSLGQLRAP

SEQ ID NO: 755129 - protein, 290 aa, Homo sapiens [sequence omitted]

SEQ ID NO: 755130 - protein, 388 aa, Homo sapiens [sequence omitted]

SEQ ID NO: 755131 - protein, 376 aa, Homo sapiens [sequence omitted]

SEQ ID NO: 755132 - protein, 321 aa, Homo sapiens [sequence omitted]

SEQ ID NO: 755133 - protein, 298 aa, Homo sapiens [sequence omitted]

SEQ ID NO: 755134 - protein, 286 aa, Homo sapiens [sequence omitted]

SEQ ID NO: 755135 - protein, 231 aa, Homo sapiens [sequence omitted]

SEQ ID NO: 755136 - protein, 199 aa, Homo sapiens
MLLLFLLFEGLCCPGENTAVKPEAWLSCGPSPGPGRLQLVCHVSGFYPKPVWVMWMRGEQEQRGTQRGDVLPNADETWYLRATLDVAAGEAAGLSCRVKHSSLGGHDLIIHWGGYSIFLILICLTVIVTLVILVVVDSRLKKQSSNKNILSPHTPSPVFLMGANTQDTKNSRHQFCLAQVSWIKNRVLKKWKTRLNQLW

SEQ ID NO: 755137 - protein, 144 aa, Homo sapiens
MLLLFLLFEGLCCPGENTAVKPEAWLSCGPSPGPGRLQLVCHVSGFYPKPVWVMWMRGGYSIFLILICLTVIVTLVILVVVDSRLKKQSSNKNILSPHTPSPVFLMGANTQDTKNSRHQFCLAQVSWIKNRVLKKWKTRLNQLW

SEQ ID NO: 755138 - protein, 378 aa, Homo sapiens
MLLLFLLFEGLCCPGENTAAAEEQLSFRMLQTSSFANHSWAHSEGSGWLGDLQTHGWDTVLGTIRFLKPWSHGNFSKQELKNLQSLFQLYFHSFIRIVQASAGQFQLEYPFEIQILAGCRMNAPQIFLNMAYQGSDFLSFQGISWEPSPGAGIRAQNICKVLNRYLDIKEILQSLLGHTCPRFLAGLMEAGESELKRKVKPEAWLSCGPSPGPGRLQLVCHVSGFYPKPVWVMWMRGEQEQRGTQRGDVLPNADETWYLRATLDVAAGEAAGLSCRVKHSSLGGHDLIIHWGGYSIFLILICLTVIVTLVILVVVDSRLKKQSSNKNILSPHTPSPVFLMGANTQDTKNSRHQFCLAQVSWIKNRVLKKWKTRLNQLW

SEQ ID NO: 755139 - protein, 333 aa, Homo sapiens
MLLLFLLFEGLCCPGENTAAPQALQSYHLAAEEQLSFRMLQTSSFANHSWAHSEGSGWLGDLQTHGWDTVLGTIRFLKPWSHGNFSKQELKNLQSLFQLYFHSFIRIVQASAGQFQLEYPFEIQILAGCRMNAPQIFLNMAYQGSDFLSFQGISWEPSPGAGIRAQNICKVLNRYLDIKEILQSLLGHTCPRFLAGLMEAGESELKRKVKPEAWLSCGPSPGPGRLQLVCHVSGFYPKPVWVMWMRGEQEQRGTQRGDVLPNADETWYLRATLDVAAGEAAGLSCRVKHSSLGGHDLIIHWALSFSWEPTLRTPRIQDISSAWHKYRGSKTEY

SEQ ID NO: 755140 - protein, 342 aa, Homo sapiens
MLLLFLLFEGLCCPGENTAAPQALQSYHLAAEEQLSFRMLQTSSFANHSWAHSEGSGWLGDLQTHGWDTVLGTIRFLKPWSHGNFSKQELKNLQSLFQLYFHSFIRIVQASAGQFQLEYPFEIQILAGCRMNAPQIFLNMAYQGSDFLSFQGISWEPSPGAGIRAQNICKVLNRYLDIKEILQSLLGHTCPRFLAGLMEAGESELKRKVKPEAWLSCGPSPGPGRLQLVCHVSGFYPKPVWVMWMRGEQEQRGTQRGDVLPNADETWYLRATLDVAAGEAAGLSCRVKHSSLGGHDLIIHWGEKQLRLCWEIMKIALGLLSVGLRKWVGMLGTRRVKLGQSK

SEQ ID NO: 755141 - protein, 125 aa, Homo sapiens [sequence omitted]

SEQ ID NO: 755142 - protein, 187 aa, Homo sapiens
MLLLFLLFEGLCCPGENTAVKPEAWLSCGPSPGPGRLQLVCHVSGFYPKPVWVMWMRGEQEQRGTQRGDVLPNADETWYLRATLDVAAGEAAGLSCRVKHSSLGGHDLIIHWGGYSIFLILICLTVIVTLVILVVVDSRLKKQSPVFLMGANTQDTKNSRHQFCLAQVSWIKNRVLKKWKTRLNQLW

SEQ ID NO: 755143 - protein, 132 aa, Homo sapiens
MLLLFLLFEGLCCPGENTAVKPEAWLSCGPSPGPGRLQLVCHVSGFYPKPVWVMWMRGGYSIFLILICLTVIVTLVILVVVDSRLKKQSPVFLMGANTQDTKNSRHQFCLAQVSWIKNRVLKKWKTRLNQLW

SEQ ID NO: 755144 - protein, 342 aa, Homo sapiens; identical to SEQ ID NO: 755140

SEQ ID NO: 755145 - protein, 191 aa, Homo sapiens
MLLLFLLFEGLCCPGENTADPFEIQILAGCRMNAPQIFLNMAYQGSDFLSFQGISWEPSPGAGIRAQNICKVLNRYLDIKEILQSLLGHTCPRFLAGLMEAGESELKRKVKPEAWLSCGPSPGPGRLQLVCHVSGFYPKPVWVMWMRGEQEQRGTQRGDVLPNADETWWIFHLSHPDLFDCDSYPGHIGCS

SEQ ID NO: 755146 - protein, 327 aa, Homo sapiens
MAAIYLSRGFFSREPICPFEEKTKVERMVEDYLASGYQDSVTFDDVAVDFTPEEWALLDTTEKYLYRDVMLENYMNLASVEWEIQPRTKRSSLQQGFLKNQIFSGIQMTRGYSGWKLCDCKNCGEVFREQFCLKTHMRVQNGGNTSEGNCYGKDTLSVHKEASTGQELSKFNPCGKVFTLTPGLAVHLEVLNARQPYKCKECGKGFKYFASLDNHMGIHTDEKLCEFQEYGRAVTASSHLKQCVAVHTGKKSKKTKKCGKSFTNFSQLYAPVKTHKGEKSFECKECGRSFRNSSCLNDHIQIHTGIKPHKCTTVGKPSLDQLNLLNM

SEQ ID NO: 755147 - protein, 332 aa, Homo sapiens
MAAIYLSRGFFSREPICPFEEKTKVERMVEDYLASGYQDSVTFDDVAVDFTPEEWALLDTTEKYLYRDVMLENYMNLASVEWEIQPRTKRSSLQQGFLKNQIFSGIQMTRGYSGWKLCDCKNCGEVFREQFCLKTHMRVQNGGNTSEGNCYGKDTLSVHKEASTGQELSKFNPCGKVFTLTPGLAVHLEVLNARQPYKCKECGKGFKYFASLDNHMGIHTDEKLCEFQEYGRAVTASSHLKQCVAVHTGKKSKKTKKCGKSFTNFSQLYAPVKTHKGEKSFECKECGRSFRNSSCLNDHIQIHTGIKPHKCTYCGKAFTRSTQLTEHVKNSH

SEQ ID NO: 755148 - protein, 290 aa, Homo sapiens
HSSGERYFSVVSSKAHSSGVKSTTEKYLYRDVMLENYMNLASVEWEIQPRTKRSSLQQGFLKNQIFSGIQMTRGYSGWKLCDCKNCGEVFREQFCLKTHMRVQNGGNTSEGNCYGKDTLSVHKEASTGQELSKFNPCGKVFTLTPGLAVHLEVLNARQPYKCKECGKGFKYFASLDNHMGIHTDEKLCEFQEYGRAVTASSHLKQCVAVHTGKKSKKTKKCGKSFTNFSQLYAPVKTHKGEKSFECKECGRSFRNSSCLNDHIQIHTGIKPHKCTTVGKPSLDQLNLLNM

SEQ ID NO: 755149 - protein, 300 aa, Homo sapiens
MPVIPATQETEDSVTFDDVAVDFTPEEWALLDTTEKYLYRDVMLENYMNLASVEWEIQPRTKRSSLQQGFLKNQIFSGIQMTRGYSGWKLCDCKNCGEVFREQFCLKTHMRVQNGGNTSEGNCYGKDTLSVHKEASTGQELSKFNPCGKVFTLTPGLAVHLEVLNARQPYKCKECGKGFKYFASLDNHMGIHTDEKLCEFQEYGRAVTASSHLKQCVAVHTGKKSKKTKKCGKSFTNFSQLYAPVKTHKGEKSFECKECGRSFRNSSCLNDHIQIHTGIKPHKCTTVGKPSLDQLNLLNM

SEQ ID NO: 755150 - protein, 709 aa, Homo sapiens
MPLTLLQDWCRGEHLNTRRCMLILGIPEDCGEDEFEETLQEACRHLGRYRVIGRMFRREENAQAILLELAQDIDYALLPREIPGKGGPWEVIVKPRNSDGEFLNRLNRFLEEERRTVSDMNRVLGSDTNCSAPRVTISPEFWTWAQTLGAAVQPLLEQMLYRELRVFSGNTISIPGALAFDAWLEHTTEMLQMWQVPEGEKRRRLMECLRGPALQVVSGLRASNASITVEECLAALQQVFGPVESHKIAQVKLCKAYQEAGEKVSSFVLRLEPLLQRAVENNVVSRRNVNQTRLKRVLSGATLPDKLRDKLKLMKQRRKPPGFLALVKLLREEEEWEATLGPDRESLEGLEVAPRPPARITGVGAVPLPASGNSFDARPSQGYRRRRGRGQHRRGGVARAGSRGSRKRKRHTFCYSCGEDGHIRVQCINPSNLLLVKQKKQAAVESGNGNWAWDKSHPKSKAKYGSGEQGNISYHRPRRQKRYWKEGKEKPRQTADELSGAEGQGSQTKAKPSHPWPAGRDFSNQDHLATGSVGVRSRSPKRCWRGKQGATASSTWGAWASDGDPKEAEAEEGTAGGSVLLIQPPLNTHPVDFELNMPTGPQATWDLEEPTWGLPLPAGARAGEEELGGRGKALQGRPQGPSRLQDHLHCTRGAPGRQHPGGPVPVRTGDPKAPGAQCQPEVVQARRPKIDEKTPSRGTGYPAGQCPHS

SEQ ID NO: 755151 - protein, 463 aa, Homo sapiens
MPLTLLQDWCRGEHLNTRRCMLILGIPEDCGEDEFEETLQEACRHLGRYRVIGRMFRREENAQAILLELAQDIDYALLPREIPGKGGPWEVIVKPRNSDGEFLNRLNRFLEEERRTVSDMNRVLGSDTNCSAPRVTISPEFWTWAQTLGAAVQPLLEQMLYRELRVFSGNTISIPGALAFDAWLEHTTEMLQMWQVPEGEKRRRLMECLRGPALQVVSGLRASNASITVEECLAALQQVFGPVESHKIAQVKLCKAYQEAGEKVSSFVLRLEPLLQRAVENNVVSRRNVNQTRLKRVLSGATLPDKLRDKLKLMKQRRKPPGFLALVKLLREEEEWEATLGPDRESLEGLEVAPRPPARITGVGAVPLPASGNSFDARPSQGYRRRRGRGQHRRGGVARAGSRGSRKRKRHTFCYSCGEDGHIRVQCINPSNLLLVKQKKQAAVESGNGNWAWDKSHPKSKAK

SEQ ID NO: 755152 - protein, 92 aa, Homo sapiens
MPLTLLQDWCRGEHLNTRRCMLILGIPEDCGEDEFEETLQEACRHLGRYRVIGRMFRREENAQAILLELAQDIDYALLPREIPGKGGPWEVI

SEQ ID NO: 755153 - protein, 668 aa, Homo sapiens
MPLTLLQDWCRGEHLNTRRCMLILGIPEDCGEDEFEETLQEACRHLGRYRVIGRMFRREENAQAILLELAQDIDYALLPREIPGKGGPWEVIVKPRNSDGEFLNRLNRFLEEERRTVSDMNRVLGSDTNCSAPRVTISPEFWTWAQTLGAAVQPLLEQMLYRELRVFSGNTISIPGALAFDAWLEHTTEMLQMWQVPEGEKRRRLMECLRGPALQVVSGLRASNASITVEECLAALQQVFGPVESHKIAQVKLCKAYQEAGEKVSSFVLRLEPLLQRAVENNVVSRRNVNQTRLKRVLSGATLPDKLRDKLKLMKQRRKPPGFLALVKLLREEEEWEATLGPDRESLEGLEVAPRPPARITGVGAVPLPASGNSFDARPSQGYRRRRGRGQHRRGGVARAGSRGSRKRKRHTFCYSCGEDGHIRVQCINPSNLLLPRRQKRYWKEGKEKPRQTADELSGAEGQGSQTKAKPSHPWPAGRDFSNQDHLATGSVGVRSRSPKRCWRGKQGATASSTWGAWASDGDPKEAEAEEGTAGGSVLLIQPPLNTHPVDFELNMPTGPQATWDLEEPTWGLPLPAGARAGEEELGGRGKALQGRPQGPSRLQDHLHCTRGAPGRQHPGGPVPVRTGDPKAPGAQCQPEVVQARRPKIDEKTPSRGTGYPAGQCPHS

SEQ ID NO: 755154 - protein, 709 aa, Homo sapiens; identical to SEQ ID NO: 755150

SEQ ID NO: 755155 - protein, 117 aa, Homo sapiens
MESRDASIHTSCRAAQAPTPPRAPGCTAIKNNEGLRGWPAYVADSIILTLLLPSGLLVPPPRSPFSSQRPKACGVMSHSGCSRWEMCACLPASYPGFTLRTWTTVSGDVCSGHIMQI

SEQ ID NO: 755156 - protein, 104 aa, Homo sapiens
WSLALSPRLECSDAISAHCNLCLPGSSDSSASASRVPGTTGTRHNAWLIFIFLVEMGFCHVGQDGLELLTSSDPPTSASQNAGITSASHPARPKRSQTFISYKI

SEQ ID NO: 755157 - protein, 62 aa, Homo sapiens
LTSIFKAAKPRNRSPNGESSSPDSGYLSPKNQPSALLSASASQSPMEDQGEMEREVKSPGAR

SEQ ID NO: 755158 - protein, 956 aa, Homo sapiens [sequence omitted]

SEQ ID NO: 755159 - protein, 234 aa, Homo sapiens
MEAKAAILDDPMECSRGERLSITLAKNRINRAPERLGKAKVEVDIFELLRDSEYETAETMCQILPKGVVAVLGPSSSPASSSIISNICGEKEVPHFKVAPEEFVKFQFQRFTTLNLHPSNTDISVAVAGILNFFNCTTACLICAKAECLLNLEKLLRQFLISKDTLSVRMLDDTRDPTPLLKEIRDDKTATIIIHANASMSHTILLKAAELGMVSAYYTYIFTNLEFTGQRGSI

SEQ ID NO: 755160 - protein, 2415 aa, Homo sapiens
MTTLLWVFVTLRVITAAVTVETSDHDNSLSVSIPQPSPLRVLLGTSLTIPCYFIDPMHPVTTAPSTAPLAPRIKWSRVSKEKEVVLLVATEGRVRVNSAYQDKVSLPNYPAIPSDATLEVQSLRSNDSGVYRCEVMHGIEDSEATLEVVVKGIVFHYRAISTRYTLDFDRAQRACLQNSAIIATPEQLQAAYEDGFHQCDAGWLADQTVRYPIHTPREGCYGDKDEFPGVRTYGIRDTNETYDVYCFAEEMEGEVFYATSPEKFTFQEAANECRRLGARLATTGQLYLAWQAGMDMCSAGWLADRSVRYPISKARPNCGGNLLGVRTVYVHANQTGYPDPSSRYDAICYTGEDFVDIPENFFGVGGEEDITVQTVTWPDMELPLPRNITEGEARGSVILTVKPIFEVSPSPLEPEEPFTFAPEIGATAFAEVENETGEATRPWGFPTPGLGPATAFTSEDLVVQVTAVPGQPHLPGGVVFHYRPGPTRYSLTFEEAQQACPGTGAVIASPEQLQAAYEAGYEQCDAGWLRDQTVRYPIVSPRTPCVGDKDSSPGVRTYGVRPSTETYDVYCFVDRLEGEVFFATRLEQFTFQEALEFCESHNATATTGQLYAAWSRGLDKCYAGWLADGSLRYPIVTPRPACGGDKPGVRTVYLYPNQTGLPDPLSRHHAFCFRGISAVPSPGEEEGGTPTSPSGVEEWIVTQVVPGVAAVPVEEETTAVPSGETTAILEFTTEPENQTEWEPAYTPVGTSPLPGILPTWPPTGAETEESTEGPSATEVPSASEEPSPSEVPFPSEEPSPSEEPFPSVRPFPSVELFPSEEPFPSKEPSPSEEPSASEEPYTPSPPEPSWTELPSSGEESGAPDVSGDFTGSGDVSGHLDFSGQLSGDRASGLPSGDLDSSGLTSTVGSGLTVESGLPSGDEERIEWPSTPTVGELPSGAEILEGSASGVGDLSGLPSGEVLETSASGVGDLSGLPSGEVLETTAPGVEDISGLPSGEVLETTAPGVEDISGLPSGEVLETTAPGVEDISGLPSGEVLETTAPGVEDISGLPSGEVLETTAPGVEDISGLPSGEVLETAAPGVEDISGLPSGEVLETAAPGVEDISGLPSGEVLETAAPGVEDISGLPSGEVLETAAPGVEDISGLPSGEVLETAAPGVEDISGLPSGEVLETAAPGVEDISGLPSGEVLETAAPGVEDISGLPSGEVLETAAPGVEDISGLPSGEVLETAAPGVEDISGLPSGEVLETAAPGVEDISGLPSGEVLETAAPGVEDISGLPSGEVLETTAPGVEEISGLPSGEVLETTAPGVDEISGLPSGEVLETTAPGVEEISGLPSGEVLETSTSAVGDLSGLPSGGEVLEISVSGVEDISGLPSGEVVETSASGIEDVSELPSGEGLETSASGVEDLSRLPSGEEVLEISASGFGDLSGVPSGGEGLETSASEVGTDLSGLPSGREGLETSASGAEDLSGLPSGKEDLVGSASGDLDLGKLPSGTLGSGQAPETSGLPSGFSGEYSGVDLGSGPPSGLPDFSGLPSGFPTVSLVDSTLVEVVTASTASELEGRGTIGISGAGEISGLPSSELDISGRASGLPSGTELSGQASGSPDVSGEIPGLFGVSGQPSGFPDTSGETSGVTELSGLSSGQPGVSGEASGVLYGTSQPFGITDLSGETSGVPDLSGQPSGLPGFSGATSGVPDLVSGTTSGSGESSGITFVDTSLVEVAPTTFKEEEGLGSVELSGLPSGEADLSGKSGMVDVSGQFSGTVDSSGFTSQTPEFSGLPSGIAEVSGESSRAEIGSSLPSGAYYGSGTPSSFPTVSLVDRTLVESVTQAPTAQEAGEGPSGILELSGAHSGAPDMSGEHSGFLDLSGLQSGLIEPSGEPPGTPYFSGDFASTTNVSGESSVAMGTSGEASGLPEVTLITSEFVEGVTEPTISQELGQRPPVTHTPQLFESSGKVSTAGDVSGATPVLPGSGVEVSSVPESSSETSAYPEAGFGASAAPEASREDSGSPDLSETTSAFHEANLERSSGLGVSGSTLTFQEGEASAAPEVSGESTTTSDVGTEAPGLPSATPTASGDRTEISGDLSGHTSQLGVVISTSIPESEWTQQTQRPAETHLEIESSSLLYSGEETHTVETATSPTDASIPASPEWKRESESTAAAPARSCAEEPCGAGTCKETEGHVICLCPPGYTGEHCNIDQEVCEEGWNKYQGHCYRHFPDRETWVDAERRCREQQSHLSSIVTPEEQEFVNNNAQDYQWIGLNDRTIEGDFRWSDGHPMQFENWRPNQPDNFFAAGEDCVVMIWHEKGEWNDVPCNYHLPFTCKKGTVACGEPPVVEHARTFGQKKDRYEINSLVRYQCTEGFVQRHMPTIRCQPSGHWEEPQITCTDPTTYKRRLQKRSSRHPRRSRPSTAH

SEQ ID NO: 755161 - protein, 967 aa, Homo sapiens
GTSPNPEAEISRTSSPEGDLSGVPSGGEGLETSASEVGTDLSGLPSGREGLETSASGAEDLSGLPSGKEDLVGSASGDLDLGKLPSGTLGSGQAPETSGLPSGFSGEYSGVDLGSGPPSGLPDFSGLPSGFPTVSLVDSTLVEVVTASTASELEGRGTIGISGAGEISGLPSSELDISGRASGLPSGTELSGQASGSPDVSGEIPGLFGVSGQPSGFPDTSGETSGVTELSGLSSGQPGVSGEASGVLYGTSQPFGITDLSGETSGVPDLSGQPSGLPGFSGATSGVPDLVSGTTSGSGESSGITFVDTSLVEVAPTTFKEEEGLGSVELSGLPSGEADLSGKSGMVDVSGQFSGTVDSSGFTSQTPEFSGLPSGIAEVSGESSRAEIGSSLPSGAYYGSGTPSSFPTVSLVDRTLVESVTQAPTAQEAGEGPSGILELSGAHSGAPDMSGEHSGFLDLSGLQSGLIEPSGEPPGTPYFSGDFASTTNVSGESSVAMGTSGEASGLPEVTLITSEFVEGVTEPTISQELGQRPPVTHTPQLFESSGKVSTAGDVSGATPVLPGSGVEVSSVPESSSETSAYPEAGFGASAAPEASREDSGSPDLSETTSAFHEANLERSSGLGVSGSTLTFQEGEASAAPEVSGESTTTSDVGTEAPGLPSATPTASGDRTEISGDLSGHTSQLGVVISTSIPESEWTQQTQRPAETHLEIESSSLLYSGEETHTVETATSPTDASIPASPEWKRESESTAADQEVCEEGWNKYQGHCYRHFPDRETWVDAERRCREQQSHLSSIVTPEEQEFVNNNAQDYQWIGLNDRTIEGDFRWSDGHPMQFENWRPNQPDNFFAAGEDCVVMIWHEKGEWNDVPCNYHLPFTCKKGTVACGEPPVVEHARTFGQKKDRYEINSLVRYQCTEGFVQRHMPTIRCQPSGHWEEPQITCTDPTTYKRRLQKRSSRHPRRSRPSTAH

SEQ ID NO: 755162 - protein, 2239 aa, Homo sapiens
MAQGEQSGIVFHYRAISTRYTLDFDRAQRACLQNSAIIATPEQLQAAYEDGFHQCDAGWLADQTVRYPIHTPREGCYGDKDEFPGVRTYGIRDTNETYDVYCFAEEMEGEVFYATSPEKFTFQEAANECRRLGARLATTGQLYLAWQAGMDMCSAGWLADRSVRYPISKARPNCGGNLLGVRTVYVHANQTGYPDPSSRYDAICYTGEDFVDIPENFFGVGGEEDITVQTVTWPDMELPLPRNITEGEARGSVILTVKPIFEVSPSPLEPEEPFTFAPEIGATAFAEVENETGEATRPWGFPTPGLGPATAFTSEDLVVQVTAVPGQPHLPGGVVFHYRPGPTRYSLTFEEAQQACPGTGAVIASPEQLQAAYEAGYEQCDAGWLRDQTVRYPIVSPRTPCVGDKDSSPGVRTYGVRPSTETYDVYCFVDRLEGEVFFATRLEQFTFQEALEFCESHNATATTGQLYAAWSRGLDKCYAGWLADGSLRYPIVTPRPACGGDKPGVRTVYLYPNQTGLPDPLSRHHAFCFRGISAVPSPGEEEGGTPTSPSGVEEWIVTQVVPGVAAVPVEEETTAVPSGETTAILEFTTEPENQTEWEPAYTPVGTSPLPGILPTWPPTGAETEESTEGPSATEVPSASEEPSPSEVPFPSEEPSPSEEPFPSVRPFPSVELFPSEEPFPSKEPSPSEEPSASEEPYTPSPPEPSWTELPSSGEESGAPDVSGDFTGSGDVSGHLDFSGQLSGDRASGLPSGDLDSSGLTSTVGSGLTVESGLPSGDEERIEWPSTPTVGELPSGAEILEGSASGVGDLSGLPSGEVLETSASGVGDLSGLPSGEVLETTAPGVEDISGLPSGEVLETTAPGVEDISGLPSGEVLETTAPGVEDISGLPSGEVLETTAPGVEDISGLPSGEVLETTAPGVEDISGLPSGEVLETAAPGVEDISGLPSGEVLETAAPGVEDISGLPSGEVLETAAPGVEDISGLPSGEVLETAAPGVEDISGLPSGEVLETAAPGVEDISGLPSGEVLETAAPGVEDISGLPSGEVLETAAPGVEDISGLPSGEVLETAAPGVEDISGLPSGEVLETAAPGVEDISGLPSGEVLETAAPGVEDISGLPSGEVLETAAPGVEDISGLPSGEVLETTAPGVEEISGLPSGEVLETTAPGVDEISGLPSGEVLETTAPGVEEISGLPSGEVLETSTSAVGDLSGLPSGGEVLEISVSGVEDISGLPSGEVVETSASGIEDVSELPSGEGLETSASGVEDLSRLPSGEEVLEISASGFGDLSGVPSGGEGLETSASEVGTDLSGLPSGREGLETSASGAEDLSGLPSGKEDLVGSASGDLDLGKLPSGTLGSGQAPETSGLPSGFSGEYSGVDLGSGPPSGLPDFSGLPSGFPTVSLVDSTLVEVVTASTASELEGRGTIGISGAGEISGLPSSELDISGRASGLPSGTELSGQASGSPDVSGEIPGLFGVSGQPSGFPDTSGETSGVTELSGLSSGQPGVSGEASGVLYGTSQPFGITDLSGETSGVPDLSGQPSGLPGFSGATSGVPDLVSGTTSGSGESSGITFVDTSLVEVAPTTFKEEEGLGSVELSGLPSGEADLSGKSGMVDVSGQFSGTVDSSGFTSQTPEFSGLPSGIAEVSGESSRAEIGSSLPSGAYYGSGTPSSFPTVSLVDRTLVESVTQAPTAQEAGEGPSGILELSGAHSGAPDMSGEHSGFLDLSGLQSGLIEPSGEPPGTPYFSGDFASTTNVSGESSVAMGTSGEASGLPEVTLITSEFVEGVTEPTISQELGQRPPVTHTPQLFESSGKVSTAGDVSGATPVLPGSGVEVSSVPESSSETSAYPEAGFGASAAPEASREDSGSPDLSETTSAFHEANLERSSGLGVSGSTLTFQEGEASAAPEVSGESTTTSDVGTEAPGLPSATPTASGDRTEISGDLSGHTSQLGVVISTSIPESEWTQQTQRPAETHLEIESSSLLYSGEETHTVETATSPTDASIPASPEWKRESESTAAAPARSCAEEPCGAGTCKETEGHVICLCPPGYTGEHCNIDIDECLSSPCLNGATCVDAIDSFTCLCLPSYEGDLCEIDQEVCEEGWNKYQGHCYRHFPDRETWVDAERRCREQQSHLSSIVTPEEQEFVNNNAQDYQWIGLNDRTIEGDFRWSDGHPMPPPTNADYRSGAHGTLGGAAPAQPTEKSFQDAPRTLSPGACQADVHPTQTVSSSCRFLSYKESH

SEQ ID NO: 755163 - protein, 2316 aa, Homo sapiens
MTTLLWVFVTLRVITAAVTVETSDHDNSLSVSIPQPSPLRVLLGTSLTIPCYFIDPMHPVTTAPSTAPLAPRIKWSRVSKEKEVVLLVATEGRVRVNSAYQDKVSLPNYPAIPSDATLEVQSLRSNDSGVYRCEVMHGIEDSEATLEVVVKGIVFHYRAISTRYTLDFDRAQRACLQNSAIIATPEQLQAAYEDGFHQCDAGWLADQTVRYPIHTPREGCYGDKDEFPGVRTYGIRDTNETYDVYCFAEEMEGEVFYATSPEKFTFQEAANECRRLGARLATTGQLYLAWQAGMDMCSAGWLADRSVRYPISKARPNCGGNLLGVRTVYVHANQTGYPDPSSRYDAICYTGEDFVDIPENFFGVGGEEDITVQTVTWPDMELPLPRNITEGEARGSVILTVKPIFEVSPSPLEPEEPFTFAPEIGATAFAEVENETGEATRPWGFPTPGLGPATAFTSEDLVVQVTAVPGQPHLPGGVVFHYRPGPTRYSLTFEEAQQACPGTGAVIASPEQLQAAYEAGYEQCDAGWLRDQTVRYPIVSPRTPCVGDKDSSPGVRTYGVRPSTETYDVYCFVDRLEGEVFFATRLEQFTFQEALEFCESHNATATTGQLYAAWSRGLDKCYAGWLADGSLRYPIVTPRPACGGDKPGVRTVYLYPNQTGLPDPLSRHHAFCFRGISAVPSPGEEEGGTPTSPSGVEEWIVTQVVPGVAAVPVEEETTAVPSGETTAILEFTTEPENQTEWEPAYTPVGTSPLPGILPTWPPTGAETEESTEGPSATEVPSASEEPSPSEVPFPSEEPSPSEEPFPSVRPFPSVELFPSEEPFPSKEPSPSEEPSASEEPYTPSPPEPSWTELPSSGEESGAPDVSGDFTGSGDVSGHLDFSGQLSGDRASGLPSGDLDSSGLTSTVGSGLTVESGLPSGDEERIEWPSTPTVGELPSGAEILEGSASGVGDLSGLPSGEVLETSASGVGDLSGLPSGEVLETTAPGVEDISGLPSGEVLETTAPGVEDISGLPSGEVLETTAPGVEDISGLPSGEVLETTAPGVEDISGLPSGEVLETTAPGVEDISGLPSGEVLETAAPGVEDISGLPSGEVLETAAPGVEDISGLPSGEVLETAAPGVEDISGLPSGEVLETAAPGVEDISGLPSGEVLETAAPGVEDISGLPSGEVLETAAPGVEDISGLPSGEVLETAAPGVEDISGLPSGEVLETAAPGVEDISGLPSGEVLETAAPGVEDISGLPSGEVLETAAPGVEDISGLPSGEVLETAAPGVEDISGLPSGEVLETTAPGVEEISGLPSGEVLETTAPGVDEISGLPSGEVLETTAPGVEEISGLPSGEVLETSTSAVGDLSGLPSGGEVLEISVSGVEDISGLPSGEVVETSASGIEDVSELPSGEGLETSASGVEDLSRLPSGEEVLEISASGFGDLSGVPSGGEGLETSASEVGTDLSGLPSGREGLETSASGAEDLSGLPSGKEDLVGSASGDLDLGKLPSGTLGSGQAPETSGLPSGFSGEYSGVDLGSGPPSGLPDFSGLPSGFPTVSLVDSTLVEVVTASTASELEGRGTIGISGAGEISGLPSSELDISGRASGLPSGTELSGQASGSPDVSGEIPGLFGVSGQPSGFPDTSGETSGVTELSGLSSGQPGVSGEASGVLYGTSQPFGITDLSGETSGVPDLSGQPSGLPGFSGATSGVPDLVSGTTSGSGESSGITFVDTSLVEVAPTTFKEEEGLGSVELSGLPSGEADLSGKSGMVDVSGQFSGTVDSSGFTSQTPEFSGLPSGIAEVSGESSRAEIGSSLPSGAYYGSGTPSSFPTVSLVDRTLVESVTQAPTAQEAGEGPSGILELSGAHSGAPDMSGEHSGFLDLSGLQSGLIEPSGEPPGTPYFSGDFASTTNVSGESSVAMGTSGEASGLPEVTLITSEFVEGVTEPTISQELGQRPPVTHTPQLFESSGKVSTAGDVSGATPVLPGSGVEVSSVPESSSETSAYPEAGFGASAAPEASREDSGSPDLSETTSAFHEANLERSSGLGVSGSTLTFQEGEASAAPEVSGESTTTSDVGTEAPGLPSATPTASGDRTEISGDLSGHTSQLGVVISTSIPESEWTQQTQRPAETHLEIESSSLLYSGEETHTVETATSPTDASIPASPEWKRESESTAADQEVCEEGWNKYQGHCYRHFPDRETWVDAERRCREQQSHLSSIVTPEEQEFVNNNAQDYQWIGLNDRTIEGDFRWSDGHPMQFENWRPNQPDNFFAAGEDCVVMIWHEKGEWNDVPCNYHLPFTCKKGTATTYKRRLQKRSSRHPRRSRPSTAH

SEQ ID NO: 755164 - protein, 2233 aa, Homo sapiens
MAQGEQSGIVFHYRAISTRYTLDFDRAQRACLQNSAIIATPEQLQAAYEDGFHQCDAGWLADQTVRYPIHTPREGCYGDKDEFPGVRTYGIRDTNETYDVYCFAEEMEGEVFYATSPEKFTFQEAANECRRLGARLATTGQLYLAWQAGMDMCSAGWLADRSVRYPISKARPNCGGNLLGVRTVYVHANQTGYPDPSSRYDAICYTGEDFVDIPENFFGVGGEEDITVQTVTWPDMELPLPRNITEGEARGSVILTVKPIFEVSPSPLEPEEPFTFAPEIGATAFAEVENETGEATRPWGFPTPGLGPATAFTSEDLVVQVTAVPGQPHLPGGVVFHYRPGPTRYSLTFEEAQQACPGTGAVIASPEQLQAAYEAGYEQCDAGWLRDQTVRYPIVSPRTPCVGDKDSSPGVRTYGVRPSTETYDVYCFVDRLEGEVFFATRLEQFTFQEALEFCESHNATATTGQLYAAWSRGLDKCYAGWLADGSLRYPIVTPRPACGGDKPGVRTVYLYPNQTGLPDPLSRHHAFCFRGISAVPSPGEEEGGTPTSPSGVEEWIVTQVVPGVAAVPVEEETTAVPSGETTAILEFTTEPENQTEWEPAYTPVGTSPLPGILPTWPPTGAETEESTEGPSATEVPSASEEPSPSEVPFPSEEPSPSEEPFPSVRPFPSVELFPSEEPFPSKEPSPSEEPSASEEPYTPSPPEPSWTELPSSGEESGAPDVSGDFTGSGDVSGHLDFSGQLSGDRASGLPSGDLDSSGLTSTVGSGLTVESGLPSGDEERIEWPSTPTVGELPSGAEILEGSASGVGDLSGLPSGEVLETSASGVGDLSGLPSGEVLETTAPGVEDISGLPSGEVLETTAPGVEDISGLPSGEVLETTAPGVEDISGLPSGEVLETTAPGVEDISGLPSGEVLETTAPGVEDISGLPSGEVLETAAPGVEDISGLPSGEVLETAAPGVEDISGLPSGEVLETAAPGVEDISGLPSGEVLETAAPGVEDISGLPSGEVLETAAPGVEDISGLPSGEVLETAAPGVEDISGLPSGEVLETAAPGVEDISGLPSGEVLETAAPGVEDISGLPSGEVLETAAPGVEDISGLPSGEVLETAAPGVEDISGLPSGEVLETAAPGVEDISGLPSGEVLETTAPGVEEISGLPSGEVLETTAPGVDEISGLPSGEVLETTAPGVEEISGLPSGEVLETSTSAVGDLSGLPSGGEVLEISVSGVEDISGLPSGEVVETSASGIEDVSELPSGEGLETSASGVEDLSRLPSGEEVLEISASGFGDLSGVPSGGEGLETSASEVGTDLSGLPSGREGLETSASGAEDLSGLPSGKEDLVGSASGDLDLGKLPSGTLGSGQAPETSGLPSGFSGEYSGVDLGSGPPSGLPDFSGLPSGFPTVSLVDSTLVEVVTASTASELEGRGTIGISGAGEISGLPSSELDISGRASGLPSGTELSGQASGSPDVSGEIPGLFGVSGQPSGFPDTSGETSGVTELSGLSSGQPGVSGEASGVLYGTSQPFGITDLSGETSGVPDLSGQPSGLPGFSGATSGVPDLVSGTTSGSGESSGITFVDTSLVEVAPTTFKEEEGLGSVELSGLPSGEADLSGKSGMVDVSGQFSGTVDSSGFTSQTPEFSGLPSGIAEVSGESSRAEIGSSLPSGAYYGSGTPSSFPTVSLVDRTLVESVTQAPTAQEAGEGPSGILELSGAHSGAPDMSGEHSGFLDLSGLQSGLIEPSGEPPGTPYFSGDFASTTNVSGESSVAMGTSGEASGLPEVTLITSEFVEGVTEPTISQELGQRPPVTHTPQLFESSGKVSTAGDVSGATPVLPGSGVEVSSVPESSSETSAYPEAGFGASAAPEASREDSGSPDLSETTSAFHEANLERSSGLGVSGSTLTFQEGEASAAPEVSGESTTTSDVGTEAPGLPSATPTASGDRTEISGDLSGHTSQLGVVISTSIPESEWTQQTQRPAETHLEIESSSLLYSGEETHTVETATSPTDASIPASPEWKRESESTAADQEVCEEGWNKYQGHCYRHFPDRETWVDAERRCREQQSHLSSIVTPEEQEFVNNNAQDYQWIGLNDRTIEGDFRWSDGHPMQFENWRPNQPDNFFAAGEDCVVMIWHEKGEWNDVPCNYHLPFTCKKGTVACGEPPVVEHARTFGQKKDRYEINSLVRYQCTEGFVQRHMPTIRCQPSGHWEEPQITCTDPTTYKRRLQKRSSRHPRRSRPSTAH

SEQ ID NO: 755165 - protein, 2309 aa, Homo sapiens
MAQGEQSGIVFHYRAISTRYTLDFDRAQRACLQNSAIIATPEQLQAAYEDGFHQCDAGWLADQTVRYPIHTPREGCYGDKDEFPGVRTYGIRDTNETYDVYCFAEEMEGEVFYATSPEKFTFQEAANECRRLGARLATTGQLYLAWQAGMDMCSAGWLADRSVRYPISKARPNCGGNLLGVRTVYVHANQTGYPDPSSRYDAICYTGEDFVDIPENFFGVGGEEDITVQTVTWPDMELPLPRNITEGEARGSVILTVKPIFEVSPSPLEPEEPFTFAPEIGATAFAEVENETGEATRPWGFPTPGLGPATAFTSEDLVVQVTAVPGQPHLPGGVVFHYRPGPTRYSLTFEEAQQACPGTGAVIASPEQLQAAYEAGYEQCDAGWLRDQTVRYPIVSPRTPCVGDKDSSPGVRTYGVRPSTETYDVYCFVDRLEGEVFFATRLEQFTFQEALEFCESHNATATTGQLYAAWSRGLDKCYAGWLADGSLRYPIVTPRPACGGDKPGVRTVYLYPNQTGLPDPLSRHHAFCFRGISAVPSPGEEEGGTPTSPSGVEEWIVTQVVPGVAAVPVEEETTAVPSGETTAILEFTTEPENQTEWEPAYTPVGTSPLPGILPTWPPTGAETEESTEGPSATEVPSASEEPSPSEVPFPSEEPSPSEEPFPSVRPFPSVELFPSEEPFPSKEPSPSEEPSASEEPYTPSPPEPSWTELPSSGEESGAPDVSGDFTGSGDVSGHLDFSGQLSGDRASGLPSGDLDSSGLTSTVGSGLTVESGLPSGDEERIEWPSTPTVGELPSGAEILEGSASGVGDLSGLPSGEVLETSASGVGDLSGLPSGEVLETTAPGVEDISGLPSGEVLETTAPGVEDISGLPSGEVLETTAPGVEDISGLPSGEVLETTAPGVEDISGLPSGEVLETTAPGVEDISGLPSGEVLETAAPGVEDISGLPSGEVLETAAPGVEDISGLPSGEVLETAAPGVEDISGLPSGEVLETAAPGVEDISGLPSGEVLETAAPGVEDISGLPSGEVLETAAPGVEDISGLPSGEVLETAAPGVEDISGLPSGEVLETAAPGVEDISGLPSGEVLETAAPGVEDISGLPSGEVLETAAPGVEDISGLPSGEVLETAAPGVEDISGLPSGEVLETTAPGVEEISGLPSGEVLETTAPGVDEISGLPSGEVLETTAPGVEEISGLPSGEVLETSTSAVGDLSGLPSGGEVLEISVSGVEDISGLPSGEVVETSASGIEDVSELPSGEGLETSASGVEDLSRLPSGEEVLEISASGFGDLSGVPSGGEGLETSASEVGTDLSGLPSGREGLETSASGAEDLSGLPSGKEDLVGSASGDLDLGKLPSGTLGSGQAPETSGLPSGFSGEYSGVDLGSGPPSGLPDFSGLPSGFPTVSLVDSTLVEVVTASTASELEGRGTIGISGAGEISGLPSSELDISGRASGLPSGTELSGQASGSPDVSGEIPGLFGVSGQPSGFPDTSGETSGVTELSGLSSGQPGVSGEASGVLYGTSQPFGITDLSGETSGVPDLSGQPSGLPGFSGATSGVPDLVSGTTSGSGESSGITFVDTSLVEVAPTTFKEEEGLGSVELSGLPSGEADLSGKSGMVDVSGQFSGTVDSSGFTSQTPEFSGLPSGIAEVSGESSRAEIGSSLPSGAYYGSGTPSSFPTVSLVDRTLVESVTQAPTAQEAGEGPSGILELSGAHSGAPDMSGEHSGFLDLSGLQSGLIEPSGEPPGTPYFSGDFASTTNVSGESSVAMGTSGEASGLPEVTLITSEFVEGVTEPTISQELGQRPPVTHTPQLFESSGKVSTAGDVSGATPVLPGSGVEVSSVPESSSETSAYPEAGFGASAAPEASREDSGSPDLSETTSAFHEANLERSSGLGVSGSTLTFQEGEASAAPEVSGESTTTSDVGTEAPGLPSATPTASGDRTEISGDLSGHTSQLGVVISTSIPESEWTQQTQRPAETHLEIESSSLLYSGEETHTVETATSPTDASIPASPEWKRESESTAAAPARSCAEEPCGAGTCKETEGHVICLCPPGYTGEHCNIDIDECLSSPCLNGATCVDAIDSFTCLCLPSYEGDLCEIDQEVCEEGWNKYQGHCYRHFPDRETWVDAERRCREQQSHLSSIVTPEEQEFVNNNAQDYQWIGLNDRTIEGDFRWSDGHPMQFENWRPNQPDNFFAAGEDCVVMIWHEKGEWNDVPCNYHLPFTCKKGTVACGEPPVVEHARTFGQKKDRYEINSLVRYQCTEGFVQRHMPTIRCQPSGHWEEPQITCTDPTTYKRRLQKRSSRHPRRSRPSTAH

SEQ ID NO: 755166 - protein, 53 aa, Homo sapiens
MKLGARQWVLKTNDQEEGKIPYTFQSFDCFPLGWVPHCDMESMTQTDCLLPAR

SEQ ID NO: 755167 - protein, 37 aa, Homo sapiens
MKLADAPTRRYTHGNQFSPVLRASHSGASLMPHDHYR

SEQ ID NO: 755168 - protein, 191 aa, Homo sapiens
MGTWILFACLLGAAFAMPLPPHPGHPGYINFSYEVLTPLKWYQSIRPPYPSYGYEPMGGWLHHQIIPVLSQQHPPTHTLQPHHHIPVVPAQQPVIPQQPMMPVPGQHSMTPIQHHQPNLPPPAQQPYQPQPVQPQPHQPMQPQPPVHPMQPLPPQPPLPPMFPMQPLPPMLPDLTLEAWPSTDKTKREEVD

SEQ ID NO: 755169 - protein, 338 aa, Homo sapiens
NRKRKQAARAAEEPGAAMDVRALPWLPWLLWLLCRGGGDADSRAPFTPTWPRSREREAAAFRESLNRHRYLNSLFPSENSTAFYGINQFSYLFPEEFKAIYLRSKPSKFPRYSAEVHMSIPNVSLPLRFDWRDKQVVTQVRNQQMCGGCWAFSVVGAVESAYAIKGKPLEDLSVQQVIDCSYNNYGCNGGSTLNALNWLNKMQVKLVKDSEYPFKAQNGLCHYFSGSHSGFSIKGYSAYDFSDQEDEMAKALLTFGPLVVIVDAVSWQDYLGGIIQHHCSSGEANHAVLITGFDKTGSTPYWIVRNSWGSSWGVDGYAHVKMGSNVCGIADSVSSIFV

SEQ ID NO: 755170 - protein, 338 aa, Homo sapiens; identical to SEQ ID NO: 755169

SEQ ID NO: 755171 - protein, 338 aa, Homo sapiens; identical to SEQ ID NO: 755169

SEQ ID NO: 755172 - protein, 292 aa, Homo sapiens
NRKRKQAARAAEEPGAAMDVRALPWLPWLLWLLCRGGGDADSRAPFTPTWPRSREREAAAFRESLNRHRYLNSLFPSENSTAFYGINQFSYLFPEEFKAIYLRSKPSKFPRYSAEVHMSIPNVSLPLRFDWRDKQVVTQVRNQQMCGGCWAFSVVGAVESAYAIKGKPLEDLSVQQVIDCSYNNYGCNGGSTLNALNWLNKMQVKLVKDSEYPFKAQNGLCHYFSGSHSGFSIKGYSAYDFSDQEDEMAKGSTPYWIVRNSWGSSWGVDGYAHVKMGSNVCGIADSVSSIFV

SEQ ID NO: 755173 - protein, 136 aa, Homo sapiens
AGGTRSSATAQISTMKLLTGLVFCSLVLSVSSRSFFSFLGEAFDGARDMWRAYSDMREANYIGSDKYFHARGNYDAAKRGPGGAWAAEVISNARENIQRLTGHGAEDSLADQAANKWGRSGRDPNHFRPAGLPEKY

SEQ ID NO: 755174 - protein, 136 aa, Homo sapiens; identical to SEQ ID NO: 755173

SEQ ID NO: 755175 - protein, 122 aa, Homo sapiens; identical to SEQ ID NO: 755019

SEQ ID NO: 755176 - protein, 122 aa, Homo sapiens; identical to SEQ ID NO: 755019

SEQ ID NO: 755177 - protein, 122 aa, Homo sapiens; identical to SEQ ID NO: 755019

SEQ ID NO: 755178 - protein, 122 aa, Homo sapiens; identical to SEQ ID NO: 755019

SEQ ID NO: 755179 - protein, 136 aa, Homo sapiens; identical to SEQ ID NO: 755173

SEQ ID NO: 755180 - protein, 136 aa, Homo sapiens; identical to SEQ ID NO: 755173

SEQ ID NO: 755181 - protein, 142 aa, Homo sapiens
TSKYIDTYIYHSSATAQISTMKLLTGLVFCSLVLSVSSRSFFSFLGEAFDGARDMWRAYSDMREANYIGSDKYFHARGNYDAAKRGPGGAWAAEVISNARENIQRLTGHGAEDSLADQAANKWGRSGRDPNHFRPAGLPEKY

SEQ ID NO: 755182 - protein, 142 aa, Homo sapiens; identical to SEQ ID NO: 755181

SEQ ID NO: 755183 - protein, 97 aa, Homo sapiens
TSKYIDTYIYHSSATAQISTMKLLTGLVFCSLVLSVSSRSFFSFLGEAFDGARDMWRAYSDMREANYIGSDKYFHARGNYDAAKRGPGGAWAAEVIR

SEQ ID NO: 755184 - protein, 340 aa, Homo sapiens
MGPPHSGPGGVRVGALLLLGVLGLVSGLSLEPVYWNSANKRFQAEGGYVLYPQIGDRLDLLCPRARPPGPHSSPNYEFYKLYLVGGAQGRRCEAPPAPNLLLTCDRPDLDLRFTIKFQEYSPNLWGHEFRSHHDYYIIATSDGTREGLESLQGGVCLTRGMKVLLRVGQSPRGGAVPRKPVSEMPMERDRGAAHSLEPGKENLPGDPTSNATSRGAEGPLPPPSMPAVAGAAGGLALLLLGVAGAGGAMCWRRRRAKPSESRHPGPGSFGRGGSLGLGGGGGMGPREAEPGELGIALRGGGAADPPFCPHYEKVSGDYGHPVYIVQDGPPQSPPNIYYKV

SEQ ID NO: 755185 - protein, 340 aa, Homo sapiens; identical to SEQ ID NO: 755184

SEQ ID NO: 755186 - protein, 340 aa, Homo sapiens; identical to SEQ ID NO: 755184

SEQ ID NO: 755187 - protein, 210 aa, Homo sapiens
MLPLPSGVSSLPVCWFCIALISQSLIPTLWPVQSIHGPVSPRGGAVPRKPVSEMPMERDRGAAHSLEPGKENLPGDPTSNATSRGAEGPLPPPSMPAVAGAAGGLALLLLGVAGAGGAMCWRRRRAKPSESRHPGPGSFGRGGSLGLGGGGGMGPREAEPGELGIALRGGGAADPPFCPHYEKVSGDYGHPVYIVQDGPPQSPPNIYYKV

SEQ ID NO: 755188 - protein, 340 aa, Homo sapiens; identical to SEQ ID NO: 755184

SEQ ID NO: 755189 - protein, 232 aa, Homo sapiens
RCGGRGPRDAAARSASSSSSGFSLHHPLPLPASPLTPPSWARDWFPPLARCPQSQRGWGSGSAPPSSLPGPAPHAAPARSPAPPVPHLGGLTDPGVLARGPGARRAPADGPWKGSGGAERSAAGARAQQEAGPRGRWGHQLPGWSGLKSQAAKAATPGGGRLWGRSLGLGGGGGMGPREAEPGELGIALRGGGAADPPFCPHYEKVSGDYGHPVYIVQDGPPQSPPNIYYKV

SEQ ID NO: 755190 - protein, 123 aa, Homo sapiens
RCGGRGPRDAAARSASSSSSGFSLHHPLPLPASPLTPPSWARDWFPSRLAMGAPLCLSVPGSFFLGEGHRLSLLSDHDPGILVPLTHPELGAGTAHLLVGTAFFLPLTGFLFSISYSFPLFRL

SEQ ID NO: 755191 - protein, 683 aa, Homo sapiens
MNTSIPYQQNPYNPRGSSNVIQCYRCGDTCKGEVVRVHNNHFHIRCFTCQVCGCGLAQSGFFFKNQEYICTQDYQQLYGTRCDSCRDFITGEVISALGRTYHPKCFVCSLCRKPFPIGDKVTFSGKECVCQTCSQSMASSKPIKIRGPSHCAGCKEEIKHGQSLLALDKQWHVSCFKCQTCSVILTGEYISKDGVPYCESDYHAQFGIKCETCDRYISGRVLEAGGKHYHPTCARCVRCHQMFTEGEEMYLTGSEVWHPICKQAARAEKKLKHRRTSETSISPPGSSIGSPNRVICAKVDNEILNYKDLAALPKVKSIYEVQRPDLISYEPHSRYMSDEMLERCGYGESLGTLSPYSQDIYENLDLRQRRASSPGYIDSPTYSRQGMSPTFSRSPHHYYRSGPESGRSSPYHSQLDVRSSTPTSYQAPKHFHIPAGDSNIYRKPPIYKRHGDLSTATKSKTSEDISQTSKYSPIYSPDPYYASESEYWTYHGSPKVPRARRFSSGGEEDDFDRSMHKLQSGIGRLILKEEMKARSSSYADPWTPPRSSTSSREALHTAGYEMSLNGSPRSHYLADSDPLISKSASLPAYRRNGLHRTPSADLFHYDSMNAVNWGMREYKIYPYELLLVTTRGRNRLPKDVDRTRLERHLSQEEFYQVFGMTISEFDRLALWKRNELKKQARLF

SEQ ID NO: 755192 - protein, 257 aa, Homo sapiens
GRVVNLAEACIGSPNRVICDIYENLDLRQRRASSPGYIDSPTYSRQGMSPTFSRSPHHYYRSGDLSTATKSKTSEDISQTSKYSPIYSPDPYYASESEYWTYHGSPKVPRARRFSSGGEEDDFDRSMHKLQSGIGRLILKEEMKARSSSYADPWTPPRSSTSSREALHTAGYEMSLNGSPRSHYLADSDPLISKSASLPAYRRNGLHRTPSADLFHYDSMNAVNWGMREYKYKVKDVHRPWGSPGFLEPLHWGSPGG

SEQ ID NO: 755193 - protein, 544 aa, Homo sapiens
MNTSIPYQQNPYNPRGSSNVIQCYRCGDTCKGEVVRVHNNHFHIRCFTCQVCGCGLAQSGFFFKNQEYICTQDYQQLYGTRCDSCRDFITGEVISALGRTYHPKCFVCSLCRKPFPIGDKVTFSGKECVCQTCSQSMASSKPIKIRGPSHCAGCKEEIKHGQSLLALDKQWHVSCFKCQTCSVILTGEYISKDGVPYCESDYHAQFGIKCETCDRYISGRVLEAGGKHYHPTCARCVRCHQMFTEGEEMYLTGSEVWHPICKQAARAEKKLKHRRTSETSISPPGSSIGSPNRVICDIYENLDLRQRRASSPGYIDSPTYSRQGMSPTFSRSPHHYYRSGDLSTATKSKTSEDISQTSKYSPIYSPDPYYASESEYWTYHGSPKVPRARRFSSGGEEDDFDRSMHKLQSGIGRLILKEEMKARSSSYADPWTPPRSSTSSREALHTAGYEMSLNGSPRSHYLADSDPLISKSASLPAYRRNGLHRTPSADLFHYDSMNAVNWGMREYKIYPYELLLVTTRGRNRLPKDVDRTRLEGNFWKSGCL

SEQ ID NO: 755194 - protein, 544 aa, Homo sapiens; identical to SEQ ID NO: 755193

SEQ ID NO: 755195 - protein, 572 aa, Homo sapiens
MNTSIPYQQNPYNPRGSSNVIQCYRCGDTCKGEVVRVHNNHFHIRCFTCQVCGCGLAQSGFFFKNQEYICTQDYQQLYGTRCDSCRDFITGEVISALGRTYHPKCFVCSLCRKPFPIGDKVTFSGKECVCQTCSQSMASSKPIKIRGPSHCAGCKEEIKHGQSLLALDKQWHVSCFKCQTCSVILTGEYISKDGVPYCESDYHAQFGIKCETCDRYISGRVLEAGGKHYHPTCARCVRCHQMFTEGEEMYLTGSEVWHPICKQAARAEKKLKHRRTSETSISPPGSSIGSPNRVICDIYENLDLRQRRASSPGYIDSPTYSRQGMSPTFSRSPHHYYRSGDLSTATKSKTSEDISQTSKYSPIYSPDPYYASESEYWTYHGSPKVPRARRFSSGGEEDDFDRSMHKLQSGIGRLILKEEMKARSSSYADPWTPPRSSTSSREALHTAGYEMSLNGSPRSHYLADSDPLISKSASLPAYRRNGLHRTPSADLFHYDSMNAVNWGMREYKIYPYELLLVTTRGRNRLPKDVDRTRLERHLSQEEFYQVFGMTISEFDRLALWKRNELKKQARLF

SEQ ID NO: 755196 - protein, 588 aa, Homo sapiens
MNTSIPYQQNPYNPRGSSNVIQCYRCGDTCKGEVVRVHNNHFHIRCFTCQVCGCGLAQSGFFFKNQEYICTQDYQQLYGTRCDSCRDFITGEVISALGRTYHPKCFVCSLCRKPFPIGDKVTFSGKECVCQTCSQSMASSKPIKIRGPSHCAGCKEEIKHGQSLLALDKQWHVSCFKCQTCSVILTGEYISKDGVPYCESDYHAQFGIKCETCDRYISGRVLEAGGKHYHPTCARCVRCHQMFTEGEEMYLTGSEVWHPICKQAARAEKKLKHRRTSETSISPPGSSIGSPNRVICDIYENLDLRQRRASSPGYIDSPTYSRQGMSPTFSRSPHHYYRSAGDSNIYRKPPIYKRHGDLSTATKSKTSEDISQTSKYSPIYSPDPYYASESEYWTYHGSPKVPRARRFSSGGEEDDFDRSMHKLQSGIGRLILKEEMKARSSSYADPWTPPRSSTSSREALHTAGYEMSLNGSPRSHYLADSDPLISKSASLPAYRRNGLHRTPSADLFHYDSMNAVNWGMREYKIYPYELLLVTTRGRNRLPKDVDRTRLERHLSQEEFYQVFGMTISEFDRLALWKRNELKKQARLF

SEQ ID NO: 755197 - protein, 531 aa, Homo sapiens
ALVFLLVPQVCGCGLAQSGFFFKNQEYICTQDYQQLYGTRCDSCRDFITGEVISALGRTYHPKCFVCSLCRKPFPIGDKVTFSGKECVCQTCSQSMASSKPIKIRGPSHCAGCKEEIKHGQSLLALDKQWHVSCFKCQTCSVILTGEYISKDGVPYCESDYHAQFGIKCETCDRYISGRVLEAGGKHYHPTCARCVRCHQMFTEGEEMYLTGSEVWHPICKQAARAEKKLKHRRTSETSISPPGSSIGSPNRVICDIYENLDLRQRRASSPGYIDSPTYSRQGMSPTFSRSPHHYYRSGDLSTATKSKTSEDISQTSKYSPIYSPDPYYASESEYWTYHGSPKVPRARRFSSGGEEDDFDRSMHKLQSGIGRLILKEEMKARSSSYADPWTPPRSSTSSREALHTAGYEMSLNGSPRSHYLADSDPLISKSASLPAYRRNGLHRTPSADLFHYDSMNAVNWGMREYKIYPYELLLVTTRGRNRLPKDVDRTRLERHLSQEEFYQVFGMTISEFDRLALWKRNELKKQARLF

SEQ ID NO: 755198 - protein, 572 aa, Homo sapiens; identical to SEQ ID NO: 755195

SEQ ID NO: 755199 - protein, 572 aa, Homo sapiens; identical to SEQ ID NO: 755195

SEQ ID NO: 755200 - protein, 534 aa, Homo sapiens
MNTSIPYQQNPYNPRGSSNVIQCYRCGDTCKGEVVRVHNNHFHIRCFTCQVCGCGLAQSGFFFKNQEYICTQDYQQLYGTRCDSCRDFITGEVISALGRTYHPKCFVCSLCRKPFPIGDKVTFSGKECVCQTCSQSMASSKPIKIRGPSHCAGCKEEIKHGQSLLALDKQWHVSCFKCQTCSVILTGEYISKDGVPYCESDYHAQFGIKCETCDRYISGRVLEAGGKHYHPTCARCVRCHQMFTEGEEMYLTGSEVWHPICKQAARAEKKLKHRRTSETSISPPGSSIGSPNRVICDIYENLDLRQRRASSPGYIDSPTYSRQGMSPTFSRSPHHYYRSGDLSTATKSKTSEDISQTSKYSPIYSPDPYYASESEYWTYHGSPKVPRARRFSSGGEEDDFDRSMHKLQSGIGRLILKEEMKARSSSYADPWTPPRSSTSSREALHTAGYEMSLNGSPRSHYLADSDPLISKSASLPAYRRNGLHRTPSADLFHYDSMNAVNWGMREYKYKVKDVHRPWGSPGFLEPLHWGSPGG

SEQ ID NO: 755201 - protein, 317 aa, Homo sapiens
MNTSIPYQQNPYNPRGSSNVIQCYRCGDTCKGEVVRVHNNHFHIRCFTCQVCGCGLAQSGFFFKNQEYICTQDYQQLYGTRCDSCRDFITGEVISALGRTYHPKCFVCSLCRKPFPIGDKVTFSGKECVCQTCSQSMASSKPIKIRGPSHCAGCKEEIKHGQSLLALDKQWHVSCFKCQTCSVILTGEYISKWVPLLLPQLPGPLHSVRPAPLSPCLHLQHHLPSFPSAAAFWPNSIFPSSLFPPLDPPGGVSLCLRHPPCSLHACCPFSPFWSRSPCLPLRPSLIYCPVLGPQSTLLFPSHRLPPLVITYLSLVTL

SEQ ID NO: 755202 - protein, 415 aa, Homo sapiens
  misc_feature (293)..(293): Xaa can be any naturally occurring amino acid
  misc_feature (295)..(295): Xaa can be any naturally occurring amino acid
MNTSIPYQQNPYNPRGSSNVIQCYRCGDTCKGEVVRVHNNHFHIRCFTCQVCGCGLAQSGFFFKNQEYICTQDYQQLYGTRCDSCRDFITGEVISALGRTYHPKCFVCSLCRKPFPIGDKVTFSGKECVCQTCSQSMASSKPIKIRGPSHCAGCKEEIKHGQSLLALDKQWHVSCFKCQTCSVILTGEYISKDGVPYCESDYHAQFGIKCETCDRYISGRVLEAGGKHYHPTCARCVRCHQMFTEGEEMYLTGSEVWHPICKQAARAEKKLKHRRHLKILIYPLESALGYPNXVXCAKVDNEILNYKDLAALPKVKSIYEVQRPDLISYEPHSRYMSDEMLERCGYGESLGTLSPYSQDIYENLDLRQRRASSPGYIDSPTYSRQGMSPTFSRSPHHYYRSARKQSQACFCQRGA

SEQ ID NO: 755203 - protein, 91 aa, Homo sapiens
IFITHSPGSGTMQGTGCPEGTCSTHCCLQLPLHLASSCCSLSLSPHPRLPCLLQRHLSQEEFYQVFGMTISEFDRLALWKRNELKKQARLF

SEQ ID NO: 755204 - protein, 598 aa, Homo sapiens
MNTSIPYQQNPYNPRGSSNVIQCYRCGDTCKGEVVRVHNNHFHIRCFTCQVCGCGLAQSGFFFKNQEYICTQDYQQLYGTRCDSCRDFITGEVISALGRTYHPKCFVCSLCRTSPGMESSSRLLLYLPHHHHLLIQQVKPFPIGDKVTFSGKECVCQTCSQSMASSKPIKIRGPSHCAGCKEEIKHGQSLLALDKQWHVSCFKCQTCSVILTGEYISKDGVPYCESDYHAQFGIKCETCDRYISGRVLEAGGKHYHPTCARCVRCHQMFTEGEEMYLTGSEVWHPICKQAARAEKKLKHRRTSETSISPPGSSIGSPNRVICDIYENLDLRQRRASSPGYIDSPTYSRQGMSPTFSRSPHHYYRSGDLSTATKSKTSEDISQTSKYSPIYSPDPYYASESEYWTYHGSPKVPRARRFSSGGEEDDFDRSMHKLQSGIGRLILKEEMKARSSSYADPWTPPRSSTSSREALHTAGYEMSLNGSPRSHYLADSDPLISKSASLPAYRRNGLHRTPSADLFHYDSMNAVNWGMREYKIYPYELLLVTTRGRNRLPKDVDRTRLERHLSQEEFYQVFGMTISEFDRLALWKRNELKKQARLF

SEQ ID NO: 755205 - protein, 132 aa, Homo sapiens
MECSLTETESNYCAQLAQIQAQIGALEEQLHQVRTETEGQKLEYEQLLDIKVHLEKEIETYCLLIDGEDGSCSKSKGYGGPGNQTKDSSKTTIVKTVVEEIDPRGKVLSSRVHTVEEKSTKVNNKNEQRVSS

SEQ ID NO: 755206 - protein, 88 aa, Homo sapiens
MSGPGLEVGAFLALSHCYFQIISPLPSCKNHRSFDVYVIWIYHPFLDLLTIFCQHPSQISSFTEVFHSWQKVFHSNPVPSFILGDFHT

SEQ ID NO: 755207 - protein, 215 aa, Homo sapiens
MEFDCEGLRRLLGKYKFRDLTVEELRNVNVFFPHFKYSMDTYVFKDSSQKDLLNFTGTIPVMYQGNTYNIPIRFWILDSHPFAPPICFLKPTANMGILVGKHVDAQGRIYLPYLQNWSHPKSVIVGLIKEMIAKFQEELPMYSLSSSDEARQVDLLAYIAKITEGVSDTNSKSWANHENKTVNKITVVGGGELGIACTLAISAKVESRSVTQAGV

SEQ ID NO: 755208 - protein, 251 aa, Homo sapiens
RIPGAAAAEPGALNAGGISSLGRGGALDRREVWSSAASVLQQVRKKVRGLESWDLARDRPGDGVRLRGPETAAWQVQVQGPNCGRTKECKCIFPTFQIFHGHLCVLLRNPGLECSDTIMAYCKLHLPGSSHLPISASPVTGTIGNTYNIPIRFWILDSHPFAPPICFLKPTANMGILVGKHVDAQGRIYLPYLQNWSHPKSVIVGLIKEMIAKFQEELPMYSLSSSDEARQVDLLAYIAKITEGLYICQAD

SEQ ID NO: 755209 - protein, 341 aa, Homo sapiens
MDTYVFKDSSQKDLLNFTGTIPVMYQGNTYNIPIRFWILDSHPFAPPICFLKPTANMGILVGKHVDAQGRIYLPYLQNWSHPKSVIVGLIKEMIAKFQEELPMYSLSSSDEARQVDLLAYIAKITEGVSDTNSKSWANHENKTVNKITVVGGGELGIACTLAISAKGIADRLVLLDLSEGTKGATMDLEIFNLPNVEISKDLSASAHSKVVIFTVNSLGSSQSYLDVVQSNVDMFRALVPALGHYSQHSVLLVASQPVEIMTYVTWKLSTFPANRVIGIGCNLDSQRLQYIITNVLKAQTSGKEVWVIGEQGEDKVLTWSGQEEVVSHTSQVQLSNRDIMI

SEQ ID NO: 755210 - protein, 471 aa, Homo sapiens
MEFDCEGLRRLLGKYKFRDLTVEELRNVNVFFPHFKYSMDTYVFKDSSQKDLLNFTGTIPVMYQGNTYNIPIRFWILDSHPFAPPICFLKPTANMGILVGKHVDAQGRIYLPYLQNWSHPKSVIVGLIKEMIAKFQEELPMYSLSSSDEARQVDLLAYIAKITEGVSDTNSKSWANHENKTVNKITVVGGGELGIACTLAISAKGIADRLVLLDLSEGTKGATMDLEIFNLPNVEISKDLSASAHSKVVIFTVNSLGSSQSYLDVVQSNVDMFRALVPALGHYSQHSVLLVASQPVEIMTYVTWKLSTFPANRVIGIGCNLDSQRLQYIITNVLKAQTSGKEVWVIGEQGEDKVLTWSGQEEVVSHTSQVQLSNRAMELLRVKGQRSWSVGLSVADMVDSIVNNKKKVHSVSALAKGYYDINSEVFLSLPCILGTNGVSEVIKTTLKEDTVTEKLQSSASSIHSLQQQLKL

SEQ ID NO: 755211 - protein, 371 aa, Homo sapiens
IITSRGSSPTMATAASNPYSILSSTSLVHADSAGMQQGSPFRNPQKLLQSDYLQGVPSNGHPLGHHWVTSLSDGGPWSSTLATSPLDQQDVKPGREDLQLGAIIHHRSPHVAHHSPHTNHPNAWGASPAPNPSITSSGQPLNVYSQPGFTVSGMLEHGGLTPPPAAASAQSLHPVLREPPDHGELGSHHCQDHSDEETPTSDELEQFAKQFKQRRIKLGFTQADVGLALGTLYGNVFSQTTICRFEALQLSFKNMCKLKPLLNKWLEEADSSTGSPTSIDKIAAQGRKRKKRTSIEVSVKGVLETHFLKCPKPAAQEISSLADSLQLEKEVVRVWFCNRRQKEKRMTPPGDQQPHEVYSHTVKTDTSCHDL

SEQ ID NO: 755212 - protein, 107 aa, Homo sapiens
DKREGLNQQWKLSTPTRNGTCLEAEDEQMACNLDYQPVEAAALTQVLRSSYREKGICIMAPGSKRNGIALLGRILIHKQENKENVFLLLLSLVLTHFSEAVSLCGKI

SEQ ID NO: 755213 - protein, 218 aa, Homo sapiens
FRDSSVLFCGVTQAHYTYNNLSSDSKIRTKQLFEFMNFLAENVIFCYMGLALFTFQNHIFNALFILGAFLAILVARACNIYPLSFLLNLGRKQKIPWNFQHMMMFSGLRGAIAFALAIRNTESQPKQMMFTTTLLLVFFTVWVFGGGTTPMLTWLQIRVGVDLDENLKEDPSSQNQEANNLAQNMTKAESARILRMWYSFDHKSSETNLTHSVLDDYT

SEQ ID NO: 755214 - protein, 166 aa, Homo sapiens
FRDSSVLFCGVTQAHYTYNNLSSDSKIRTKQLFEFMNFLAENVIFCYMGLALFTFQNHIFNALFILGAFLAILVARACNIYPLSFLLNLGRKQKIPWNFQHMMMFSGLRGAIAFALAIRNTESQPKQMMFTTTLLLVFFTVWVFGGGTTPMLTWLQIRLFSKNTTK

SEQ ID NO: 755215 - protein, 93 aa, Homo sapiens
SLCPGLKLSSFLRDLNSVRDVVIEGPLSGAVVVEGGTLLELRTPLSHMVVFLSRMSGERSPNSSPEFCEIEQMRTPTIEVDPIQTMHLPPKGQ

SEQ ID NO: 755216 - protein, 190 aa, Homo sapiens
MASRGKTETSKLKQNLEEQLDRLMQQLQDLEECREELDTDEYEETKKETLEQLSEFNDSLKKIMSGNMTLVDELSGMQLAIQAAISQAFKTPEVIRLFAKKQPGQLRTRLAEMDRDLMVGKLERDLYTQQKVEILTALRKLGEKLTADDEAFLSANAGAILSQFEKVSTDLGSGDKILALASFEVEKTKK

SEQ ID NO: 755217 - protein, 190 aa, Homo sapiens; identical to SEQ ID NO: 755216

SEQ ID NO: 755218 - protein, 190 aa, Homo sapiens; identical to SEQ ID NO: 755216

SEQ ID NO: 755219 - protein, 190 aa, Homo sapiens; identical to SEQ ID NO: 755216

SEQ ID NO: 755220 - protein, 176 aa, Homo sapiens
MASRGKTETSKLKQNLEEQLDRLMQQLQDLEECREELDTDEYEETKKETLEQLSEFNDSLKKIMSGNMTLVDELSGMQLAIQAAISQAFKTPEVIRLFAKKQPGQLRTRLAEMDRDLMVGKLERDLYTQQKVEILTALRKLGEKLTADDEAFLSANAGAILSQFEKVSTDLVIAKK

SEQ ID NO: 755221 - protein, 190 aa, Homo sapiens; identical to SEQ ID NO: 755216

SEQ ID NO: 755222 - protein, 190 aa, Homo sapiens; identical to SEQ ID NO: 755216

SEQ ID NO: 755223 - protein, 205 aa, Homo sapiens
MASRGKTETSKLKQNLEEQLDRLMQQLQDLEECREELDTDEYEETKKETLEQLSEFNDSLKKIMSGNMTLVDELSGMQLAIQAAISQAFKTPEVIRLFAKKQPGQLRTRLAEMDRDLMVGKLERDLYTQQKVEILTALRKLGEKLTADDEAFLSANAGAILSQFEKVSTDLGRPPSYMNYLLDSHPSKNIDVPSKISFLLKIQDL

SEQ ID NO: 755224 - protein, 69 aa, Homo sapiens
VRASSGSAPPARSARPVPSASPPRGGLNFEPFVVLMNNFIFLKFMTLGTSRTGGLCNLRPVGTVQRSEY

SEQ ID NO: 755225 - protein, 205 aa, Homo sapiens; identical to SEQ ID NO: 755223

SEQ ID NO: 755226 - protein, 69 aa, Homo sapiens; identical to SEQ ID NO: 755224

SEQ ID NO: 755227 - protein, 102 aa, Homo sapiens
ALERRLRFGFEPSSPGPNAGLASRLGSGRRPSTLRPLSPALELGAGCQWKRGAWLCDSFILRRREPQTRCALKRGGKRGQPRMKGRAPAGLHCARRRGAGRG

SEQ ID NO: 755228 - protein, 354 aa, Homo sapiens
MGEQPIFSTRAHVFQIDPNTKKNWVPTSKHAVTVSYFYDSTRNVYRIISLDGSKAIINSTITPNMTFTKTSQKFGQWADSRANTVYGLGFSSEHHLSKFAEKFQEFKEAARLAKEKSQEKMELTSTPSQESAGGDLQSPLTPESINGTDDERTPDVTQNSEPRAEPTQNALPFSHSSAISKHWEAELATLKGNNAKLTAALLESTANVKQWKQQLAAYQEEAERLHKRVTELECVSSQANAVHTHKTELNQTIQELEETLKLKEEEIERLKQEIDNARELQEQRDSLTQKLQEVEIRNKDLEGQLSDLEQRLEKSQNEQEAFRNNLKTLLEILDGKIFELTELRDNLAKLLECS

SEQ ID NO: 755229 - protein, 184 aa, Homo sapiens
FLFYFSSAISKHWEAELATLKGNNAKLTAALLESTANVKQWKQQLAAYQEEAERLHKRVTELECVSSQANAVHTHKTELNQTIQELEETLKLKEEEIERLKQEIDNARELQEQRDSLTQKLQEVEIRNKDLEGQLSDLEQRLEKSQNEQEAFRNNLKTLLEILDGKIFELTELRDNLAKLLECS

SEQ ID NO: 755230 - protein, 155 aa, Homo sapiens
EPAPSLWVLGVCWWLAVGAAEESCAAAHTVCLSSQSGVNAVSAGVCWVLSLVISVPLKWAQKLKEEEIERLKQEIDNARELQEQRDSLTQKLQEVEIRNKDLEGQLSDLEQRLEKSQNEQEAFRNNLKTLLEILDGKIFELTELRDNLAKLLECS

SEQ ID NO: 755231 - protein, 354 aa, Homo sapiens; identical to SEQ ID NO: 755228

SEQ ID NO: 755232 - protein, 238 aa, Homo sapiens
MGEQPIFSTRAHVFQIDPNTKKNWVPTSKHAVTVSYFYDSTRNVYRIISLDGSKAIINSTITPNMTFTKTSQKFGQWADSRANTVYGLGFSSEHHLSKFAEKFQEFKEAARLAKEKSQEKMELTSTPSQESAGGDLQSPLTPESINGTDDERTPDVTQNSEPRAEPTQNALPFSHSSAISKHWEAELATLKGNNAKLTAALLESTANVKQWKQQLAAYQEEAERLHKRVISGLMSIGI

SEQ ID NO: 755233 - protein, 107 aa, Homo sapiens
CLGDSRDPLKWAQKLKEEEIERLKQEIDNARELQEQRDSLTQKLQEVEIRNKDLEGQLSDLEQRLEKSQNEQEAFRNNLKTLLEILDGKIFELTELRDNLAKLLECS

SEQ ID NO: 755234 - protein, 354 aa, Homo sapiens; identical to SEQ ID NO: 755228

SEQ ID NO: 755235 - protein, 107 aa, Homo sapiens; identical to SEQ ID NO: 755233

SEQ ID NO: 755236 - protein, 94 aa, Homo sapiens
GIQVTKRFSGDTESRLQKIMVLDGFLVCKKLQEVEIRNKDLEGQLSDLEQRLEKSQNEQEAFRNNLKTLLEILDGKIFELTELRDNLAKLLECS

SEQ ID NO: 755237 - protein, 102 aa, Homo sapiens; identical to SEQ ID NO: 755227

SEQ ID NO: 755238 - protein, 527 aa, Homo sapiens
AVRGVGARVYADAPAKLLLPPPAAWDLAVRLRGAEAASERQVYSVTMKLLLLHPAFQSCLLLTLLGLWRTTPEAHASSPGAPAISAASFLQDLIHRYGEGDSLTLQQLKALLNHLDVGVGRGNVTQHVQGHRNLSTCFSSGDLFTAHNFSEQSRIGSSELQEFCPTILQQLDSRACTSENQENEENEQTEEGRPSAVEVWGYGLLCVTVISLCSLLGASVVPFMKKTFYKRLLLYFIALAIGTLYSNALFQLIPEAFGFNPLEDYYVSKSAVVFGGFYLFFFTEKILKILLKQKNEHHHGHSHYASESLPSKKDQEEGVMEKLQNGDLDHMIPQHCSSELDGKAPMVDEKVIVGSLSVQDLQASQSACYWLKGVRYSDIGTLAWMITLSDGLHNFIDGLAIGASFTVSVFQGISTSVAILCEEFPHELGDFVILLNAGMSIQQALFFNFLSACCCYLGLAFGILAGSHFSANWIFALAGGMFLYISLADMMEFCSVAQAGVQWCHLSSLQPLPLGLKRLSCLSLPSN

SEQ ID NO: 755239 - protein, 538 aa, Homo sapiens
AVRGVGARVYADAPAKLLLPPPAAWDLAVRLRGAEAASERQVYSVTMKLLLLHPAFQSCLLLTLLGLWRTTPEAHASSPGAPAISAASFLQDLIHRYGEGDSLTLQQLKALLNHLDVGVGRGNVTQHVQGHRNLSTCFSSGDLFTAHNFSEQSRIGSSELQEFCPTILQQLDSRACTSENQENEENEQTEEGRPSAVEVWGYGLLCVTVISLCSLLGASVVPFMKKTFYKRLLLYFIALAIGTLYSNALFQLIPEAFGFNPLEDYYVSKSAVVFGGFYLFFFTEKILKILLKQKNEHHHGHSHYASESLPSKKDQEEGVMEKLQNGDLDHMIPQHCSSELDGKAPMVDEKVIVGSLSVQDLQASQSACYWLKGVRYSDIGTLAWMITLSDGLHNFIDGLAIGASFTVSVFQGISTSVAILCEEFPHELGDFVILLNAGMSIQQALFFNFLSACCCYLGLAFGILAGSHFSANWIFALAGGMFLYISLADMFPEMNEVCQEDERKGSILIPFIIQNLGLLTGFTIMVVLTMYSGQIQIG

SEQ ID NO: 755240 - protein, 67 aa, Homo sapiens
IARYEAALRDVLYISLGLIFPEMNEVCQEDERKGSILIPFIIQNLGLLTGFTIMVVLTMYSGQIQIG

SEQ ID NO: 755241 - protein, 538 aa, Homo sapiens; identical to SEQ ID NO: 755239

SEQ ID NO: 755242 - protein, 538 aa, Homo sapiens; identical to SEQ ID NO: 755239

SEQ ID NO: 755243 - protein, 538 aa, Homo sapiens; identical to SEQ ID NO: 755239

SEQ ID NO: 755244 - protein, 538 aa, Homo sapiens; identical to SEQ ID NO: 755239

SEQ ID NO: 755245 - protein, 83 aa, Homo sapiens
GPPQAAGVSPPSVIEALVCSCSSTVWGFGFLSVSLINLASLLGVLVLPCTEKAFFSRVLTYFIALSIGTLLSNALFQLIPEVQ

SEQ ID NO: 755246 - protein, 538 aa, Homo sapiens; identical to SEQ ID NO: 755239

SEQ ID NO: 755247 - protein, 538 aa, Homo sapiens
AVRGVGARVYADAPAKLLLPPPAAWDLAVRLRGAEAASERQVYSVTMKLLLLHPAFQSCLLLTLLGLWRTTPEAHASSPGAPAISAASFLQDLIHRYGEGDSLTLQQLKALLNHLDVGVGRGNVTQHVQGHRNLSTCFSSGDLFTAHNFSEQSRIGSSELQEFCPTILQQLDSRACTSENQENEENEQTEEGRPSAVEVWGFGFLSVSLINLASLLGVLVLPCTEKAFFSRVLTYFIALSIGTLLSNALFQLIPEAFGFNPLEDYYVSKSAVVFGGFYLFFFTEKILKILLKQKNEHHHGHSHYASESLPSKKDQEEGVMEKLQNGDLDHMIPQHCSSELDGKAPMVDEKVIVGSLSVQDLQASQSACYWLKGVRYSDIGTLAWMITLSDGLHNFIDGLAIGASFTVSVFQGISTSVAILCEEFPHELGDFVILLNAGMSIQQALFFNFLSACCCYLGLAFGILAGSHFSANWIFALAGGMFLYISLADMFPEMNEVCQEDERKGSILIPFIIQNLGLLTGFTIMVVLTMYSGQIQIG

SEQ ID NO: 755248 - protein, 538 aa, Homo sapiens; identical to SEQ ID NO: 755239

SEQ ID NO: 755249 - protein, 538 aa, Homo sapiens; identical to SEQ ID NO: 755239

SEQ ID NO: 755250 - protein, 538 aa, Homo sapiens; identical to SEQ ID NO: 755239

SEQ ID NO: 755251 - protein, 538 aa, Homo sapiens; identical to SEQ ID NO: 755239

SEQ ID NO: 755252 - protein, 44 aa, Homo sapiens
MITLSDGLHNFIDGLAIGASFTVSVFQGISTSVAILCEEFPHEL

SEQ ID NO: 755253 - protein, 191 aa, Homo sapiens
MAGSSTGGGGVGETKVIYHLDEEETPYLVKIPVPAERITLGDFKSVLQRPAGAKYFFKSMDQDFGVVKEEISDDNARLPCFNGRVVSWLVSSDNPQPEMAPPVHEPRAELAPPAPPLPPLPPERTSGIGDSRPPSFHPNVSSSHENLEPETETESVVSLRRERPRRRDSSEHGVGVHEFVAPSGWVPFGRL

SEQ ID NO: 755254 - protein, 70 aa, Homo sapiens
DNASPLECRGAAHSSATGKKAHKQGHQHRNMPAAHTSGQSHQPAKSSSGPQTSGPDAARKLHMPGIPRVL

SEQ ID NO: 755255 - protein, 67 aa, Homo sapiens
CPTCRRFQVNDMNFENMSNDDAVRVLRDIVHKPGPIVLTVAKCWDPSPQAYFTLPRTVTCKGSRARN

SEQ ID NO: 755256 - protein, 710 aa, Homo sapiens
IGPAGALLEWIGRHGGAHVYFGPHWDFLAYGGADCTMLRVVKEEISDDNARLPCFNGRVVSWLVSSDNPQPEMAPPVHEPRAELAPPAPPLPPLPPERTSGIGDSRPPSFHPNVSSSHENLEPETETESVVSLRRERPRRRDSSEHGAGGHRTGGPSRLERHLAGYESSSTLMTSELESTSLGDSDEEDTMSRFSSSTEQSSASRLLKRHRRRRKQRPPRLERTSSFSSVTDSTMSLNIITVTLNMEKYNFLGISIVGQSNERGDGGIYIGSIMKGGAVAADGRIEPGDMLLQVNDMNFENMSNDDAVRVLRDIVHKPGPIVLTVAKCWDPSPQAYFTLPRNEPIQPIDPAAWVSHSAALTGTFPAYPGSSSMSTITSGSSLPDGCEGRGLSVHTDMASVTKAMAAPESGLEVRDRMWLKITIPNAFLGSDVVDWLYHHVEGFPERREARKYASGLLKAGLIRHTVNKITFSEQCYYVFGDLSGGCESYLVNLSLNDNDGSSGASDQDTLAPLPGATPWPLLPTFSYQYPAPHPYSPQPPPYHELSSYTYGGGSASSQHSEGSRSSGSTRSDGGAGRTGRPEERAPESKSGSGSESEPSSRGGSLRRGGEASGTSDGGPPPSRGSTGGAPNLRAHPGLHPYGPPPGMALPYNPMMVVMMPPPPPPVPPAVQPPGAPPVRDLGSVPPELTASRQSFHMAMGNPSEFFVDVM

SEQ ID NO: 755257 - protein, 586 aa, Homo sapiens
MAGSSTGGGGVGETKVIYHLDEEETPYLVKIPVPAERITLGDFKSVLQRPAGAKYFFKSMDQDFGVVKEEISDDNARLPCFNGRVVSWLVSSDNPQPEMAPPVHEPRAELAPPAPPLPPLPPERTSGIGDSRPPSFHPNVSSSHENLEPETETESVVSLRRERPRRRDSSEHGAGGHRTGGPSRLERHLAGYESSSTLMTSELESTSLGDSDEEDTMSRFSSSTEQSSASRLLKRHRRRRKQRPPRLERTSSFSSVTDSTMSLNIITVTLNMEKYNFLGISIVGQSNERGDGGIYIGSIMKGGAVAADGRIEPGDMLLQVNDMNFENMSNDDAVRVLRDIVHKPGPIVLTVAKCWDPSPQAYFTLPRNEPIQPIDPAAWVSHSAALTGTFPAYPGSSSMSTITSGSSLPDGCEGRGLSVHTDMASVTKAMAAPESGLEVRDRMWLKITIPNAFLGSDVVDWLYHHVEGFPERREARKYASGLLKAGLIRHTVNKITFSEQCYYVFGDLSGGCESYLVNLSLNDNDGSSGASDQDTLAPLPGATPWPLLPTFSYQYPAPHPYSPQPPPYHDFHMAMGNPSEFFVDVM

SEQ ID NO: 755258 - protein, 73 aa, Homo sapiens
QRREQELEEEPEAFFQLWVLPGSDVVDWLYHHVEGFPERREARKYASGLLKAGLIRHTVNKITFSEQCYYVFG

SEQ ID NO: 755259 - protein, 736 aa, Homo sapiens
MAGSSTGGGGVGETKVIYHLDEEETPYLVKIPVPAERITLGDFKSVLQRPAGAKYFFKSMDQDFGVVKEEISDDNARLPCFNGRVVSWLVSSDNPQPEMAPPVHEPRAELAPPAPPLPPLPPERTSGIGDSRPPSFHPNVSSSHENLEPETETESVVSLRRERPRRRDSSEHGAGGHRTGGPSRLERHLAGYESSSTLMTSELESTSLGDSDEEDTMSRFSSSTEQSSASRLLKRHRRRRKQRPPRLERTSSFSSVTDSTMSLNIITVTLNMEKYNFLGISIVGQSNERGDGGIYIGSIMKGGAVAADGRIEPGDMLLQVNDMNFENMSNDDAVRVLRDIVHKPGPIVLTVAKCWDPSPQAYFTLPRNEPIQPIDPAAWVSHSAALTGTFPAYPGSSSMSTITSGSSLPDGCEGRGLSVHTDMASVTKAMAAPESGLEVRDRMWLKITIPNAFLGSDVVDWLYHHVEGFPERREARKYASGLLKAGLIRHTVNKITFSEQCYYVFGDLSGGCESYLVNLSLNDNDGSSGASDQDTLAPLPGATPWPLLPTFSYQYPAPHPYSPQPPPYHELSSYTYGGGSASSQHSEGSRSSGSTRSDGGAGRTGRPEERAPESKSGSGSESEPSSRGGSLRRGGEASGTSDGGPPPSRGSTGGAPNLRAHPGLHPYGPPPGMALPYNPMMVVMMPPPPPPVPPAVQPPGAPPVRDLGSVPPELTASRQSFHMAMGNPSEFFVDVM

SEQ ID NO: 755260 - protein, 736 aa, Homo sapiens; identical to SEQ ID NO: 755259

SEQ ID NO: 755261 - protein, 492 aa, Homo sapiens
MAGSSTGGGGVGETKVIYHLDEEETPYLVKIPVPAERITLGDFKSVLQRPAGAKYFFKSMDQDFGVVKEEISDDNARLPCFNGRVVSWLVSSDNPQPEMAPPVHEPRAELAPPAPPLPPLPPERTSGIGDSRPPSFHPNVSSSHENLEPETETESVVSLRRERPRRRDSSEHGAGGHRTGGPSRLERHLAGYESSSTLMTSELESTSLGDSDEEDTMSRFSSSTEQSSASRLLKRHRRRRKQRPPRLERTSSFSSVTDSTMSLNIITVTLNMEKYNFLGISIVGQSNERGDGGIYIGSIMKGGAVAADGRIEPGDMLLQVNDMNFENMSNDDAVRVLRDIVHKPGPIVLTVAKCWDPSPQAYFTLPRNEPIQPIDPAAWVSHSAALTGTFPAYPGSSSMSTITSGSSLPDGCEGRGLSVHTDMASVTKAMAAPESGLEVRDRMWLKITIPNAFLGSDVVDWLYHHVEGFPERREARGCSGGAGGHVVAGEDA

SEQ ID NO: 755262 - protein, 217 aa, Homo sapiens
QSGLKLQYFLINHGTVTGNSPYCNPRPDWHEERCNNEEFSSSVNALALTLPFLAVEVQNQKQPACHENDERPFYQKTAPYVPMYYVPNSYPYYGTNLYQRRPAIAINNPYVPRTYYANPAVVRPHAQIPQRQYLPNSHPPTVVRRPNLHPSFIAIPPKKIQDKIIIPTINTIATVEPTPAPATEPTVDSVVTPEAFSESIITSTPETTTVAVTPPTA

SEQ ID NO: 755263 - protein, 206 aa, Homo sapiens
MGKRDNRVAYMNPIAMARWRGPTQSVGPTIQDYLNRPRPTWEEVKKQLENKKTGSKALAEFEEKMNENWKKELEKSREKLLSGNESSSKKRERKKKRKKKSCRSSSSSSSSDSSSSSSDSEDEEKKQGKRRKKKKNRSYKSSQSSTHESESESKESVKKKKKSKDETEKEKDVRSLSKKRKKSYPDDKPLSSESSSESDYEEDVQA

SEQ ID NO: 755264 - protein, 81 aa, Homo sapiens
GLHFNIRVDHGMLWAPVLYKDVGQELPVVSTAPSHIALLMEPFTPDVLSRLMGRIQVCKDYVIDQLWSVLKEICQWIIPYG

SEQ ID NO: 755265 - protein, 252 aa, Homo sapiens
SLSGKMLLLPLPLLLFLLCSRAEAGEIIGGTECKPHSRPYMAYLEIVTSNGPSKFCGGFLIRRNFVLTAAHCAGRSITVTLGAHNITEEEDTWQKLEVIKQFRHPKYNTSTLHHDIMLLKLKEKASLTLAVGTLPFPSQFNFVPPGRMCRVAGWGRTGVLKPGSDTLQEVKLRLMDPQACSHFRDFDHNLQLCVGNPRKTKSAFKGDSGGPLLCAGVAQGIVSYGRSDAKPPAVFTRISHYRPWINQILQAN

SEQ ID NO: 755266 - protein, 111 aa, Homo sapiens
TYLQTCRQQLTLTQRSSGSGNNSSSAFSTMSLRLDTTPSCNSARPLHALQVLLLLSLLLTALASSTKGQTKRNLAKGKEESLDSDLYAELRCMCIKTTSGNSSQKHPKFGK

SEQ ID NO: 755267 - protein, 263 aa, Homo sapiens
LLRVPESKMAGSRQRGLRARVRPLFCALLLSLGRFVRGDGVGGDPAVALPHRRFEYKYSFKGPHLVQSDGTVPFWAHAGNAIPSSDQIRVAPSLKSQRGSVWTKTKAAFENWEVEVTFRVTGRGRIGADGLAIWYAENQGLEGPVFGSADLWNGVGIFFDSFDNDGKKNNPAIVIIGNNGQIHYDHQNDGASQALASCQRDFRNKPYPVRAKITYYQNTLTVMINNGFTPDKNDYEFCAKVGKYDYPCTRAFWNICCNWRSCR

SEQ ID NO: 755268 - protein, 263 aa, Homo sapiens; identical to SEQ ID NO: 755267

SEQ ID NO: 755269 - protein, 263 aa, Homo sapiens; identical to SEQ ID NO: 755267

SEQ ID NO: 755270 - protein, 263 aa, Homo sapiens; identical to SEQ ID NO: 755267

SEQ ID NO: 755271 - protein, 263 aa, Homo sapiens; identical to SEQ ID NO: 755267

SEQ ID NO: 755272 - protein, 293 aa, Homo sapiens
MALHQIKMIMNFVPKWENMIIPAQGHFGISAATGGLADDHDVLSFLTFQLTEPGKEPPTPDKEISEKEKEKYQEEFEHFQQELDKKKEEFQKGHPDLQGQPAEEIFESVGDRELRQVFEGQNRIHLEIKQLNRQLDMILDEQRRYVSSLTEEISKRGAGMPGQHGQITQQELDTVVKTQHEILRQVNEMKNSMSETVRLVSGMQHPGSAGGVYETTQHFIDIKEHLHIVKRDIDNLVQRNMPSNEKPKCPELPPFPSCLSTVHFIIFVVVQTVLFIGYIMYRSQQEAAAKKFF

SEQ ID NO: 755273 - protein, 266 aa, Homo sapiens
PTTAKKPSLADDHDVLSFLTFQLTEPGKEPPTPDKEISEKEKEKYQEEFEHFQQELDKKKEEFQKGHPDLQGQPAEEIFESVGDRELRQVFEGQNRIHLEIKQLNRQLDMILDEQRRYVSSLTEEISKRGAGMPGQHGQITQQELDTVVKTQHEILRQVNEMKNSMSETVRLVSGMQHPGSAGGVYETTQHFIDIKEHLHIVKRDIDNLVQRNMPSNEKPKCPELPPFPSCLSTVHFIIFVVVQTVLFIGYIMYRSQQEAAAKKFF

SEQ ID NO: 755274 - protein, 263 aa, Homo sapiens; identical to SEQ ID NO: 755267

SEQ ID NO: 755275 - protein, 263 aa, Homo sapiens; identical to SEQ ID NO: 755267

SEQ ID NO: 755276 - protein, 263 aa, Homo sapiens; identical to SEQ ID NO: 755267

SEQ ID NO: 755277 - protein, 263 aa, Homo sapiens; identical to SEQ ID NO: 755267

SEQ ID NO: 755278 - protein, 293 aa, Homo sapiens; identical to SEQ ID NO: 755272

SEQ ID NO: 755279 - protein, 263 aa, Homo sapiens; identical to SEQ ID NO: 755267

SEQ ID NO: 755280 - protein, 263 aa, Homo sapiens; identical to SEQ ID NO: 755267

SEQ ID NO: 755281 - protein, 153 aa, Homo sapiens
MKLTIDHTPERKDEKERIKKCGGFVAWNSLGQPHVNGRLAMTRSIGDLDLKTSGVIAEPETKRIKLHHADDSFLVLTTDGINFMVNSQEICDFVNQCHDPNEAAHAVTEQAIQYGTEDNSTAVVVPFGAWGKYKNSEINFSFSRSFASSGRWA

SEQ ID NO: 755282 - protein, 372 aa, Homo sapiens
MSTAALITLVRSGGNQVRRRVLLSSRLLQDDRRVTPTCHSSTSEPRCSRFDPDGSGSPATWDNFGIWDNRIDEPILLPPSIKYGKPIPKISLENVGCASQIGKRKENEDRFDFAQLTDEVLYFAVYDGHGGPAAADFCHTHMEKCIMDLLPKEKNLETLLTLAFLEIDKAFSSHARLSADATLLTSGTTATVALLRDGIELVVASVGDSRAILCRKGKPMKLTIDHTPERKDEKERIKKCGGFVAWNSLGQPHVNGRLAMTRSIGDLDLKTSGVIAEPETKRIKLHHADDSFLVLTTDGINFMVNSQEICDFVNQCHDPNEAAHAVTEQAIQYGTEDNSTAVVVPFGAWGKYKNSEINFSFSRSFASSGRWA

SEQ ID NO: 755283 - protein, 153 aa, Homo sapiens; identical to SEQ ID NO: 755281

SEQ ID NO: 755284 - protein, 153 aa, Homo sapiens; identical to SEQ ID NO: 755281

SEQ ID NO: 755285 - protein, 352 aa, Homo sapiens [sequence omitted]

SEQ ID NO: 755286 - protein, 133 aa, Homo sapiens [sequence omitted]

SEQ ID NO: 755287 - protein, 372 aa, Homo sapiens; identical to SEQ ID NO: 755282

SEQ ID NO: 755288 - protein, 392 aa, Homo sapiens
MSTAALITLVRSGGNQVRRRVLLSSRLLQDDRRVTPTCHSSTSEPRCSRFDPDGSGSPATWDNFGIWDNRIDEPILLPPSIKYGKPIPKISLENVGCASQIGKRKENEDRFDFAQLTDEVLYFAVYDGHGGPAAADFCHTHMEKCIMDLLPKEKNLETLLTLAFLEIDKAFSSHARLSADGLWLIHFESPVCSTLHENLAATLLTSGTTATVALLRDGIELVVASVGDSRAILCRKGKPMKLTIDHTPERKDEKERIKKCGGFVAWNSLGQPHVNGRLAMTRSIGDLDLKTSGVIAEPETKRIKLHHADDSFLVLTTDGINFMVNSQEICDFVNQCHDPNEAAHAVTEQAIQYGTEDNSTAVVVPFGAWGKYKNSEINFSFSRSFASSGRWA

SEQ ID NO: 755289 - protein, 153 aa, Homo sapiens; identical to SEQ ID NO: 755281

SEQ ID NO: 755290 - protein, 153 aa, Homo sapiens; identical to SEQ ID NO: 755281

SEQ ID NO: 755291 - protein, 153 aa, Homo sapiens; identical to SEQ ID NO: 755281

SEQ ID NO: 755292 - protein, 311 aa, Homo sapiens
MTESQGTVTFKDVAIDFTQEEWKRLDPAQRKLYRNVMLENYNNLITVGYPFTKPDVIFKLEQEEEPWVMEEEVLRRHWQGEIWGVDEHQKNQDRLLRQVEVKFQKTLTEEKGNECQKKFANVFPLNSDFFPSRHNLYEYDLFGKCLEHNFDCHNNVKCLMRKEHCEYNEPVKSYGNSSSHFVITPFKCNHCGKGFNQTLDLIRHLRIHTGEKPYECSNCRKAFSHKEKLIKHYKIHSREQSYKCNECGKAFIKMSNLIRHQRIHTGEKPYACKECEKSFSQKSNLIDHEKIHTGEKPYECNECGKAFSQKQ

SEQ ID NO: 755293 - protein, 311 aa, Homo sapiens; identical to SEQ ID NO: 755292

SEQ ID NO: 755294 - protein, 335 aa, Homo sapiens
MDSARHHISHSTSAGPIPSQKEEEMTESQGTVTFKDVAIDFTQEEWKRLDPAQRKLYRNVMLENYNNLITVGYPFTKPDVIFKLEQEEEPWVMEEEVLRRHWQGEIWGVDEHQKNQDRLLRQVEVKFQKTLTEEKGNECQKKFANVFPLNSDFFPSRHNLYEYDLFGKCLEHNFDCHNNVKCLMRKEHCEYNEPVKSYGNSSSHFVITPFKCNHCGKGFNQTLDLIRHLRIHTGEKPYECSNCRKAFSHKEKLIKHYKIHSREQSYKCNECGKAFIKMSNLIRHQRIHTGEKPYACKECEKSFSQKSNLIDHEKIHTGEKPYECNECGKAFSQKQ

SEQ ID NO: 755295 - protein, 118 aa, Homo sapiens [sequence omitted]

SEQ ID NO: 755296 - protein, 335 aa, Homo sapiens; identical to SEQ ID NO: 755294

SEQ ID NO: 755297 - protein, 335 aa, Homo sapiens; identical to SEQ ID NO: 755294

SEQ ID NO: 755298 - protein, 230 aa, Homo sapiens
MARKPDEFESGISQALLELEMNSDLKAQLRELNITAAKEIEVGGGRKAIIIFVPVPQLKSFQKIQVRLVRELEKKFSGKHVVFIAQRRILPKPTRKSRTKNKQKRPRSRTLTAVHDAILEDLVFPSEIVGKRIRVKLDGSRLIKVHLDKAQQNNVEHKVETFSGVYKKLTGKDVNFEFPEFHVTNTQKLLGGGPEKFNILGAGREKGTSKTGLHGVSKNRARLTRGGWLR

SEQ ID NO: 755299 - protein, 146 aa, Homo sapiens
ALGEVGWRPALRQNFSSWVEENAFGVRPWRGEPCSQGGDTADYPPCAFRWLLRGERGLAGGCGREGSQRRLQPGPRNADRCAFSLPKPALGKFSQEKAMFSSSAKIVKPNGEEAGRVRVRHLPGSSGAGDELGPQGSAQGAEYYGS

SEQ ID NO: 755300 - protein, 114 aa, Homo sapiens
MLAAARVLGPGCSDARSGSVLLFVASLALLELEMNSDLKAQLRELNITAAKEIEVGGGRKAIIIFVPVPQLKSFQKIQVRLVRELEKKFSGKHVVFIAQVSVLLLQHVSVCEFC

SEQ ID NO: 755301 - protein, 215 aa, Homo sapiens
MARKPDEFESGISQALLELEMNSDLKAQLRELNITAAKEIEVGGGRKAIIIFVPVPQLKSFQKIQVRLVRELEKKFSGKHVVFIAQRRILPKPTRKSRTKNKQKRPRSRTLTAVHDAILEDLVFPSEIVGKRIRVKLDGSRLIKVHLDKAQQNNVEHKVETFSGVYKKKPHGPRCSFLNSPEYPFVNQTMTYITKALLLTVQHTTTQHTGTSSKS

SEQ ID NO: 755302 - protein, 157 aa, Homo sapiens
MARKPDEFESGISQALLELEMNSDLKAQLRELNITAAKEIEVGGGRKAIIIFVPVPQLKSFQKIQVRLVRELEKKFSGKHVVFIAQRRILPKPTRKSRTKNKQKRPRSRTLTAVHDAILEDLVFPSEIVGKRIRVKLDGSRLIKVHLDKVGYYALAG

SEQ ID NO: 755303 - protein, 139 aa, Homo sapiens
  misc_feature (111)..(111): Xaa can be any naturally occurring amino acid
  misc_feature (113)..(113): Xaa can be any naturally occurring amino acid
  misc_feature (116)..(116): Xaa can be any naturally occurring amino acid
  misc_feature (125)..(125): Xaa can be any naturally occurring amino acid
  misc_feature (132)..(132): Xaa can be any naturally occurring amino acid
MARKPDEFESGISQALLELEMNSDLKAQLRELNITAAKEIEVGGGRKAIIIFVPVPQLKSFQKIQVRLVRELEKKFSGKHVVFIAQRRILPKPTRKSRTKNKQKRPRSPVXLXKLXHGLPIPFKXLWVFPKXKICWAKE

SEQ ID NO: 755304 - protein, 118 aa, Homo sapiens
MARKPDEFESGISQALLELEMNSDLKAQLRELNITAAKEIEVGGGRKAIIIFVPVPQLKSFQKIQVRLVRELEKKFSGKHVVFIAQRRILPKPTRKSRTKNKTWSSQAKLWARESASN

SEQ ID NO: 755305 - protein, 159 aa, Homo sapiens
MARKPDEFESGISQEIEVGGGRKAIIIFVPVPQLKSFQKIQVRLVRELEKKFSGKHVVFIAQRRILPKPTRKSRTKNKQKRPRSRTLTAVHDAILEDLVFPSEIVGKRIRVKLDGSRLIKVHLDKAQQNNVEHKVETFSGVYKKLTGKDVNFEFPEFQL

SEQ ID NO: 755306 - protein, 118 aa, Homo sapiens; identical to SEQ ID NO: 755304

SEQ ID NO: 755307 - protein, 183 aa, Homo sapiens
MARKPDEFESGISQALLELEMNSDLKAQLRELNITAAKEIEVGGGRKAIIIFVPVPQLKSFQKIQVRLVRELEKKFSGKHVVFIAQRRILPKPTRKSRTKNKQKRPRSRTLTAVHDAILEDLVFPSEIVGKRIRVKLDGSRLIKVHLDKAQQNNVEHKVETFSGVYKKLTGKDVNFEFPEFQL

SEQ ID NO: 755308 - protein, 174 aa, Homo sapiens
MARKPDEFESGISQALLELEMNSDLKAQLRELNITAAKEIEVGGGRKAIIIFVPVPQLKSFQKIQVRLVRELEKKFSGKHVVFIAQRRILPKPTRKSRTKNKQKRPRSRTLTAVHDAILEDLVFPSEIVGKRIRVKLDGSRLIKVHLDKAQQNNVEHKVETFSGVYKTRGRDVN

SEQ ID NO: 755309 - protein, 183 aa, Homo sapiens; identical to SEQ ID NO: 755307

SEQ ID NO: 755310 - protein, 174 aa, Homo sapiens; identical to SEQ ID NO: 755308

SEQ ID NO: 755311 - protein, 174 aa, Homo sapiens
MARKPDEFESGISQALLELEMNSDLKAQLRELNITAAKEIEVGGGRKAIIIFVPVPQLKSFQKIQVRLVRELEKKFSGKHVVFIAQRRILPKPTRKSRTKNKQKRPRSRTLTAVHDAILEDLVFPSEIVGKRIRVKLDGSRLIKVHLDKGQVNFCVYKKLTLVHCNKMTNKKYK

SEQ ID NO: 755312 - protein, 111 aa, Homo sapiens
MARKPDEFESGISQALLELEMNSDLKAQLRELNITAAKEIEVGGGRKAIIIFVPVPQLKSFQKIQVRLVRELEKKFSGKHVVFIAQVSVLLLQHVSVCEFCYKLLVFRLHW

SEQ ID NO: 755313 - protein, 144 aa, Homo sapiens
LWGGIRGKAIIIFVPVPQLKSFQKIQVRLVRELEKKFSGKHVVFIAQRRILPKPTRKSRTKNKQKRPRSRTLTAVHDAILEDLVFPSEIVGKRIRVKLDGSRLIKVHLDKAQQNNVEHKVETFSGVYKKLTGKDVNFEFPEFQL

SEQ ID NO: 755314 - protein, 145 aa, Homo sapiens
MPAYIFKIFKKQELASSCFLKSFQKIQVRLVRELEKKFSGKHVVFIAQRRILPKPTRKSRTKNKQKRPRSRTLTAVHDAILEDLVFPSEIVGKRIRVKLDGSRLIKVHLDKAQQNNVEHKVETFSGVYKKLTGKDVNFEFPEFQL

SEQ ID NO: 755315 - protein, 429 aa, Homo sapiens
MLPRLLLLICAPLCEPAELFLIASPSHPTEGSPVTLTCKMPFLQSSDAQFQFCFFRDTRALGPGWSSSPKLQIAAMWKEDTGSYWCEAQTMASKVLRSRRSQINVHRVPVADVSLETQPPGGQVMEGDRLVLICSVAMGTGDITFLWYKGAVGLNLQSKTQRSLTAEYEIPSVRESDAEQYYCVAENGYGPSPSGLVSITVRIPVSRPILMLRAPRAQAAVEDVLELHCEALRGSPPILYWFYHEDITLGSRSAPSGGGASFNLSLTEEHSGNYSCEANNGLGAQRSEAVTLNFTVPTGARSNHLTSGVIEGLLSTLGPATVALLFCYGLKRKIGRRSARDPLRSLPSPLPQEFTYLNSPTPGQLQPIYENVNVVSGDEVYSLAYYNQPEQESVAAETLGTHMEDKVSLDIYSRLRKANITDVDYEDAM

SEQ ID NO: 755316 - protein, 429 aa, Homo sapiens; identical to SEQ ID NO: 755315

SEQ ID NO: 755317 - protein, 429 aa, Homo sapiens; identical to SEQ ID NO: 755315

SEQ ID NO: 755318 - protein, 91 aa, Homo sapiens
HEDITLGSRSAPSGGGASFNLSLTEEHSGNYSCEANNGLGAQRSEAVTLNFTGIAQAMELSWSMSPSQRPGRVLLVPLCFRGFATHGGASV

SEQ ID NO: 755319 - protein, 340 aa, Homo sapiens
MLPRLLLLICAPLCEPAGVPVADVSLETQPPGGQVMEGDRLVLICSVAMGTGDITFLWYKGAVGLNLQSKTQRSLTAEYEIPSVRESDAEQYYCVAENGYGPSPSGLVSITVRIPVSRPILMLRAPRAQAAVEDVLELHCEALRGSPPILYWFYHEDITLGSRSAPSGGGASFNLSLTEEHSGNYSCEANNGLGAQRSEAVTLNFTVPTGARSNHLTSGVIEGLLSTLGPATVALLFCYGLKRKIGRRSARDPLRSLPSPLPQEFTYLNSPTPGQLQPIYENVNVVSGDEVYSLAYYNQPEQESVAAETLGTHMEDKVSLDIYSRLRKANITDVDYEDAM

SEQ ID NO: 755320 - protein, 139 aa, Homo sapiens
MLPRLLLLICAPLCEPAELFLIASPSHPTEGSPVTLTCKMPFLQSSDAQFQFCFFRDTRALGPGWSSSPKLQIAAMWKEDTGSYWCEAQTMASKVLRSRRSQINVHRVPVADVSLETQPPGGQGSQGPGCSGGCAGASL

SEQ ID NO: 755321 - protein, 87 aa, Homo sapiens
MGGSRVSCSQNLCFVILFSLCFHQNVTSYWALLGTNTGTASESSAWSQPHRWSSVNVDRIRVRKERMALDPMMQASSRHVSTGSLGE

SEQ ID NO: 755322 - protein, 37 aa, Homo sapiens
TKPISAEFLSTVVESSGYWLLSHRAILPDIHRVLTIT

SEQ ID NO: 755323 - protein, 129 aa, Homo sapiens
CRWVLVTGDSNCTLSFQPLIEQRLCCSSQPMAAGLVARQWKAETRRPFLGRKKGEREGRSKKEAHSPKACSLLRVWPRAGGMGMGVKSSQPLLSVVYSWWTAPLSELEAPERRRGNARTCTSCEGQRNL

SEQ ID NO: 755324 - protein, 407 aa, Homo sapiens
MAAPCAEDPSLERHFKGHRDAVTCVDFSINTKQLASGSMDSCLMVWHMKPQSRAYRFTGHKDAVTCVNFSPSGHLLASGSRDKTVRIWVPNVKGESTVFRAHTATVRSVHFCSDGQSFVTASDDKTVKVWATHRQKFLFSLSQHINWVRCAKFSPDGRLIVSASDDKTVKLWDKSSRECVHSYCEHGGFVTYVDFHPSGTCIAAAGMDNTVKVWDVRTHRLLQHYQLHSAAVNGLSFHPSGNYLITASSDSTLKILDLMEGRLLYTLHGHQGPATTVAFSRTGEYFASGGSDEQVMVWKSNFDIVDHGEVTKVPRPPATLASSMGNLPEVDFPVPPGRGRSVESVQSQPQEPVSVPQTLTSTLEHIVGQLDVLTQTVSILEQRLTLTEDKLKQCLENQQLIMQRATP

SEQ ID NO: 755325 - protein, 359 aa, Homo sapiens
MAAPCAEDPSLERHFKGHRDAVTCVDFSINTKQLASGSMDSCLMVWHMKPQSRAYRFTGHKDAVTCVNFSPSGHLLASGSRDKTVRIWVPNVKGESTVFRAHTATVRSVHFCSDGQSFVTASDDKTVKVWATHRQKFLFSLSQHINWVRCAKFSPDGRLIVSASDDKTVKLWDKSSRECVHSYCEHGGFVTYVDFHPSGTCIAAAGMDNTVKVWDVRTHRLLQHYQLHSAAVNGLSFHPSGNYLITASSDSTLKILDLMEGRLLYTLHGHQGPATTVAFSRTGEYFASGGSDEQVMVWKSNFDIVDHGEVTKVPRPPATLASSMGNLTVSILEQRLTLTEDKLKQCLENQQLIMQRATP

SEQ ID NO: 755326 - protein, 305 aa, Homo sapiens
MSTVRSVHFCSDGQSFVTASDDKTVKVWATHRQKFLFSLSQHINWVRCAKFSPDGRLIVSASDDKTVKLWDKSSRECVHSYCEHGGFVTYVDFHPSGTCIAAAGMDNTVKVWDVRTHRLLQHYQLHSAAVNGLSFHPSGNYLITASSDSTLKILDLMEGRLLYTLHGHQGPATTVAFSRTGEYFASGGSDEQVMVWKSNFDIVDHGEVTKVPRPPATLASSMGNLPEVDFPVPPGRGRSVESVQSQPQEPVSVPQTLTSTLEHIVGQLDVLTQTVSILEQRLTLTEDKLKQCLENQQLIMQRATP

SEQ ID NO: 755327 - protein, 201 aa, Homo sapiens
DFSRILRQLDPRHRLLKLYKLHSAAVNGLSFHPSGNYLITASSDSTLKILDLMEGRLLYTLHGHQGPATTVAFSRTGEYFASGGSDEQVMVWKSNFDIVDHGEVTKVPRPPATLASSMGNLPEVDFPVPPGRGRSVESVQSQPQEPVSVPQTLTSTLEHIVGQLDVLTQTVSILEQRLTLTEDKLKQCLENQQLIMQRATP

SEQ ID NO: 755328 - protein, 255 aa, Homo sapiens
MAAPCAEDPSLERHFKGHRDAVTCVDFSINTKQLASGSMDSCLMVWHMKPQSRAYRFTGHKDAVTCVNFSPSGHLLASGSRDKTVRIWVPNVKGESTVFRAHTATVRSVHFCSDGQSFVTASDDKTVKVWATHRQKFLFSLSQHINWVRCAKFSPDGRLIVSASDDKTVKLWDKSSRECVHSYCEHGGFVTYVDFHPSGTCIAAAGMDNTVKVWDVRTHRLLQHYQLHSAAVNGLWTSHHCCLFKNGGVFCFWRL

SEQ ID NO: 755329 - protein, 79 aa, Homo sapiens
  misc_feature (43)..(43): Xaa can be any naturally occurring amino acid
  misc_feature (46)..(46): Xaa can be any naturally occurring amino acid
PAKLASSMGNLGFPGTETVSGNWFYELAKVTQPHREPRRTAAXSQXLTVSILEQRLTLTEDKLKQCLENQQLIMQRATP

SEQ ID NO: 755330 - protein, 407 aa, Homo sapiens; identical to SEQ ID NO: 755324

SEQ ID NO: 755331 - protein, 408 aa, Homo sapiens
GWCESDEEDPSLERHFKGHRDAVTCVDFSINTKQLASGSMDSCLMVWHMKPQSRAYRFTGHKDAVTCVNFSPSGHLLASGSRDKTVRIWVPNVKGESTVFRAHTATVRSVHFCSDGQSFVTASDDKTVKVWATHRQKFLFSLSQHINWVRCAKFSPDGRLIVSASDDKTVKLWDKSSRECVHSYCEHGGFVTYVDFHPSGTCIAAAGMDNTVKVWDVRTHRLLQHYQLHSAAVNGLSFHPSGNYLITASSDSTLKILDLMEGRLLYTLHGHQGPATTVAFSRTGEYFASGGSDEQVMVWKSNFDIVDHGEVTKVPRPPATLASSMGNLPEVDFPVPPGRGRSVESVQSQPQEPVSVPQTLTSTLEHIVGQLDVLTQTVSILEQRLTLTEDKLKQCLENQQLIMQRATP

SEQ ID NO: 755332 - protein, 407 aa, Homo sapiens; identical to SEQ ID NO: 755324

SEQ ID NO: 755333 - protein, 161 aa, Homo sapiens
MPHGLAHEAAVTRLPLHWPQGCRHLCELLSFGTPACFRLPRKFLFSLSQHINWVRCAKFSPDGRLIVSASDDKTVKLWDKSSRECVHSYCEHGGFVTYVDFHPSGTCIAAAGMDNTVKVWDVRTHRLLQHYQLHSAAVNGLWTSHHCCLFKNGGVFCFWRL

SEQ ID NO: 755334 - protein, 405 aa, Homo sapiens
SRSGYSHPAPPRHCPRRSLFSSVLKALRAAPFSRCPASVHPQWVRRAGWRAAELAQESPPGMAGVENEDEAELNLREQDGFTGKEEVVEQGELNATEEVWIPGEGHPESPEPKEQRGLVEGASVKGGAEGLQDPEGQSQQVGAPGLQAPQGLPEAIEPLVEDDVAPGGDQASPEVMLGSEPAMGESAAGAEPGLGQGVGGLGDPGHLTREEVMEPPLEEESLEAKRVQGLEGPRKDLEEAGGLGTEFSELPGKSRDPWEPPREGREESEAEAPRGAEEAFPAETLGHTGSDAPSPWPLGSEEAEEDVPPVLVSPSPTYTPILEDAPGPQPQAEGSQEASWGVQGRAEALGKVESEQEELGSGEIPEGPQEEGEESREESEEDERRGGSQGLGGGGQGLLLAASRL

SEQ ID NO: 755335 - protein, 1197 aa, Homo sapiens
LLPLRHLCQPFLRTKNSSRPVPLPWPRQEASTGQSPEDHASLAPPLSPDHSSLEAKDGESGGSRVFSICRGEGEGQIWGLVEKETAIEGKVVSSLQQEIWEEEDLNRKEIQDSQVPLEKETLKSLGEEIQESLKTLENQSHETLERENQECPRSLEEDLETLKSLEKENKELLKDVEVVRPLEKEAVGQLKPTGKEDTQTLQSLQKENQELMKSLEGNLETFLFPGTENQELVSSLQENLESLTALEKENQEPLRSPEVGDEEALRPLTKENQEPLRSLEDENKEAFRSLEKENQEPLKTLEEEDQSIVRPLETENHKSLRSLEEQDQETLRTLEKETQQRRRSLGEQDQMTLRPPEKVDLEPLKSLDQEIARPLENENQEFLKSLKEESVEAVKSLETEILESLKSAGQENLETLKSPETQAPLWTPEEINQGAMNPLEKEIQEPLESVEVNQETFRLLEEENQESLRSLGAWNLENLRSPEEVDKESQRNLEEEENLGKGEYQESLRSLEEEGQELPQSADVQRWEDTVEKDQELAQESPPGMAGVENEDEAELNLREQDGFTGKEEVVEQGELNATEEVWIPGEGHPESPEPKEQRGLVEGASVKGGAEGLQDPEGQSQQVGAPGLQAPQGLPEAIEPLVEDDVAPGGDQASPEVMLGSEPAMGESAAGAEPGPGQGVGGLGDPGHLTREEVMEPPLEEESLEAKRVQGLEGPRKDLEEAGGLGTEFSELPGKSRDPWEPPREGREESEAEAPRGAEEAFPAETLGHTGSDAPSPWPLGSEEAEEDVPPVLVSPSPTYTPILEDAPGPQPQAEGSQEASWGVQGRAEALGKVESEQEELGSGEIPEGPQEEGEESREESEEDELGETLPDSTPLGFYLRSPTSPRWDPTGEQRPPPQGETGKEGWDPAVLASEGLEAPPSEKEEGEEGEEECGRDSDLSEEFEDLGTEAPFLPGVPGEVAEPLGQVPQLLLDPAAWDRDGESDGFADEEESGEEGEEDQEEGREPGAGRWGPGSSVGSLQALSSSQRGEFLESDSVSVSVPWDDSLRGAVAGAPKTALETESQDSAEPSGSEEESDPVSLEREDKVPGPLEIPSGMEDAGPGADIIGVNGQGPNLEGKSQHVNGGVMNGLEQSEEVGQGMPLVSEGDRGSPFQEEEGSALKTSWAGAPVHLGQGQFLKFTQREGDRESWSSGED

SEQ ID NO: 755336 - protein, 747 aa, Homo sapiens
VRRRLSSEMVFLKKTFHYRSLGAWNLENLRSPEEVDKESQRNLEEEENLGKGEYQESLRSLEEEGQELPQSADVQRWEDTVEKDQELAQESPPGMAGVENEDEAELNLREQDGFTGKEEVVEQGELNATEEVWIPGEGHPESPEPKEQRGLVEGASVKGGAEGLQDPEGQSQQVGAPGLQAPQGLPEAIEPLVEDDVAPGGDQASPEVMLGSEPAMGESAAGAEPGLGQGVGGLGDPGHLTREEVMEPPLEEESLEAKRVQGLEGPRKDLEEAGGLGTEFSELPGKSRDPWEPPREGREESEAEAPRGAEEAFPAETLGHTGSDAPSPWPLGSEEAEEDVPPVLVSPSPTYTPILEDAPGPQPQAEGSQEASWGVQGRAEALGKVESEQEELGSGEIPEGPQEEGEESREESEEDELGETLPDSTPLGFYLRSPTSPRWDPTGEQRPPPQGETGKEGWDPAVLASEGLEAPPSEKEEGEEGEEECGRDSDLSEEFEDLGTEAPFLPGVPGEVAEPLGQVPQLLLDPAAWDRDGESDGFADEEESGEEGEEDQEEGREPGAGRWGPGSSVGSLQALSSSQRGEFLESDSVSVSVPWDDSLRGAVAGAPKTALETESQDSAEPSGSEEESDPVSLEREDKVPGPLEIPSGMEDAGPGADIIGVNGQGPNLEGKSQHVNGGVMNGLEQSEEVGQGMPLVSEGDRGSPFQEEEGSALKTSWAGAPVHLGQGQFLKFTQREGDRESWSSGED

SEQ ID NO: 755337 - protein, 1220 aa, Homo sapiens
MQRSEPRMLLSLCSRHRVGGNRLPEPLRAEARVAIPASVLPGPEEPGGQRQEASTGQSPEDHASLAPPLSPDHSSLEAKDGESGGSRVFSICRGEGEGQIWGLVEKETAIEGKVVSSLQQEIWEEEDLNRKEIQDSQVPLEKETLKSLGEEIQESLKTLENQSHETLERENQECPRSLEEDLETLKSLEKENKELLKDVEVVRPLEKEAVGQLKPTGKEDTQTLQSLQKENQELMKSLEGNLETFLFPGTENQELVSSLQENLESLTALEKENQEPLRSPEVGDEEALRPLTKENQEPLRSLEDENKEAFRSLEKENQEPLKTLEEEDQSIVRPLETENHKSLRSLEEQDQETLRTLEKETQQRRRSLGEQDQMTLRPPEKVDLEPLKSLDQEIARPLENENQEFLKSLKEESVEAVKSLETEILESLKSAGQENLETLKSPETQAPLWTPEEINQGAMNPLEKEIQEPLESVEVNQETFRLLEEENQESLRSLGAWNLENLRSPEEVDKESQRNLEEEENLGKGEYQESLRSLEEEGQELPQSADVQRWEDTVEKDQELAQESPPGMAGVENEDEAELNLREQDGFTGKEEVVEQGELNATEEVWIPGEGHPESPEPKEQRGLVEGASVKGGAEGLQDPEGQSQQVGAPGLQAPQGLPEAIEPLVEDDVAPGGDQASPEVMLGSEPAMGESAAGAEPGPGQGVGGLGDPGHLTREEVMEPPLEEESLEAKRVQGLEGPRKDLEEAGGLGTEFSELPGKSRDPWEPPREGREESEAEAPRGAEEAFPAETLGHTGSDAPSPWPLGSEEAEEDVPPVLVSPSPTYTPILEDAPGPQPQAEGSQEASWGVQGRAEALGKVESEQEELGSGEIPEGPQEEGEESREESEEDELGETLPDSTPLGFYLRSPTSPRWDPTGEQRPPPQGETGKEGWDPAVLASEGLEAPPSEKEEGEEGEEECGRDSDLSEEFEDLGTEAPFLPGVPGEVAEPLGQVPQLLLDPAAWDRDGESDGFADEEESGEEGEEDQEEGREPGAGRWGPGSSVGSLQALSSSQRGEFLESDSVSVSVPWDDSLRGAVAGAPKTALETESQDSAEPSGSEEESDPVSLEREDKVPGPLEIPSGMEDAGPGADIIGVNGQGPNLEGKSQHVNGGVMNGLEQSEEVGQGMPLVSEGDRGSPFQEEEGSALKTSWAGAPVHLGQGQFLKFTQREGDRESWSSGED

SEQ ID NO: 755338 - protein, 1220 aa, Homo sapiens; identical to SEQ ID NO: 755337

SEQ ID NO: 755339 - protein, 1220 aa, Homo sapiens; identical to SEQ ID NO: 755337

SEQ ID NO: 755340 - protein, 123 aa, Homo sapiens
MAVSHSVKERTISENSLIILLQGLQGRVTTVDLRDESVAHGRIDNVDAFMNIRLAKVTYTDRWGHQVKLDDLFVTGRNVRYVHIPDDVNITSTIEQQLQIIHRVRNFGGKGQGRWEFPPKNCK

SEQ ID NO: 755341 - protein, 123 aa, Homo sapiens; identical to SEQ ID NO: 755340

SEQ ID NO: 755342 - protein, 121 aa, Homo sapiens [sequence omitted]

SEQ ID NO: 755343 - protein, 123 aa, Homo sapiens; identical to SEQ ID NO: 755340

SEQ ID NO: 755344 - protein, 123 aa, Homo sapiens; identical to SEQ ID NO: 755340

SEQ ID NO: 755345 - protein, 123 aa, Homo sapiens; identical to SEQ ID NO: 755340

SEQ ID NO: 755346 - protein, 111 aa, Homo sapiens
AAGGRQPVQAPASFGGDPDGESGRNVAWWVRVGGAGSPGAECGGCQDLRKEVPEPRKRFLPHLPSIAPFPRPAPAALSKRCSSRFTGSLASLEKLSGLLSDRPPRRWQSLF

SEQ ID NO: 755347 - protein, 127 aa, Homo sapiens
MDPLSETCTLPGPGAGSLPCRLCMALPCLSPRVPMAMLLTCISHLLSMSPTGDVQELLKLSPQVQTMGNQQGGDPQTLCLTTLCHMVISTTPQPPQLLTSGLKQVFSSHKVPNGTQVLLLWDSSKLN

SEQ ID NO: 755348 - protein, 107 aa, Homo sapiens
WNVTEVTLLSCCPSGLIPSFPSKLGGRHHYQRRHFIDEEAEARGCLGTCPRLPSKDSSWASCAIAKLHFTFFLETEYLALLPRLGCNGAISAHCNLRFLGSSNSLAS

SEQ ID NO: 755349 - protein, 353 aa, Homo sapiens
PDFRFGGEDPSECRGCGVWSARGEFSGLVGSQAIMPRGQKSKLRAREKRRKARDETRGLNVPQVTEAEEEEAPCCSSSVSGGAASSSPAAGIPQKPQRAPTTAAAAAAGVSSTKSKKGAKSHQGEKNASSSQASTSTKSPSEDPLTRKSGSLVQFLLYKYKIKKSVTKGEMLKIVGKRFREHFPEILKKASEGLSVVFGLELNKVNPNGHTYTFIDKVDLTDEESLLSSWDFPRRKLLMPLLGVIFLNGNSATEEEIWEFLNMLGVYDGEEHSVFGEPWKLITKDLVQEKYLEYKQVPSSDPPRFQFLWGPRAYAETSKMKVLEFLAKVNGTTPCAFPTHYEEALKDEEKAGV

SEQ ID NO: 755350 - protein, 353 aa, Homo sapiens; identical to SEQ ID NO: 755349

SEQ ID NO: 755351 - protein, 397 aa, Homo sapiens
AAGAGGGGGGGGRRMSQPPLLPASAETRKFTRALSKPGTAAELRQSVSEVVRGSVLLAKPKLIEPLDYENVIVQKKTQILNDCLREMLLFPYDDFQTAILRRQGRYICSTVPAKAEEEAQSLFVTECIKTYNSDWHLVNYKYEDYSGEFRQLPNKVVKLDKLPVHVYEVDEEVDKDEDAASLGSQKGGITKHGWLYKGNMNSAISVTMRSFKRRFFHLIQLGDGSYNLNFYKDEKISKEPKGSIFLDSCMGVVQNNKVRRFAFELKMQDKSSYLLAADSEVEMEEWITILNKILQLNFEAAMQEKRNGDSHEDDEQSKLEGSGSGLDSYLPELAKSAREAEIKLKSESRVKLFYLDPDAQKLDFSSAEPEVKSFEEKFGKRILVKCNDLSFNLQCCV

SEQ ID NO: 755352 - protein, 311 aa, Homo sapiens
MLLFPYDDFQTAILRRQGRYICSTVPAKAEEEAQSLFVTECIKTYNSDWHLVNYKYEDYSGEFRQLPNKVVKLDKLPVHVYEVDEEVDKDEDAASLGSQKGGITKHGWLYKGNMNSAISVTMRSFKRRFFHLIQLGDGSYNLNFYKDEKISKEPKGSIFLDSCMGVVQNNKVRRFAFELKMQDKSSYLLAADSEVEMEEWITILNKILQLNFEAAMQEKRNGDSHEDDEQSKLEGSGSGLDSYLPELAKSAREAEIKLKSESRVKLFYLDPDAQKLDFSSAEPEVKSFEEKFGKRILVKCNDLSFNLQCCV

SEQ ID NO: 755353 - protein, 212 aa, Homo sapiens
MAYAYLFKYIIIGDTGVGKSCLLLQFTDKRFQPVHDLTIGVEFGARMITIDGKQIKLQIWDTAGQESFRSITRSYYRGAAGALLVYDITRRDTFNHLTTWLEDARQHSNSNMVIMLIGNKSDLESRREVKKEEGEAFAREHGLIFMETSAKTASNVEEAFINTAKEIYEKIQEGVFDINNEANGIKIGPQHAATNATHAGNQGGQQAGGGCC

SEQ ID NO: 755354 - protein, 212 aa, Homo sapiens; identical to SEQ ID NO: 755353

SEQ ID NO: 755355 - protein, 212 aa, Homo sapiens; identical to SEQ ID NO: 755353

SEQ ID NO: 755356 - protein, 212 aa, Homo sapiens; identical to SEQ ID NO: 755353

SEQ ID NO: 755357 - protein, 212 aa, Homo sapiens; identical to SEQ ID NO: 755353

SEQ ID NO: 755358 - protein, 212 aa, Homo sapiens; identical to SEQ ID NO: 755353

SEQ ID NO: 755359 - protein, 212 aa, Homo sapiens; identical to SEQ ID NO: 755353

SEQ ID NO: 755360 - protein, 212 aa, Homo sapiens; identical to SEQ ID NO: 755353

SEQ ID NO: 755361 - protein, 212 aa, Homo sapiens; identical to SEQ ID NO: 755353

SEQ ID NO: 755362 - protein, 212 aa, Homo sapiens; identical to SEQ ID NO: 755353

SEQ ID NO: 755363 - protein, 212 aa, Homo sapiens; identical to SEQ ID NO: 755353

SEQ ID NO: 755364 - protein, 212 aa, Homo sapiens; identical to SEQ ID NO: 755353

SEQ ID NO: 755365 - protein, 196 aa, Homo sapiens
MAYAYLFKYIIIGDTGVGKSCLLLQFTDKRFQPVHDLTIGVEFGARMITIDGKQIKLQIWDTAGQESFRSITRSYYRGAAGALLVYDITRRDTFNHLTTWLEDARQHSNSNMVIMLIGNKSDLESRREVKKEEGEAFAREHGLIFMETSAKTASNVEEAFINTAKEIYEKIQEGVFDINNEDSRLGAAAVESVFTV

SEQ ID NO: 755366 - protein, 212 aa, Homo sapiens; identical to SEQ ID NO: 755353

SEQ ID NO: 755367 - protein, 212 aa, Homo sapiens; identical to SEQ ID NO: 755353

SEQ ID NO: 755368 - protein, 166 aa, Homo sapiens
MITIDGKQIKLQIWDTAGQESFRSITRSYYRGAAGALLVYDITRRDTFNHLTTWLEDARQHSNSNMVIMLIGNKSDLESRREVKKEEGEAFAREHGLIFMETSAKTASNVEEAFINTAKEIYEKIQEGVFDINNEANGIKIGPQHAATNATHAGNQGGQQAGGGCC

SEQ ID NO: 755369 - protein, 188 aa, Homo sapiens
MAYAYLFKYIIIGDTGVEFGARMITIDGKQIKLQIWDTAGQESFRSITRSYYRGAAGALLVYDITRRDTFNHLTTWLEDARQHSNSNMVIMLIGNKSDLESRREVKKEEGEAFAREHGLIFMETSAKTASNVEEAFINTAKEIYEKIQEGVFDINNEANGIKIGPQHAATNATHAGNQGGQQAGGGCC

SEQ ID NO: 755370 - protein, 188 aa, Homo sapiens; identical to SEQ ID NO: 755369

SEQ ID NO: 755371 - protein, 192 aa, Homo sapiens
CLFWFYGRVVCSGWLMVIVGVEFGARMITIDGKQIKLQIWDTAGQESFRSITRSYYRGAAGALLVYDITRRDTFNHLTTWLEDARQHSNSNMVIMLIGNKSDLESRREVKKEEGEAFAREHGLIFMETSAKTASNVEEAFINTAKEIYEKIQEGVFDINNEANGIKIGPQHAATNATHAGNQGGQQAGGGCC

SEQ ID NO: 755372 - protein, 181 aa, Homo sapiens
MAYAYLFKYIIIGDTGVGKSCLLLQFTDKRFQPVHDLTIGVEFGARMITIDGKQIKLQIWDTAGQESFRSITRSYYRGAAGALLVYDITRRDTFNHLTTWLEDARQHSNSNMVIMLIGNKRHLLIQQKKFMKKFKKESLTLIMRQMALKLALSMLLPMQHMQAIREDSRLGAAAVESVFTV

SEQ ID NO: 755373 - protein, 191 aa, Homo sapiens
MAYAYLFKYIIIGDTGVGKSCLLLQFTDKRFQPVHDLTIGVEFGARMITIDGKQIKLQIWDTAGQESFRSITRSYYRGAAGALLVYDITRRDTFNHLTTWLEDARQHSNSNMVIMLIGNKSDLESRREVKKEEGEAFAREHGLIFMETSAKTASNVEEAFINTAKEIYEKIQEGVFDINNEYIHINIVGQY

SEQ ID NO: 755374 - protein, 121 aa, Homo sapiens
MAYAYLFKYIIIGDTGVGKSCLLLQFTDKRFQPVHDLTIGVEFGARMITIDGKQIKLQIWDTAGQESFRSITRSYYRGAAGALLVYDITRRDTFNHLTTWLEDARQHSNSNMVIMLIGNKR

SEQ ID NO: 755375 - protein, 125 aa, Homo sapiens
PAAPAAAELPGRRGGGAEAPRRLLLFGWARSGAVSLGSAGVSSSGFLTAPHSRRLTAAAAAAGGAWRFEAERHRGWGAEEEQQREEEPCALALSGRGHGVSRLSGTGVGARRRSSSGRRSRVPWH

SEQ ID NO: 755376 - protein, 74 aa, Homo sapiens
LTINCICLMSWIQYRTGTLGHHWLCTTPVPHSHGVDGAPFSPKTCPTSSGVPSPQAIDRYLVHGLLGTQPHSRR

SEQ ID NO: 755377 - protein, 162 aa, Homo sapiens
EKDTMATFECETSEPFVKVKWYKDGMEVHEGDKYRMHSDRKVHFLSILTIDTSDAEDYSCVLVEDENVKTTAKLIVEGAVVEFVKELQDIEVPESYSGELECIVSPENIEGKWYHNDVELKSNGKYTITSRRGRQNLTVKDVTKEDQGEYSFVIDGKKTTCK

SEQ ID NO: 755378 - protein, 497 aa, Homo sapiens
MAAAGEGTPSSRGPRRDPPRRPPRNGYGVYVYPNSFFRYEGEWKAGRKHGHGKLLFKDGSYYEGAFVDGEITGEGRRHWAWSGDTFSGQFVLGEPQGYGVMEYKAGGCYEGEVSHGMREGHGFLVDRDGQVYQGSFHDNKRHGPGQMLFQNGDKYDGDWVRDRRQGHGVLRCADGSTYKGQWHSDVFSGLGSMAHCSGVTYYGLWINGHPAEQATRIVILGPEVMEVAQGSPFSVNVQLLQDHGEIAKSESGRVLQISAGVRYVQLSAYSEVNFFKVDRDNQETLIQTPFGFECIPYPVSSPAAGVPGPRAAKGGAEADVPLPRGDLELHLGALHGQEDTPGGLLARGHAPHCPGACQRVEQGCAEFTDVLLGPPPPGYHPFLFLDSLHKKAGGRSRGGLHPRGTPPTAQEPPGGSRPEGRATEEQAAAAHLGEYVLMIRDVTTPPFLGRRLPPAFKHLRVVAKRAGQPPHVLEEGPEASSSWQAAHSCTPEPPAPR

SEQ ID NO: 755379 - protein, 453 aa, Homo sapiens
MAAAGEGTPSSRGPRRDPPRRPPRNGYGVYVYPNSFFRYEGEWKAGRKHGHGKLLFKDGSYYEGAFVDGEITGEGRRHWAWSGDTFSGQFVLGEPQGYGVMEYKAGGCYEGEVSHGMREGHGFLVDRDGQVYQGSFHDNKRHGPGQMLFQNGDKYDGDWVRDRRQGHGVLRCADGSTYKGQWHSDVFSGLGSMAHCSGVTYYGLWINGHPAEQATRIVILGPEVMEVAQGSPFSVNVQLLQDHGEIAKSESGRVLQISAGVRYVQLSAYSEVNFFKVDRDNQETLIQTPFGFECIPYPVSSPAAGVPGPRAAKGGAEADVPLPRGDLELHLGALHGQEDTPGGLLARGHAPHCPGACQRVEQGCAEFTDVLLGPPPPGYHPFLFLDSLHKKAGGRSRGGLHPRGTPPTAQEPPGGSRPEGRATEEQAAAAHLGEYVLMIRDVTTPCPQEATSV

SEQ ID NO: 755380 - protein, 180 aa, Homo sapiens
MAAAGEGTPSSRGPRRDPPRRPPRNGYGVYVYPNSFFRYEGEWKAGRKHGHGKLLFKDGSYYEGAFVDGEITGEGRRHWAWSGDTFSGQFVLGEPQGYGVMEYKAGGCYEGEVSHGMREGHGFLVDRDGQVYQGSFHDNKRHGPGQMLFQNGDKYDGDWVRDRRQGHGVLRCADGSTYKL

SEQ ID NO: 755381 - protein, 204 aa, Homo sapiens
MAAAGEGTPSSRGPRRDPPRRPPRNGYGVYVYPNSFFRYEGEWKAGRKHGHGKLLFKDGSYYEGAFVDGEITGEGRRHWAWSGDTFSGQFVLGEPQGYGVMEYKAGGCYEGEVSHGMREGHGFLVDRDGQVYQGSFHDNKRHGPGQMLFQNGDKYDGDWVRDRRQGHGVLRCADGSTYKGQWHSDVFSGLGSMAHCSGVTYYGL

SEQ ID NO: 755382 - protein, 205 aa, Homo sapiens
MAAAGEGTPSSRGPRRDPPRRPPRNGYGVYVYPNSFFRYEGEWKAGRKHGHGKLLFKDGSYYEGAFVDGEITGEGRRHWAWSGDTFSGQFVLGEPQGYGVMEYKAGGCYEGEVSHGMREGLAPTGAGCCEGGRFQDMESYVHLGSGTSERACLTSEGWKGGRGPMPSSPHHQAMSYARHTPVCPAGPAALDAALSSATAEQTPVA

SEQ ID NO: 755383 - protein, 837 aa, Homo sapiens
MTESREVIDLDPPAETSQEQEDLFIVKVEEEDCTWMQEYNPPTFETFYQRFRHFQYHEASGPREALSQLRVLCCEWLRPELHTKEQILELLVLEQFLTILPEEFQPWVREHHPESGEEAVAVIENIQRELEERRQQIVACPDVLPRKMATPGAVQESCSPHPLTVDTQPEQAPQKPRLLEENALPVLQVPSLPLKDSQELTASLLSTGSQKLVKIEEVADVAVSFILEEWGHLDQSQKSLYRDDRKENYGSITSMGYESRDNMELIVKQISDDSESHWVAPEHTERSVPQDPDFAEVSDLKGMVQRWQVNPTVGKSRQNPSQKRDLDAITDISPKQSTHGERGHRCSDCGKFFLQASNFIQHRRIHTGEKPFKCGECGKSYNQRVHLTQHQRVHTGEKPYKCQVCGKAFRVSSHLVQHHSVHSGERPYGCNECGKNFGRHSHLIEHLKRHFREKSQRCSDKRSKNTKLSVKKKISEYSEADMELSGKTQRNVSQVQDFGEGCEFQGKLDRKQGIPMKEILGQPSSKRMNYSEVPYVHKKSSTGERPHKCNECGKSFIQSAHLIQHQRIHTGEKPFRCEECGKSYNQRVHLTQHQRVHTGEKPYTCPLCGKAFRVRSHLVQHQSVHSGERPFKCNECGKGFGRRSHLAGHLRLHSREKSHQCRECGEIFFQYVSLIEHQVLHMGQKNEKNGICEEAYSWNLTVIEDKKIELQEQPYQCDICGKAFGYSSDLIQHYRTHTAEKPYQCDICRENVGQCSHTKQHQKIYSSTKSHQCHECGRGFTLKSHLNQHQRIHTGEKPFQCKECGMNFSWSCSLFKHLRSHERTDPINTLSVEGSLL

SEQ ID NO: 755384 - protein, 837 aa, Homo sapiens; identical to SEQ ID NO: 755383

SEQ ID NO: 755385 - protein, 444 aa, Homo sapiens
MTESREVIDLDPPAETSQEQEDLFIVKVEEEDCTWMQEYNPPTFETFYQRFRHFQYHEASGPREALSQLRVLCCEWLRPELHTKEQILELLVLEQFLTILPEEFQPWVREHHPESGEEAVAVIENIQRELEERRQQIVACPDVLPRKMATPGAVQESCSPHPLTVDTQPEQAPQKPRLLEENGYESRDNMELIVKQISDDSESHWVAPEHTERSVPQDPDFAEVSDLKGMVQRWQVNPTVGKSRQNPSQKRDLDAITDISPKQSTHGERGHRCSDCGKFFLQASNFIQHRRIHTGEKPFKCGECGKSYNQRVHLTQHQRVHTGEKPYKCQVCGKAFRVSSHLVQHHSVHSGERPYGCNECGKNFGRHSHLIEHLKRHFREKSQRCSDKRSKNTKLSVKKKVMVRKRMEMKMRKLSQLRASGQLKMMRMTMSIPRSRRPTRMTRQ

SEQ ID NO: 755386 - protein, 764 aa, Homo sapiens
MTESREVIDLDPPAETSQEQEDLFIVKVEEEDCTWMQEYNPPTFETFYQRFRHFQYHEASGPREALSQLRVLCCEWLRPELHTKEQILELLVLEQFLTILPEEFQPWVREHHPESGEEAVAVIENIQRELEERRQQIVACPDVLPRKMATPGAVQESCSPHPLTVDTQPEQAPQKPRLLEENGYESRDNMELIVKQISDDSESHWVAPEHTERSVPQDPDFAEVSDLKGMVQRWQVNPTVGKSRQNPSQKRDLDAITDISPKQSTHGERGHRCSDCGKFFLQASNFIQHRRIHTGEKPFKCGECGKSYNQRVHLTQHQRVHTGEKPYKCQVCGKAFRVSSHLVQHHSVHSGERPYGCNECGKNFGRHSHLIEHLKRHFREKSQRCSDKRSKNTKLSVKKKISEYSEADMELSGKTQRNVSQVQDFGEGCEFQGKLDRKQGIPMKEILGQPSSKRMNYSEVPYVHKKSSTGERPHKCNECGKSFIQSAHLIQHQRIHTGEKPFRCEECGKSYNQRVHLTQHQRVHTGEKPYTCPLCGKAFRVRSHLVQHQSVHSGERPFKCNECGKGFGRRSHLAGHLRLHSREKSHQCRECGEIFFQYVSLIEHQVLHMGQKNEKNGICEEAYSWNLTVIEDKKIELQEQPYQCDICGKAFGYSSDLIQHYRTHTAEKPYQCDICRENVGQCSHTKQHQKIYSSTKSHQCHECGRGFTLKSHLNQHQRIHTGEKPFQCKECGMNFSWSCSLFKHLRSHERTDPINTLSVEGSLL

SEQ ID NO: 755387 - protein, 837 aa, Homo sapiens; identical to SEQ ID NO: 755383

SEQ ID NO: 755388 - protein, 764 aa, Homo sapiens; identical to SEQ ID NO: 755386

SEQ ID NO: 755389 - protein, 837 aa, Homo sapiens; identical to SEQ ID NO: 755383

SEQ ID NO: 755390 - protein, 764 aa, Homo sapiens; identical to SEQ ID NO: 755386

SEQ ID NO: 755391 - protein, 764 aa, Homo sapiens; identical to SEQ ID NO: 755386

SEQ ID NO: 755392 - protein, 203 aa, Homo sapiens
MHQIYSCSDENIEVFTTVIPSKVSSPARRRAKSSQHLLTKNVVIESDLYTHQPLELLPHRGDRRDPGDRRRFGRLQTARPPTAHPAKASARPVGISEPKTSNLCGNRAYGKSLIPPVPRISVKTSASASLEATAMGTEKGAVLMRGSRHLKKMTEEYPALPQGAEASLPLTGSASCGVPGILRKMWTRHKKKSEYVGSHQQRL

SEQ ID NO: 755393 - protein, 129 aa, Homo sapiens
MAAAARARVAYLLRQLQRAACQCPTHSHTYSQAPGLSPSGKTTDYAFEMAVSNIRYGAAVTKEVGMDLKNMGAKNVCLMTDKNLSKLPPVQVAMDSLVKNGIPFTVYDNVRVEPTDSRYSCIVVIVSLL

SEQ ID NO: 755394 - protein, 303 aa, Homo sapiens
MAAAARARVAYLLRQLQRAACQCPTHSHTYSQAPGLSPSGKTTDYAFEMAVSNIRYGAAVTKEVGMDLKNMGAKNVCLMTDKNLSKLPPVQVAMDSLVKNGIPFTVYDNVRVEPTDSSFMEAIEFAQKGAFDAYVAVGGGSTMDTCKAANLYASSPHSDFLDYVSAPIGKGKPVSVPLKPLIAVPTTSGTGSETTGVAIFDYEHLKVKIGITSRAIKPTLGLIDPLHTLHMPARVVANSGFDVLCHALESYTTLPYHLRSPCPSNPITRPAYQGSNPISDIWAIHALRIVAKYLKRAVNSTDK

SEQ ID NO: 755395 - protein, 467 aa, Homo sapiens [sequence omitted]

SEQ ID NO: 755396 - protein, 255 aa, Homo sapiens
MAVSNIRYGAAVTKEVGMDLKNMGAKNVCLMTDKNLSKLPPVQVAMDSLVKNGIPFTVYDNVRVEPTDSSFMEAIEFAQKGAFDAYVAVGGGSTMDTCKAANLYASSPHSDFLDYVSAPIGKGKPVSVPLKPLIAVPTTSGTGSETTGVAIFDYEHLKVKIGITSRAIKPTLGLIDPLHTLHMPARVVANSGFDVLCHALESYTTLPYHLRSPCPSNPITRPAYQGSNPISDIWAIHALRIVAKYLKRAVNSTDK

SEQ ID NO: 755397 - protein, 233 aa, Homo sapiens [sequence omitted]

SEQ ID NO: 755398 - protein, 119 aa, Homo sapiens
MWITHWCPMAFLWWLTSPAVFTFTAQMFPERHLEMAEILGADTRTARIQDAGLVLADTLRKFLFDLDVDDGLAAVGYSKADIPALVKGTLPQERVTKLAPRPQSEEDLAALFEASMKLY

SEQ ID NO: 755399 - protein, 237 aa, Homo sapiens
MAVSNIRYGAAVTKEVGMDLKNMGAKNVCLMTDKNLSKLPPVQVAMDSLVKNGIPFTVYDNVRVEPTDSSFMEAIEFAPCKAANLYASSPHSDFLDYVSAPIGKGKPVSVPLKPLIAVPTTSGTGSETTGVAIFDYEHLKVKIGITSRAIKPTLGLIDPLHTLHMPARVVANSGFDVLCHALESYTTLPYHLRSPCPSNPITRPAYQGSNPISDIWAIHALRIVAKYLKRAVNSTDK

SEQ ID NO: 755400 - protein, 303 aa, Homo sapiens; identical to SEQ ID NO: 755394

SEQ ID NO: 755401 - protein, 158 aa, Homo sapiens [sequence omitted]

SEQ ID NO: 755402 - protein, 131 aa, Homo sapiens
MQGRTALSSAGHRISFLPSPMAFLWWLTSPAVFTFTAQMFPERHLEMAEILGADTRTARIQDAGLVLADTLRKFLFDLDVDDGLAAVGYSKADIPALVKGTLPQERVTKLAPRPQSEEDLAALFEASMKLY

SEQ ID NO: 755403 - protein, 303 aa, Homo sapiens; identical to SEQ ID NO: 755394

SEQ ID NO: 755404 - protein, 303 aa, Homo sapiens; identical to SEQ ID NO: 755394

SEQ ID NO: 755405 - protein, 303 aa, Homo sapiens; identical to SEQ ID NO: 755394

SEQ ID NO: 755406 - protein, 158 aa, Homo sapiens [sequence omitted]

SEQ ID NO: 755407 - protein, 131 aa, Homo sapiens; identical to SEQ ID NO: 755402

SEQ ID NO: 755408 - protein, 303 aa, Homo sapiens; identical to SEQ ID NO: 755394

SEQ ID NO: 755409 - protein, 303 aa, Homo sapiens; identical to SEQ ID NO: 755394

SEQ ID NO: 755410 - protein, 126 aa, Homo sapiens [sequence omitted]

SEQ ID NO: 755411 - protein, 126 aa, Homo sapiens [sequence omitted]

SEQ ID NO: 755412 - protein, 436 aa, Homo sapiens
RGEGAPGRTLSLVLSRCGRPRLLGRLSGMKTKFCTGGEAEPSPLGLPLPQPPPPQPPADEQPEPRTRRRAYLWCKEFLPGAWRGLREDEFHISVIRGGLSNMLFQCSLPDTTATLGDEPRKVLLRLYGAILQMRSCNKEGSEQAQKENEFQGAEAMVLESVMFAILAERSLGPKLYGIFPQGRLEQFIPSRRLDTEELSLPDISAEIAEKMATFHGMKMPFNKEPKWLFGTMEKYLKEVLRIKFTEESRIKKLHKLLSYNLPLELENLRSLLESTPSPVVFCHNDCQEGNILLLEGRENSEKQKLMLIDFEYSSYNYRGFDIGNHFCEWMYDYSYEKYPFFRANIRKYPTKKQQLHFISSYLPAFQNDFENLSTEEKSIIKEEMLLEVNRFALASHFLWGLWSIVQAKISSIEFGYMDYAQARFDAYFHQKRKLGV

SEQ ID NO: 755413 - protein, 281 aa, Homo sapiens
MVLESVMFAILAERSLGPKLYGIFPQGRLEQFIPSRRLDTEELSLPDISAEIAEKMATFHGMKMPFNKEPKWLFGTMEKYLKEVLRIKFTEESRIKKLHKLLSYNLPLELENLRSLLESTPSPVVFCHNDCQEGNILLLEGRENSEKQKLMLIDFEYSSYNYRGFDIGNHFCEWMYDYSYEKYPFFRANIRKYPTKKQQLHFISSYLPAFQNDFENLSTEEKSIIKEEMLLEVNRFALASHFLWGLWSIVQAKISSIEFGYMDYAQARFDAYFHQKRKLGV

SEQ ID NO: 755414 - protein, 281 aa, Homo sapiens; identical to SEQ ID NO: 755413

SEQ ID NO: 755415 - protein, 230 aa, Homo sapiens
RPPTTTKFAAARTPFSKEPKWLGGTMQKYLKEVLRIKFTEESRIKKLHKLLSYNLPLELENLRSLLESTPSPVVFCHNDCQEGNILLLEGRENSEKQKLMLIDFEYSSYNYRGFDIGNHFCEWMYDYSYEKYPFFRANIRKYPTKKQQLHFISSYLPAFQNDFENLSTEEKSIIKEEMLLEVNRFALASHFLWGLWSIVQAKISSIEFGYMDYAQARFDAYFHQKRKLGV

SEQ ID NO: 755416 - protein, 109 aa, Homo sapiens [sequence omitted]

SEQ ID NO: 755417 - protein, 436 aa, Homo sapiens; identical to SEQ ID NO: 755412

SEQ ID NO: 755418 - protein, 484 aa, Homo sapiens
RGEGAPGRTLSLVLSRCGRPRLLGRLSGMKTKFCTGGEAEPSPLGLLLSCGSGSAAPAPGVGQQRDAASDLESKQLAPTAALALPPPPPLPLPLPLPQPPPPQPPADEQPEPRTRRRAYLWCKEFLPGAWRGLREDEFHISVIRGGLSNMLFQCSLPDTTATLGDEPRKVLLRLYGAILQMRSCNKEGSEQAQKENEFQGAEAMVLESVMFAILAERSLGPKLYGIFPQGRLEQFIPSRRLDTEELSLPDISAEIAEKMATFHGMKMPFNKEPKWLFGTMEKYLKEVLRIKFTEESRIKKLHKLLSYNLPLELENLRSLLESTPSPVVFCHNDCQEGNILLLEGRENSEKQKLMLIDFEYSSYNYRGFDIGNHFCEWMYDYSYEKYPFFRANIRKYPTKKQQLHFISSYLPAFQNDFENLSTEEKSIIKEEMLLEVNRFALASHFLWGLWSIVQAKISSIEFGYMDYAQARFDAYFHQKRKLGV

SEQ ID NO: 755419 - protein, 418 aa, Homo sapiens
RGEGAPGRTLSLVLSRCGRPRLLGRLSGMKTKFCTGGEAEPSPLGLPLPQPPPPQPPADEQPEPRTRRRAYLWCKEFLPGAWRGLREDEFHISVIRGGLSNMLFQCSLPDTTATLGDEPRKVLLRLYGAILQMGAEAMVLESVMFAILAERSLGPKLYGIFPQGRLEQFIPSRRLDTEELSLPDISAEIAEKMATFHGMKMPFNKEPKWLFGTMEKYLKEVLRIKFTEESRIKKLHKLLSYNLPLELENLRSLLESTPSPVVFCHNDCQEGNILLLEGRENSEKQKLMLIDFEYSSYNYRGFDIGNHFCEWMYDYSYEKYPFFRANIRKYPTKKQQLHFISSYLPAFQNDFENLSTEEKSIIKEEMLLEVNRFALASHFLWGLWSIVQAKISSIEFGYMDYAQARFDAYFHQKRKLGV

SEQ ID NO: 755420 - protein, 383 aa, Homo sapiens
QHIPAPQSPQLPLPQPPPPQPPADEQPEPRTRRRAYLWCKEFLPGAWRGLREDEFHISVIRGGLSNMLFQCSLPDTTATLGDEPRKVLLRLYGAILQMGAEAMVLESVMFAILAERSLGPKLYGIFPQGRLEQFIPSRRLDTEELSLPDISAEIAEKMATFHGMKMPFNKEPKWLFGTMEKYLKEVLRIKFTEESRIKKLHKLLSYNLPLELENLRSLLESTPSPVVFCHNDCQEGNILLLEGRENSEKQKLMLIDFEYSSYNYRGFDIGNHFCEWMYDYSYEKYPFFRANIRKYPTKKQQLHFISSYLPAFQNDFENLSTEEKSIIKEEMLLEVNRFALASHFLWGLWSIVQAKISSIEFGYMDYAQARFDAYFHQKRKLGV

SEQ ID NO: 755421 - protein, 355 aa, Homo sapiens
AVVGGAGSGGRGTVRGGLSNMLFQCSLPDTTATLGDEPRKVLLRLYGAILQMRSCNKEGSEQAQKENEFQGAEAMVLESVMFAILAERSLGPKLYGIFPQGRLEQFIPSRRLDTEELSLPDISAEIAEKMATFHGMKMPFNKEPKWLFGTMEKYLKEVLRIKFTEESRIKKLHKLLSYNLPLELENLRSLLESTPSPVVFCHNDCQEGNILLLEGRENSEKQKLMLIDFEYSSYNYRGFDIGNHFCEWMYDYSYEKYPFFRANIRKYPTKKQQLHFISSYLPAFQNDFENLSTEEKSIIKEEMLLEVNRFALASHFLWGLWSIVQAKISSIEFGYMDYAQARFDAYFHQKRKLGV

SEQ ID NO: 755422 - protein, 190 aa, Homo sapiens
TRRGRVGRPTRPRTRGLELENLRSLLESTPSPVVFCHNDCQEGNILLLEGRENSEKQKLMLIDFEYSSYNYRGFDIGNHFCEWMYDYSYEKYPFFRANIRKYPTKKQQLHFISSYLPAFQNDFENLSTEEKSIIKEEMLLEVNRFALASHFLWGLWSIVQAKISSIEFGYMDYAQARFDAYFHQKRKLGV

SEQ ID NO: 755423 - protein, 38 aa, Homo sapiens
CQEEQDAYRRIHSLTHLDSVTKIHNGSDIQNPDPAVYQ

SEQ ID NO: 755424 - protein, 37 aa, Homo sapiens
ESDAFLVCLNHALSTEKEEVMGLCIGEISRTLTLPCT

SEQ ID NO: 755425 - protein, 171 aa, Homo sapiens
LNRQAMRKETITKMLWSTRTLLNITKEQVPLVVEEYLDNVNEHDWKMLRNRMMDIVQDATFVYATLQTAHYHRDAGLPVYLYEFEHHARGIIVKPRTDGADHGDEMYFLFGGPFATGAKVPPDTPTGCPVSHLWMQTHPSIGWPQGAHQFLICYALPNESLLLRKQQKQQE

SEQ ID NO: 755426 - protein, 69 aa, Homo sapiens
VLLLTHEDGCGEGENPNDGNLPCWPRYNKDEKYLQLDFTTRVGMKLKEKKMAFWMSLYQSQRPEKQRQF

SEQ ID NO: 755427 - protein, 125 aa, Homo sapiens
MLRNRMMDIVQDATFVYATLQTAHYHRDAGLPVYLYEFEHHARGIIVKPRTDGADHGDEMYFLFGGPFATGAKVPPDTPTGCPVSHLWMQTHPSIGWPQGAHQFLICYALPNESLLLRKQQKQQE

SEQ ID NO: 755428 - protein, 108 aa, Homo sapiens
MLRNRMMDIVQDATFVYATLQTAHYHRDAGLPVYLYEFEHHARGIIVKPRTDGADHGDEMYFLFGGPFATGAKVPPDTPTGCPVSHLWMQTHPLQSLYTGVVSSIKKC

SEQ ID NO: 755429 - protein, 82 aa, Homo sapiens
DSPGCTIRHEKLPFSPSQAKNSWGAEHGSKSLVGPPLAQLAPRPQVSVASSLRISPRSRYHLWWRSTWTMSMSMTGRCYETV

SEQ ID NO: 755430 - protein, 150 aa, Homo sapiens
MLRNRMMDIVQDATFVYATLQTAHYHRDAGLPVYLYEFEHHARGIIVKPRTDGADHGDEMYFLFGGPFATGLSMGKEKALSLQMMKYWANFARTGNPNDGNLPCWPRYNKDEKYLQLDFTTRVGMKLKEKKMAFWMSLYQSQRPEKQRQF

SEQ ID NO: 755431 - protein, 348 aa, Homo sapiens
MSLPRFQRVNFGPYDNYIPVSELSKKSWNQQHFALLFPKPQRPGTKRRSKPSQIRDNTVSIIDEEQLRGDRRQPLWMYRSLMRISERPSVYLAARRQPLKPTRTVEVDSKAAEIGKKGEDKTTQKDTTDSESELKQGKKDSKKGKDIEKGKEEKLDAKKDSKKGKKDAEKGKDSATESEDEKGGAKKDNKKDKKDSNKGKDSATESEGEKGGTEKDSKKGKKDSKKGKDSAIELQAVKADEKKDEDGKKDANKGDESKDAKKDAKEIKKGKKDKKKPSSTDSDSKDDVKKESKKDATKDAKKVAKKDTEKESADSKKDAKKNAKKDAKKDAKKNAKKDEKKDAKKKGK

SEQ ID NO: 755432 - protein, 409 aa, Homo sapiens
MMMSLNSKQAFSMPHGGSLHVEPKYSALHSTSPGSSAPIAPSASSPSSSSNAGGGGGGGGGGGGGGGGRSSSSSSSGSSGGGGSEAMRRACLPTPPSNIFGGLDESLLARAEALAAVDIVSQSKSHHHHPPHHSPFKPDATYHTMNTIPCTSAASSSSVPISHPSALAGTHHHHHHHHHHHHQPHQALEGELLEHLSPGLALGAMAGPDGAVVSTPAHAPHMATMNPMHQAALSMAHAHGLPSHMGCMSDVDADPRDLEAFAERFKQRRIKLGVTQADVGSALANLKIPGVGSLSQSTICRFESLTLSHNNMIALKPILQAWLEEAEKSHREKLTKPELFNGAEKKRKRTSIAAPEKRSLEAYFAIQPRPSSEKIAAIAEKLDLKKNVVRVWFCNQRQKQKRMKYSAGI

SEQ ID NO: 755433 - protein, 223 aa, Homo sapiens
ERPAGAGVTGHSCTGQSTMASDHQTQAGKPQSLNPKIIIFEQENFQGHSHELNGPCPNLKETGVEKAGSVLVQAGPWVGYEQANCKGEQFVFEKGEYPRWDSWTSSRRTDSLSSLRPIKVDSQEHKIILYENPNFTGKKMEIIDDDVPSFHAHGYQEKVSSVRVQSGTWVGYQYPGYRGLQYLLEKGDYKDSSDFGAPHPQVQSVRRIRDMQWHQRGAFHPSN

SEQ ID NO: 755434 - protein, 240 aa, Homo sapiens
TGTSGEGINATSRWPSFTALAGAGVTGHSCTGQSTMASDHQTQAGKPQSLNPKIIIFEQENFQGHSHELNGPCPNLKETGVEKAGSVLVQAGPWVGYEQANCKGEQFVFEKGEYPRWDSWTSSRRTDSLSSLRPIKVDSQEHKIILYENPNFTGKKMEIIDDDVPSFHAHGYQEKVSSVRVQSGTWVGYQYPGYRGLQYLLEKGDYKDSSDFGAPHPQVQSVRRIRDMQWHQRGAFHPSN

SEQ ID NO: 755435 - protein, 328 aa, Homo sapiens
MEWDNGTGQALGLPPTTCVYRENFKQLLLPPVYSAVLAAGLPLNICVITQICTSRRALTRTAVYTLNLALADLLYACSLPLLIYNYAQGDHWPFGDFACRLVRFLFYANLHGSILFLTCISFQRYLGICHPLAPWHKRGGRRAAWLVCVAVWLAVTTQCLPTAIFAATGIQRNRTVCYDLSPPALATHYMPYGMALTVIGFLLPFAALLACYCLLACRLCRQDGPAEPVAQERRGKAARMAVVVAAAFAISFLPFHITKTAYLAVRSTPGVPCTVLEAFAAAYKGTRPFASANSVLDPILFYFTQKKFRRRPHELLQKLTAKWQRQGR

SEQ ID NO: 755436 - protein, 328 aa, Homo sapiens; identical to SEQ ID NO: 755435

SEQ ID NO: 755437 - protein, 328 aa, Homo sapiens; identical to SEQ ID NO: 755435

SEQ ID NO: 755438 - protein, 328 aa, Homo sapiens; identical to SEQ ID NO: 755435

SEQ ID NO: 755439 - protein, 328 aa, Homo sapiens; identical to SEQ ID NO: 755435

SEQ ID NO: 755440 - protein, 418 aa, Homo sapiens
MYGPGVNRPRAACQLCAVASYFLSPGLSVSSSAASPDFCQNIARDSFRHRTDWQQGLLHEWEFAPALHGLQARHLLTLGLPEHRKPTWAAMEWDNGTGQALGLPPTTCVYRENFKQLLLPPVYSAVLAAGLPLNICVITQICTSRRALTRTAVYTLNLALADLLYACSLPLLIYNYAQGDHWPFGDFACRLVRFLFYANLHGSILFLTCISFQRYLGICHPLAPWHKRGGRRAAWLVCVAVWLAVTTQCLPTAIFAATGIQRNRTVCYDLSPPALATHYMPYGMALTVIGFLLPFAALLACYCLLACRLCRQDGPAEPVAQERRGKAARMAVVVAAAFAISFLPFHITKTAYLAVRSTPGVPCTVLEAFAAAYKGTRPFASANSVLDPILFYFTQKKFRRRPHELLQKLTAKWQRQGR

SEQ ID NO: 755441 - protein, 160 aa, Homo sapiens
MAQRNRTVCYDLSPPALATHYMPYGMALTVIGFLLPFAALLACYCLLACRLCRQDGPAEPVAQERRGKAARMAVVVAAAFAISFLPFHITKTAYLAVRSTPGVPCTVLEAFAAAYKGTRPFASANSVLDPILFYFTQKKFRRRPHELLQKLTAKWQRQGR

SEQ ID NO: 755442 - protein, 328 aa, Homo sapiens; identical to SEQ ID NO: 755435

SEQ ID NO: 755443 - protein, 328 aa, Homo sapiens; identical to SEQ ID NO: 755435

SEQ ID NO: 755444 - protein, 328 aa, Homo sapiens; identical to SEQ ID NO: 755435

SEQ ID NO: 755445 - protein, 178 aa, Homo sapiens
QRHLVAECILNTRLAEGVSGALLPGLSSHSPLRFGGDGEPGRVRVNTHSLRVQLSRAFPEYDDLYCKYCFVYGQDWAPTAGLEEGISQITSKSQDVRQALVWNFPIDVTFKSTNPYGWPQIVLSVYGPDVFGNDVVRGYGAVHVPFSPGRHKRTIPMFVPESTSKLQKFTRSASCSTH

SEQ ID NO: 755446 - protein, 153 aa, Homo sapiens
MATASPSVFLLMVNGQVESAQFPEYDDLYCKYCFVYGQDWAPTAGLEEGISQITSKSQDVRQALVWNFPIDVTFKSTNPYGWPQIVLSVYGPDVFGNDVVRGYGAVHVPFSPGRHKRTIPMFVPESTSKLQKFTSLCLVASSDLQAAPPTEDK

SEQ ID NO: 755447 - protein, 224 aa, Homo sapiens
MATASPSVFLLMVNGQVESAQFPEYDDLYCKYCFVYGQDWAPTAGLEEGISQITSKSQDVRQALVWNFPIDVTFKSTNPYGWPQIVLSVYGPDVFGNDVVRGYGAVHVPFSPGRHKRTIPMFVPESTSKLQKFTSWFMGRRPEYTDPKVVAQGEGREVTRVRSQGFVTLLFNVVTKDMRKLGYDTGPSDTQGVLGPSPPQSFPKSAAAHRPEGQPGGQSWGHTE

SEQ ID NO: 755448 - protein, 204 aa, Homo sapiens
MATASPSVFLLMVNGQVESAQFPEYDDLYCKYCFVYGQDWAPTAGLEEGISQITSKSQDVRQALVWNFPIDVTFKSTNPYGWPQIVLSVYGPDVFGNDVVRGYGAVHVPFSPGRHKRTIPMFVPESTSKLQKFTSWFMGRRPEYTDPKVVAQGEGREVTRVRSQGFVTLLFNVVTKDMRKLGYDTGPSDTQGVLGPSPPQSFPQ

SEQ ID NO: 755449 - protein, 142 aa, Homo sapiens
MATASPSVFLLMVNGQVESAQFPEYDDLYCKYCFVYGQDWAPTAGLEEGISQITSKSQDVRQALVWNFPIDVTFKSTNPYGWPQIVLSVYGPDVFGNDVVRGYGAVHVPFSPGRHKRTIPMFVPESTSKLQKFTRSASCSTH

SEQ ID NO: 755450 - protein, 240 aa, Homo sapiens
QRHLVAECILNTRLAEGVSGALLPGLSSHSPLRFGGDGEPGRVRVNTHSLRVQLSRAFPEYDDLYCKYCFVYGQDWAPTAGLEEGISQITSKSQDVRQALVWNFPIDVTFKSTNPYGWPQIVLSVYGPDVFGNDVVRGYGAVHVPFSPGRHKRTIPMFVPESTSKLQKFTSWFMGRRPEYTDPKVVAQGEGREVTRVRSQGFVTLLFNVVTKDMRKLGYDTGPSDTQGVLGPSPPQSFPQ

SEQ ID NO: 755451 - protein, 187 aa, Homo sapiens
MATASPSVFLLMVNGQVESAQFPEYDDLYCKYCFVYGQDWAPTAGLEEGISQITSKSQDVRQALVWNFPIDVTFKSTNPYGWPQIVLSVYGPDVFGNDVVRGYGAVHVPFSPGRHKRTIPMFVPESTSKLQKFTSWFMGRRPEYTDPKVVAQGEGREDENAEAEIPRSTWVSLCPSPAWLMLPFCPQ

SEQ ID NO: 755452 - protein, 95 aa, Homo sapiens
WQLAKLLVLLLKLSSCFRSLGSHSCIFSLGKSCRPGPLPNPPARAVEPVATQPLPGQSLQGQLKASLPLLLQWNCPCYPQTDEGANTLIYTFNKL

SEQ ID NO: 755453 - protein, 120 aa, Homo sapiens
LPASIHPLMFVPVSLVLDRKDALLMLAMLVEPLWSFSDMHRVGKNIESPGIHVQLRLNQQSWNQGTTGNHILTLQMITHTPHGRSGKSSDAPAFQDNMMLLYIPWTMTSISVVEVGGLMA

SEQ ID NO: 755454 - protein, 131 aa, Homo sapiens
SIPSLSLQTQGTPAPFKKLALSDIFSITLASCGRGALGYSLTNHSWIGSKSATYGNICQFLSSALGLSQNGDLGKSHLASSSLLLAVLFCFCVCFLETGSYSVARLECGGVTIAHCSLKLLGSCNPPASAF

SEQ ID NO: 755455 - protein, 131 aa, Homo sapiens
TGTPGPGIGLGQKACSSHSLPFLCLWEQIRAAMVWVLSPATQEGAGTGAPSAPPLGSSVTQARGFLSLPPWLLRAAQAACMCLGQGPKKPLHGVWSLGLALPSPLPLPRLSPSEPGGGGVGILAFYLPCSR

SEQ ID NO: 755456 - protein, 297 aa, Homo sapiens
MEDYTKIEKIGEGTYGVVYKGRHKTTGQVVAMKKIRLESEEEGVPSTAIREISLLKELRHPNIVSLQDVLMQDSRLYLIFEFLSMDLKKYLDSIPPGQYMDSSLVKSYLYQILQGIVFCHSRRVLHRDLKPQNLLIDDKGTIKLADFGLARAFGIPIRVYTHEVVTLWYRSPEVLLGSARYSTPVDIWSIGTIFAELATKKPLFHGDSEIDQLFRIFRALGTPNNEVWPEVESLQDYKNTFPKWKPGSLASHVKNLDENGLDLLSKMLIYDPAKRISGKMALNHPYFNDLDNQIKKM

SEQ ID NO: 755457 - protein, 297 aa, Homo sapiens; identical to SEQ ID NO: 755456

SEQ ID NO: 755458 - protein, 447 aa, Homo sapiens
MELLKLNRSVQGTGPGPGASLCRPGAPLLNSSSVGNLSCEPPRIRGAGTRELELAIRITLYAVIFLMSVGGNMLIIVVLGLSRRLRTVTNAFLLSLAVSDLLLAVACMPFTLLPNLMGTFIFGTVICKAVSYLMGVSVSVSTLSLVAIALERYSAICRPLQARVWQTRSHAARVIVATWLLSGLLMVPYPVYTVVQPVGPRVLQCVHRWPSARVRQTWSVLLLLLLFFIPGVVMAVAYGLISRELYLGLRFDGDSDSDSQSRVRNQGGLPGAVHQNGRCRPETGAVGEDSDGCYVQLPRSRPALELTALTAPGPGSGSRPTQAKLLAKKRVVRMLLVIVVLFFLCWLPVYSANTWRAFDGPGAHRALSGAPISFIHLLSYASACVNPLVYCFMHRRFRQACLETCARCCPRPPRARPRALPDEDPPTPSIASLSRLSYTTISTLGPG

SEQ ID NO: 755459 - protein, 516 aa, Homo sapiens
MELLKLNRSVQGTGPGPGASLCRPGAPLLNSSSVGNLSCEPPRIRGAGTRELELAIRITLYAVIFLMSVGGNMLIIVVLGLSRRLRTVTNAFLLSLAVSDLLLAVACMPFTLLPNLMGTFIFGTVICKAVSYLMGVSVSVSTLSLVAIALERYSAICRPLQARVWQTRSHAARVIVATWLLSGLLMVPYPVYTVVQPVGPRVLQCVHRWPSARVRQTWSVLLLLLLFFIPGVVMAVAYGLISRELYLGLRFDGDSDSDSQSRVRNQGGLPGGAGPREQNLGEAELWRATGPAGVGGTEMKVRVRRKLEMELSWERRSGGDWAGDWGDSPFSLTAHPLCSGAVHQNGRCRPETGAVGEDSDGCYVQLPRSRPALELTALTAPGPGSGSRPTQAKLLAKKRVVRMLLVIVVLFFLCWLPVYSANTWRAFDGPGAHRALSGAPISFIHLLSYASACVNPLVYCFMHRRFRQACLETCARCCPRPPRARPRALPDEDPPTPSIASLSRLSYTTISTLGPG

SEQ ID NO: 755460 - protein, 381 aa, Homo sapiens
MSVGGNMLIIVVLGLSRRLRTVTNAFLLSLAVSDLLLAVACMPFTLLPNLMGTFIFGTVICKAVSYLMGVSVSVSTLSLVAIALERYSAICRPLQARVWQTRSHAARVIVATWLLSGLLMVPYPVYTVVQPVGPRVLQCVHRWPSARVRQTWSVLLLLLLFFIPGVVMAVAYGLISRELYLGLRFDGDSDSDSQSRVRNQGGLPGAVHQNGRCRPETGAVGEDSDGCYVQLPRSRPALELTALTAPGPGSGSRPTQAKLLAKKRVVRMLLVIVVLFFLCWLPVYSANTWRAFDGPGAHRALSGAPISFIHLLSYASACVNPLVYCFMHRRFRQACLETCARCCPRPPRARPRALPDEDPPTPSIASLSRLSYTTISTLGPG

SEQ ID NO: 755461 - protein, 503 aa, Homo sapiens
MELLKLNRSVQGTGPGPGASLCRPGAPLLNSSSVGNLSCEPPRIRGAGTRELELAIRITLYAVIFLMSVGGNMLIIVVLGLSRRLRTVTNAFLLSLAVSDLLLAVACMPFTLLPNLMGTFIFGTVICKAVSYLMGGVRQPPHPHLPLSPPKALVDVGVFPGWQGGVCGSPTDACVVQVSKVTPSFLFPCLGVSVSVSTLSLVAIALERYSAICRPLQARVWQTRSHAARVIVATWLLSGLLMVPYPVYTVVQPVGPRVLQCVHRWPSARVRQTWSVLLLLLLFFIPGVVMAVAYGLISRELYLGLRFDGDSDSDSQSRVRNQGGLPGAVHQNGRCRPETGAVGEDSDGCYVQLPRSRPALELTALTAPGPGSGSRPTQAKLLAKKRVVRMLLVIVVLFFLCWLPVYSANTWRAFDGPGAHRALSGAPISFIHLLSYASACVNPLVYCFMHRRFRQACLETCARCCPRPPRARPRALPDEDPPTPSIASLSRLSYTTISTLGPG

SEQ ID NO: 755462 - protein, 97 aa, Homo sapiens
INSLGQNPSCVGGPRGRGEAAAGDPGALTHPLRSPVPRGCTFLVPTPCTAAPPASPVLSSADPAAYPRQSRNPGPQPCAQGTAGPSELTEVVPRRAR

SEQ ID NO: 755463 - protein, 90 aa, Homo sapiens
  misc_feature (4)..(4): Xaa can be any naturally occurring amino acid
  misc_feature (9)..(9): Xaa can be any naturally occurring amino acid
  misc_feature (14)..(14): Xaa can be any naturally occurring amino acid
  misc_feature (16)..(16): Xaa can be any naturally occurring amino acid
  misc_feature (18)..(18): Xaa can be any naturally occurring amino acid
RGGXLDIRXADTVXIXDXGGRKPMVPTLWLPWMQGQPSTLGSTSRVQTGQRVTGSGPGVKSSSSYGKTNMSTQSMLYNLFQFTSSHAYKI

SEQ ID NO: 755464 - protein, 327 aa, Homo sapiens
MQMPAMMSLLLVSVGLMEALQAQSHPITRRDLFSQEIQLDMALASFDDQYAGCAAAMTAALPDLNHTEFQANQVYADSWTLASSQWQERQARWPEWSLSPTRPSPPPLGFRDEHGVALLAYTANSPLHKEFNAAVREAGRSRAHYLHHFSFKTLHFLLTEALQLLGSGQRPPRCHQVFRGVHGLRFRPAGPRATVRLGGFASASLKHVAAQQFGEDTFFGIWTCLGAPIKGYSFFPGEEEVLIPPFETFQVINASRPAQGPARIYLRALGKHSTYNCEYIKDKKCKSGPCHLDNSAMGQSPLSAVWSLLLLLWFLVVRAFPDGPGLL

SEQ ID NO: 755465 - protein, 137 aa, Homo sapiens
NESGAVDSDLNPFLAPRQATADLLSSLEDLELSNRRLVGENAKLQRSMETAEEGSARLGEEILALRKQLHSTQQALQFAKAMDEELEDLKTLARSLEEQNRSLLAQARQAVGLAQGKEGALSLLCFLESGRQSVTME

SEQ ID NO: 755466 - protein, 276 aa, Homo sapiens
MDLPEGPVGGPTAEMYLRERPEEARLGMPVSLEEQILNSTFEACDPQRTGTVAVAQVLAYLEAVTGQGPQDARLQTLANSLDPNGEGPKATVDLDTFLVVMRDWIAACQLHGGLELEEETAFQGALTSQQLPSGCPEAEEPANLESFGGEDPRPELQATADLLSSLEDLELSNRRLVGENAKLQRSMETAEEGSARLGEEILALRKQLHSTQQALQFAKAMDEELEDLKTLARSLEEQNRSLLAQARQAVGLAQGKEGALSLLCFLESGRQSVTME

SEQ ID NO: 755467 - protein, 276 aa, Homo sapiens; identical to SEQ ID NO: 755466

SEQ ID NO: 755468 - protein, 262 aa, Homo sapiens
MYLRERPEEARLGMPVSLEEQILNSTFEACDPQRTGTVAVAQVLAYLEAVTGQGPQDARLQTLANSLDPNGEGPKATVDLDTFLVVMRDWIAACQLHGGLELEEETAFQGALTSQQLPSGCPEAEEPANLESFGGEDPRPELQATADLLSSLEDLELSNRRLVGENAKLQRSMETAEEGSARLGEEILALRKQLHSTQQALQFAKAMDEELEDLKTLARSLEEQNRSLLAQARQAVGLAQGKEGALSLLCFLESGRQSVTME

SEQ ID NO: 755469 - protein, 255 aa, Homo sapiens
GQLQWGAKPHPFDNRGLELEEETAFQGALTSQQLPSGCPEAEEPANLESFGGEDPRPELQATADLLSSLEDLELSNRRLVGENAKLQRSMETAEEGSARLGEEILALRKQLHSTQQALQFAKAMDEELEDLKTLARSLEEQNRSLLAQARQAEKEQQHLVAEMETLQEENGKLLAERDGVKKRSQELAMEKDTLKRQLFECEHLICQRDTILSERTRDVESLAQTLEEYRVTTQELRLEISRLEEQLSQTYEGPD

SEQ ID NO: 755470 - protein, 353 aa, Homo sapiens
MDLPEGPVGGPTAEMYLRERPEEARLGMPVSLEEQILNSTFEACDPQRTGTVAVAQVLAYLEAVTGQGPQDARLQTLANSLDPNGEGPKATVDLDTFLVVMRDWIAACQLHGGLELEEETAFQGALTSQQLPSGCPEAEEPANLESFGGEDPRPELQATADLLSSLEDLELSNRRLVGENAKLQRSMETAEEGSARLGEEILALRKQLHSTQQALQFAKAMDEELEDLKTLARSLEEQNRSLLAQARQAEKEQQHLVAEMETLQEENGKLLAERDGVKKRSQELAMEKDTLKRQLFECEHLICQRDTILSERTRDVESLAQTLEEYRVTTQELRLEISRLEEQLSQTYEGPDE

SEQ ID NO: 755471 - protein, 63 aa, Homo sapiens
ETNVARNLRIHMTSEKHMHNMMLLQQNMKQIQHNLHLGLAPAEAELYQYYLAQNIGLTGMKLE

SEQ ID NO: 755472 - protein, 396 aa, Homo sapiens [sequence omitted]

SEQ ID NO: 755473 - protein, 113 aa, Homo sapiens
SMLPFIISLRFLFSSAGLIGFLFMLRALVAANFNTVYIYTAEVYPTTMRALGMGTSGSLCRIGAMVAPFISQVLMSASILGALCLFSSVCVVCAISAFTLPIETKGRALQQIK

SEQ ID NO: 755474 - protein, 100 aa, Homo sapiens
LGINFLGRRLSLSITMGCTALFFLLLNICTSSAGLIGFLFMLRALVAANFNTVYIYTAEVLMSASILGALCLFSSVCVVCAISAFTLPIETKGRALQQIK

SEQ ID NO: 755475 - protein, 201 aa, Homo sapiens
MGTETNYLCLSPPRNVPIITGSKDLQNVNITLRIIFQPVASQLPRIFTSIGEDYDEPVLTYITTEILKSVVARFDAGEVITQRELVSRQVSNDLTEQAATFGLILDDVSLTYLTFGKEFTEAVEAKQVAQQEAERARFVKEKAEQQKKAEQQKKVEQQKKAAVISAEGDSKATELIANSLATAGDGLMELCKLEAAEALGT

SEQ ID NO: 755476 - protein, 108 aa, Homo sapiens
LNLLILVPRKAWRKLSCRHPQWGICPIYFKSEANGRFSLMQGVELEDHTGAGVRSSCKKTSFSLVTWRNFCKSICHLLICHHTSYKKSIFCGLIGHQWASLERSWVCE

SEQ ID NO: 755477 - protein, 127 aa, Homo sapiens
MGFRKFSPFLALSILVLYQAGSLQAAPFRSALESSPDPATLSKEDARLLLAALVQDYVQMKASELKQEQETQGSSSAAQKRACNTATCVTHRLAGLLSRSGGMVKSNFVPTNVGSKAFGRRRRDLQA

SEQ ID NO: 755478 - protein, 127 aa, Homo sapiens; identical to SEQ ID NO: 755477

SEQ ID NO: 755479 - protein, 181 aa, Homo sapiens
GNTVLAAKVPGNQAAVQRIVQPSRPVKQLVLQPVKGSAPAGNPGATGPPLKPAVTLTSTPTQGESKRITLVLQQPQSGGPQGHRHVVLGSLPGKIVLQGNQLAALTQAKNAQGQPAKVVTIQLQVQQPQQKIQIVPQPPSSQPQPQQPPSTQPVTLSSVQQAQIMGPGQSPGQRLSVPVKV

SEQ ID NO: 755480 - protein, 156 aa, Homo sapiens
MADPIMDLFDDPNLFGLDSLTDDSFNQVTQDPIEEALGLPSSLDSLDQMNQDGGGGDVGNSSASELVPPPEETAPTELSKESTAPAPESITLHDYTTQPASQEQPAQPVLQTSTPTSGLLQVSKSQEILSQGNPFMGVSATAVSSSSAGGQPPQSA

SEQ ID NO: 755481 - protein, 121 aa, Homo sapiens
MKGESKRITLVLQQPQSGGPQGHRHVVLGSLPGKIVLQGNQLAALTQAKNAQGQPAKVVTIQLQVQQPQQKIQIVPQPPSSQPQPQQPPSTQPVTLSSVQQAQIMGPGQSPGQRLSVPVKV

SEQ ID NO: 755482 - protein, 2233 aa, Homo sapiens
PPPLSSLPMAALVLEDGSVLRGQPFGAAVSTAGEVVFQTGMVGYPEALTDPSYKAQILVLTYPLIGNYGIPPDEMDEFGLCKWFESSGIHVAALVVGECCPTPSHWSATRTLHEWLQQHGIPGLQGVDTRELTKKLREQGSLLGKLVQNGTEPSSLPFLDPNARPLVPEVSIKTPRVFNTGGAPRILALDCGLKYNQIRCLCQRGAEVTVVPWDHALDSQEYEGLFLSNGPGDPASYPSVVSTLSRVLSEPNPRPVFGICLGHQLLALAIGAKTYKMRYGNRGHNQPCLLVGSGRCFLTSQNHGFAVETDSLPADWAPLFTNANDGSNEGIVHNSLPFFSVQFHPEHQAGPSDMELLFDIFLETVKEATAGNPGGQTVRERLTERLCPPGIPTPGSGLPPPRKVLILGSGGLSIGQAGEFDYSGSQAIKALKEENIQTLLINPNIATVQTSQGLADKVYFLPITPHYVTQVIRNERPDGVLLTFGGQTALNCGVELTKAGVLARYGVRVLGTTVETIELTEDRRAFAARMAEIGEHVAPSEAGNSLEQAQAAAERLGYPVLVRAAFAVGGLGSGFASNREELSALVAPAFAHTSQVLVDKSLKGWKEIEYEVVRDAYGNCVTVCNMENLDPLGIHTGESIVVAPSQTLNDREYQLLRQTAIKVTQHLGIVGECNVQYALNPESEQYYIIEVNARLSRSSALASKATGYPLAYVAAKLALGIPLPELRNSVTGGTAAFEPSVDYCVVKIPRWDLSKFLRVSTKIGSCMKSVGEVMGIGRSFEEAFQKALRMVDENCVGFDHTVKPVSDMELETPTDKRIFVVAAALWAGYSVDRLYELTRIDRWFLHRMKRIIAHAQLLEQHRGQPLPPDLLQQAKCLGFSDKQIALAVLSTELAVRKLRQELGICPAVKQIDTVAAEWPAQTNYLYLTYWGTTHDLTFRTPHVLVLGSGVYRIGSSVEFDWCAVGCIQQLRKMGYKTIMVNYNPETVSTDYDMCDRLYFDEISFEVVMDIYELENPEGVILSMGGQLPNNMAMALHRQQCRVLGTSPEAIDSAENRFKFSRLLDTIGISQPQWRELSDLESARQFCQTVGYPCVVRPSYVLSGAAMNVAYTDGDLERFLSSAAAVSKEHPVVISKFIQEAKEIDVDAVASDGVVAAIAISEHVENAGVHSGDATLVTPPQDITAKTLERIKAIVHAVGQELQVTGPFNLQLIAKDDQLKVIECNVRVSRSFPFVSKTLGVDLVALATRVIMGEEVEPVGLMTGSGVVGVKVPQFSFSRLAGADVVLGVEMTSTGEVAGFGESRCEAYLKAMLSTGFKIPKKNILLTIGSYKNKSELLPTVRLLESLGYSLYASLGTADFYTEHGVKVTAVDWHFEEAVDGECPPQRSILEQLAEKNFELVINLSMRGAGGRRLSSFVTKGYRTRRLAADFSVPLIIDIKCTKLFVEALGQIGPAPPLKVHVDCMTSQKLVRLPGLIDVHVHLREPGGTHKEDFASGTAAALAGGITMVCAMPNTRPPIIDAPALALAQKLAEAGARCDFALFLGASSENAGTLGTVAGSAAGLKLYLNETFSELRLDSVVQWMEHFETWPSHLPIVAHAEQQTVAAVLMVAQLTQRSVHICHVARKEEILLIKAAKARGLPVTCEVAPHHLFLSHDDLERLGPGKGEVRPELGSRQDVEALWENMAVIDCFASDHAPHTLEEKCGSRPPPGFPGLETMLPLLLTAVSEGRLSLDDLLQRLHHNPRRIFHLPPQEDTYVEVDLEHEWTIPSHMPFSKAHWTPFEGQKVKGTVRRVVLRGEVAYIDGQVLVPPGYGQDVRKWPQGAVPQLPPSAPATSEMTTTPERPRRGIPGLPDGRFHLPPRIHRASDPGLPAEEPKEKSSRKVAEPELMGTPDGTCYPPPPVPRQASPQNLGTPGLLHPQTSPLLHSLVGQHILSVQQFTKDQMSHLFNVAHTLRMMVQKERSLDILKGKVMASMFYEVSTRTSSSFAAAMARLGGAVLSFSEATSSVQKGESLADSVQTMSCYADVVVLRHPQPGAVELAAKHCRRPVINAGDGVGEHPTQALLDIFTIREELGTVNGMTITMVGDLKHGRTVHSLACLLTQYRVSLRYVAPPSLRMPPTVRAFVASRGTKQEEFESIEEALPDTDVLYMTRIQKERFGSTQEYEACFGQFILTPHIMTRAKKKMVVMHPMPRVNEISVEVDSDPRAAYFRQAENGMYIRMALLATVLGRF

SEQ ID NO: 755483 - protein, 2071 aa, Homo sapiens
LPGRRLEESPVCVTTTYTGGAPRILALDCGLKYNQIRCLCQRGAEVTVVPWDHALDSQEYEGLFLSNGPGDPASYPSVVSTLSRVLSEPNPRPVFGICLGHQLLALAIGAKTYKMRYGNRGHNQPCLLVGSGRCFLTSQNHGFAVETDSLPADWAPLFTNANDGSNEGIVHNSLPFFSVQFHPEHQAGPSDMELLFDIFLETVKEATAGNPGGQTVRERLTERLCPPGIPTPGSGLPPPRKVLILGSGGLSIGQAGEFDYSGSQAIKALKEENIQTLLINPNIATVQTSQGLADKVYFLPITPHYVTQVIRNERPDGVLLTFGGQTALNCGVELTKAGVLARYGVRVLGTTVETIELTEDRRAFAARMAEIGEHVAPSEAGNSLEQAQAAAERLGYPVLVRAAFAVGGLGSGFASNREELSALVAPAFAHTSQVLVDKSLKGWKEIEYEVVRDAYGNCVTVCNMENLDPLGIHTGESIVVAPSQTLNDREYQLLRQTAIKVTQHLGIVGECNVQYALNPESEQYYIIEVNARLSRSSALASKATGYPLAYVAAKLALGIPLPELRNSVTGGTAAFEPSVDYCVVKIPRWDLSKFLRVSTKIGSCMKSVGEVMGIGRSFEEAFQKALRMVDENCVGFDHTVKPVSDMELETPTDKRIFVVAAALWAGYSVDRLYELTRIDRWFLHRMKRIIAHAQLLEQHRGQPLPPDLLQQAKCLGFSDKQIALAVLSTELAVRKLRQELGICPAVKQIDTVAAEWPAQTNYLYLTYWGTTHDLTFRTPHVLVLGSGVYRIGSSVEFDWCAVGCIQQLRKMGYKTIMVNYNPETVSTDYDMCDRLYFDEISFEVVMDIYELENPEGVILSMGGQLPNNMAMALHRQQCRVLGTSPEAIDSAENRFKFSRLLDTIGISQPQWRELSDLESARQFCQTVGYPCVVRPSYVLSGAAMNVAYTDGDLERFLSSAAAVSKEHPVVISKFIQEAKEIDVDAVASDGVVAAIAISEHVENAGVHSGDATLVTPPQDITAKTLERIKAIVHAVGQELQVTGPFNLQLIAKDDQLKVIECNVRVSRSFPFVSKTLGVDLVALATRVIMGEEVEPVGLMTGSGVVGVKVPQFSFSRLAGADVVLGVEMTSTGEVAGFGESRCEAYLKAMLSTGFKIPKKNILLTIGSYKNKSELLPTVRLLESLGYSLYASLGTADFYTEHGVKVTAVDWHFEEAVDGECPPQRSILEQLAEKNFELVINLSMRGAGGRRLSSFVTKGYRTRRLAADFSVPLIIDIKCTKLFVEALGQIGPAPPLKVHVDCMTSQKLVRLPGLIDVHVHLREPGGTHKEDFASGTAAALAGGITMVCAMPNTRPPIIDAPALALAQKLAEAGARCDFALFLGASSENAGTLGTVAGSAAGLKLYLNETFSELRLDSVVQWMEHFETWPSHLPIVAHAEQQTVAAVLMVAQLTQRSVHICHVARKEEILLIKAAKARGLPVTCEVAPHHLFLSHDDLERLGPGKGEVRPELGSRQDVEALWENMAVIDCFASDHAPHTLEEKCGSRPPPGFPGLETMLPLLLTAVSEGRLSLDDLLQRLHHNPRRIFHLPPQEDTYVEVDLEHEWTIPSHMPFSKAHWTPFEGQKVKGTVRRVVLRGEVAYIDGQVLVPPGYGQDVRKWPQGAVPQLPPSAPATSEMTTTPERPRRGIPGLPDGRFHLPPRIHRASDPGLPAEEPKEKSSRKVAEPELMGTPDGTCYPPPPVPRQASPQNLGTPGLLHPQTSPLLHSLVGQHILSVQQFTKDQMSHLFNVAHTLRMMVQKERSLDILKGKVMASMFYEVSTRTSSSFAAAMARLGGAVLSFSEATSSVQKGESLADSVQTMSCYADVVVLRHPQPGAVELAAKHCRRPVINAGDGVGEHPTQALLDIFTIREELGTVNGMTITMVGDLKHGRTVHSLACLLTQYRVSLRYVAPPSLRMPPTVRAFVASRGTKQEEFESIEEALPDTDVLYMTRIQKERFGSTQEYEACFGQFILTPHIMTRAKKKMVVMHPMPRVNEISVEVDSDPRAAYFRQAENGMYIRMALLATVLGRF

SEQ ID NO: 755484 - protein, 1025 aa, Homo sapiens
MHLIAEDDQLKVIECNVRVSRSFPFVSKTLGVDLVALATRVIMGEEVEPVGLMTGSGVVGVKVPQFSFSRLAGADVVLGVEMTSTGEVAGFGESRCEAYLKAMLSTGFKIPKKNILLTIGSYKNKSELLPTVRLLESLGYSLYASLGTADFYTEHGVKVTAVDWHFEEAVDGECPPQRSILEQLAEKNFELVINLSMRGAGGRRLSSFVTKGYRTRRLAADFSVPLIIDIKCTKLFVEALGQIGPAPPLKVHVDCMTSQKLVRLPGLIDVHVHLREPGGTHKEDFASGTAAALAGGITMVCAMPNTRPPIIDAPALALAQKLAEAGARCDFALFLGASSENAGTLGTVAGSAAGLKLYLNETFSELRLDSVVQWMEHFETWPSHLPIVAHAEQQTVAAVLMVAQLTQRSVHICHVARKEEILLIKAAKARGLPVTCEVAPHHLFLSHDDLERLGPGKGEVRPELGSRQDVEALWENMAVIDCFASDHAPHTLEEKCGSRPPPGFPGLETMLPLLLTAVSEGRLSLDDLLQRLHHNPRRIFHLPPQEDTYVEVDLEHEWTIPSHMPFSKAHWTPFEGQKVKGTVRRVVLRGEVAYIDGQVLVPPGYGQDVRKWPQGAVPQLPPSAPATSEMTTTPERPRRGIPGLPDGRFHLPPRIHRASDPGLPAEEPKEKSSRKVAEPELMGTPDGTCYPPPPVPRQASPQNLGTPGLLHPQTSPLLHSLVGQHILSVQQFTKDQMSHLFNVAHTLRMMVQKERSLDILKGKVMASMFYEVSTRTSSSFAAAMARLGGAVLSFSEATSSVQKGESLADSVQTMSCYADVVVLRHPQPGAVELAAKHCRRPVINAGDGVGEHPTQALLDIFTIREELGTVNGMTITMVGDLKHGRTVHSLACLLTQYRVSLRYVAPPSLRMPPTVRAFVASRGTKQEEFESIEEALPDTDVLYMTRIQKERFGSTQEYEACFGQFILTPHIMTRAKKKMVVMHPMPRVNEISVEVDSDPRAAYFRQAENGMYIRMALLATVLGRF

SEQ ID NO: 755485 - protein, 924 aa, Homo sapiens
KAEVEAGVNRPRRISAVIGSYKNKSELLPTVRLLESLGYSLYASLGTADFYTEHGVKVTAVDWHFEEAVDGECPPQRSILEQLAEKNFELVINLSMRGAGGRRLSSFVTKGYRTRRLAADFSVPLIIDIKCTKLFVEALGQIGPAPPLKVHVDCMTSQKLVRLPGLIDVHVHLREPGGTHKEDFASGTAAALAGGITMVCAMPNTRPPIIDAPALALAQKLAEAGARCDFALFLGASSENAGTLGTVAGSAAGLKLYLNETFSELRLDSVVQWMEHFETWPSHLPIVAHAEQQTVAAVLMVAQLTQRSVHICHVARKEEILLIKAAKARGLPVTCEVAPHHLFLSHDDLERLGPGKGEVRPELGSRQDVEALWENMAVIDCFASDHAPHTLEEKCGSRPPPGFPGLETMLPLLLTAVSEGRLSLDDLLQRLHHNPRRIFHLPPQEDTYVEVDLEHEWTIPSHMPFSKAHWTPFEGQKVKGTVRRVVLRGEVAYIDGQVLVPPGYGQDVRKWPQGAVPQLPPSAPATSEMTTTPERPRRGIPGLPDGRFHLPPRIHRASDPGLPAEEPKEKSSRKVAEPELMGTPDGTCYPPPPVPRQASPQNLGTPGLLHPQTSPLLHSLVGQHILSVQQFTKDQMSHLFNVAHTLRMMVQKERSLDILKGKVMASMFYEVSTRTSSSFAAAMARLGGAVLSFSEATSSVQKGESLADSVQTMSCYADVVVLRHPQPGAVELAAKHCRRPVINAGDGVGEHPTQALLDIFTIREELGTVNGMTITMVGDLKHGRTVHSLACLLTQYRVSLRYVAPPSLRMPPTVRAFVASRGTKQEEFESIEEALPDTDVLYMTRIQKERFGSTQEYEACFGQFILTPHIMTRAKKKMVVMHPMPRVNEISVEVDSDPRAAYFRQAENGMYIRMALLATVLGRF

SEQ ID NO: 755486 - protein, 2071 aa, Homo sapiens; identical to SEQ ID NO: 755483

SEQ ID NO: 755487 - protein, 770 aa, Homo sapiens
MTSQKLVRLPGLIDVHVHLREPGGTHKEDFASGTAAALAGGITMVCAMPNTRPPIIDAPALALAQKLAEAGARCDFALFLGASSENAGTLGTVAGSAAGLKLYLNETFSELRLDSVVQWMEHFETWPSHLPIVAHAEQQTVAAVLMVAQLTQRSVHICHVARKEEILLIKAAKARGLPVTCEVAPHHLFLSHDDLERLGPGKGEVRPELGSRQDVEALWENMAVIDCFASDHAPHTLEEKCGSRPPPGFPGLETMLPLLLTAVSEGRLSLDDLLQRLHHNPRRIFHLPPQEDTYVEVDLEHEWTIPSHMPFSKAHWTPFEGQKVKGTVRRVVLRGEVAYIDGQVLVPPGYGQDVRKWPQGAVPQLPPSAPATSEMTTTPERPRRGIPGLPDGRFHLPPRIHRASDPGLPAEEPKEKSSRKVAEPELMGTPDGTCYPPPPVPRQASPQNLGTPGLLHPQTSPLLHSLVGQHILSVQQFTKDQMSHLFNVAHTLRMMVQKERSLDILKGKVMASMFYEVSTRTSSSFAAAMARLGGAVLSFSEATSSVQKGESLADSVQTMSCYADVVVLRHPQPGAVELAAKHCRRPVINAGDGVGEHPTQALLDIFTIREELGTVNGMTITMVGDLKHGRTVHSLACLLTQYRVSLRYVAPPSLRMPPTVRAFVASRGTKQEEFESIEEALPDTDVLYMTRIQKERFGSTQEYEACFGQFILTPHIMTRAKKKMVVMHPMPRVNEISVEVDSDPRAAYFRQAENGMYIRMALLATVLGRF

SEQ ID NO: 755488 - protein, 2071 aa, Homo sapiens; identical to SEQ ID NO: 755483

SEQ ID NO: 755489 - protein, 1718 aa, Homo sapiens
LPGRRLEESPVCVTTTYTGGAPRILALDCGLKYNQIRCLCQRGAEVTVVPWDHALDSQEYEGLFLSNGPGDPASYPSVVSTLSRVLSEPNPRPVFGICLGHQLLALAIGAKTYKMRYGNRGHNQPCLLVGSGRCFLTSQNHGFAVETDSLPADWAPLFTNANDGSNEGIVHNSLPFFSVQFHPEHQAGPSDMELLFDIFLETVKEATAGNPGGQTVRERLTERLCPPGIPTPGSGLPPPRKVLILGSGGLSIGQAGEFDYSGSQAIKALKEENIQTLLINPNIATVQTSQGLADKVYFLPITPHYVTQVIRNERPDGVLLTFGGQTALNCGVELTKAGVLARYGVRVLGTTVETIELTEDRRAFAARMAEIGEHVAPSEAGNSLEQAQAAAERLGYPVLVRAAFAVGGLGSGFASNREELSALVAPAFAHTSQVLVDKSLKGWKEIEYEVVRDAYGNCVTVCNMENLDPLGIHTGESIVVAPSQTLNDREYQLLRQTAIKVTQHLGIVGECNVQYALNPESEQYYIIEVNARLSRSSALASKATGYPLAYVAAKLALGIPLPELRNSVTGGTAAFEPSVDYCVVKIPRWDLSKFLRVSTKIGSCMKSVGEVMGIGRSFEEAFQKALRMVDENCVGFDHTVKPVSDMELETPTDKRIFVVAAALWAGYSVDRLYELTRIDRWFLHRMKRIIAHAQLLEQHRGQPLPPDLLQQAKCLGFSDKQIALAVLSTELAVRKLRQELGICPAVKQIDTVAAEWPAQTNYLYLTYWGTTHDLTFRTPHVLVLGSGVYRIGSSVEFDWCAVGCIQQLRKMGYKTIMVNYNPETVSTDYDMCDRLYFDEISFEVVMDIYELENPEGVILSMGGQLPNNMAMALHRQQCRVLGTSPEAIDSAENRFKFSRLLDTIGISQPQWRELSDLESARQFCQTVGYPCVVRPSYVLSGAAMNVAYTDGDLERFLSSAAAVSKEHPVVISKFIQEAKEIDVDAVASDGVVAAIAISEHVENAGVHSGDATLVTPPQDITAKTLERIKAIVHAVGQELQVTGPFNLQLIAKDDQLKVIECNVRVSRSFPFVSKTLGVDLVALATRVIMGEEVEPVGLMTGSGVVGVKVPQFSFSRLAGADVVLGVEMTSTGEVAGFGESRCEAYLKAMLSTGFKIPKKNILLTIGSYKNKSELLPTVRLLESLGYSLYASLGTADFYTEHGVKVTAVDWHFEEAVDGECPPQRSILEQLAEKNFELVINLSMRGAGGRRLSSFVTKGYRTRRLAADFSVPLIIDIKCTKLFVEALGQIGPAPPLKVHVDCMTSQKLVRLPGLIDVHVHLREPGGTHKEDFASGTAAALAGGITMVCAMPNTRPPIIDAPALALAQKLAEAGARCDFALFLGASSENAGTLGTVAGSAAGLKLYLNETFSELRLDSVVQWMEHFETWPSHLPIVAHAEQQTVAAVLMVAQLTQRSVHICHVARKEEILLIKAAKARGLPVTCEVAPHHLFLSHDDLERLGPGKGEVRPELGSRQDVEALWENMAVIDCFASDHAPHTLEEKCGSRPPPGFPGLETMLPLLLTAVSEGRLSLDDLLQRLHHNPRRIFHLPPQEDTYVEVDLEHEWTIPSHMPFSKAHWTPFEGQKVKGTVRRVVLRGEVAYIDGQVLVPPGYGQDVRKWPQGAVPQLPPSAPATSEMTTTPERPRRGIPGLPDGRFHLPPRIHRASDPGLPAVFLRPGA

SEQ ID NO: 755490 - protein, 1693 aa, Homo sapiens
LPGRRLEESPVCVTTTYTGGAPRILALDCGLKYNQIRCLCQRGAEVTVVPWDHALDSQEYEGLFLSNGPGDPASYPSVVSTLSRVLSEPNPRPVFGICLGHQLLALAIGAKTYKMRYGNRGHNQPCLLVGSGRCFLTSQNHGFAVETDSLPADWAPLFTNANDGSNEGIVHNSLPFFSVQFHPEHQAGPSDMELLFDIFLETVKEATAGNPGGQTVRERLTERLCPPGIPTPGSGLPPPRKVLILGSGGLSIGQAGEFDYSGSQAIKALKEENIQTLLINPNIATVQTSQGLADKVYFLPITPHYVTQVIRNERPDGVLLTFGGQTALNCGVELTKAGVLARYGVRVLGTTVETIELTEDRRAFAARMAEIGEHVAPSEAGNSLEQAQAAAERLGYPVLVRAAFAVGGLGSGFASNREELSALVAPAFAHTSQVLVDKSLKGWKEIEYEVVRDAYGNCVTVCNMENLDPLGIHTGESIVVAPSQTLNDREYQLLRQTAIKVTQHLGIVGECNVQYALNPESEQYYIIEVNARLSRSSALASKATGYPLAYVAAKLALGIPLPELRNSVTGGTAAFEPSVDYCVVKIPRWDLSKFLRVSTKIGSCMKSVGEVMGIGRSFEEAFQKALRMVDENCVGFDHTVKPVSDMELETPTDKRIFVVAAALWAGYSVDRLYELTRIDRWFLHRMKRIIAHAQLLEQHRGQPLPPDLLQQAKCLGFSDKQIALAVLSTELAVRKLRQELGICPAVKQIDTVAAEWPAQTNYLYLTYWGTTHDLTFRTPHVLVLGSGVYRIGSSVEFDWCAVGCIQQLRKMGYKTIMVNYNPETVSTDYDMCDRLYFDEISFEVVMDIYELENPEGVILSMGGQLPNNMAMALHRQQCRVLGTSPEAIDSAENRFKFSRLLDTIGISQPQWRELSDLESARQFCQTVGYPCVVRPSYVLSGAAMNVAYTDGDLERFLSSAAAVSKEHPVVISKFIQEAKEIDVDAVASDGVVAAIAISEHVENAGVHSGDATLVTPPQDITAKTLERIKAIVHAVGQELQVTGPFNLQLIAKDDQLKVIECNVRVSRSFPFVSKTLGVDLVALATRVIMGEEVEPVGLMTGSGVVGVKVPQFSFSRLAGADVVLGVEMTSTGEVAGFGESRCEAYLKAMLSTGFKIPKKNILLTIGSYKNKSELLPTVRLLESLGYSLYASLGTADFYTEHGVKVTAVDWHFEEAVDGECPPQRSILEQLAEKNFELVINLSMRGAGGRRLSSFVTKGYRTRRLAADFSVPLIIDIKCTKLFVEALGQIGPAPPLKVHVDCMTSQKLVRLPGLIDVHVHLREPGGTHKEDFASGTAAALAGGITMVCAMPNTRPPIIDAPALALAQKLAEAGARCDFALFLGASSENAGTLGTVAGSAAGLKLYLNETFSELRLDSVVQWMEHFETWPSHLPIVAHAEQQTVAAVLMVAQLTQRSVHICHVARKEEILLIKAAKARGLPVTCEVAPHHLFLSHDDLERLGPGKGEVRPELGSRQDVEALWENMAVIDCFASDHAPHTLEEKCGSRPPPGFPGLETMLPLLLTAVSEGRLSLDDLLQRLHHNPRRIFHLPPQEDTYVEVDLEHEWTIPSHMPFSKAHWTPFEGQKVKGTVRRVVLRGEVAYIDGQVLVPPGYGQDVRKWPQGAVPQLPPSAPATSEMTTPGVVVHICNPSYLGG

SEQ ID NO: 755491 - protein, 1238 aa, Homo sapiens
LPGRRLEESPVCVTTTYTGGAPRILALDCGLKYNQIRCLCQRGAEVTVVPWDHALDSQEYEGLFLSNGPGDPASYPSVVSTLSRVLSEPNPRPVFGICLGHQLLALAIGAKTYKMRYGNRGHNQPCLLVGSGRCFLTSQNHGFAVETDSLPADWAPLFTNANDGSNEGIVHNSLPFFSVQFHPEHQAGPSDMELLFDIFLETVKEATAGNPGGQTVRERLTERLCPPGIPTPGSGLPPPRKVLILGSGGLSIGQAGEFDYSGSQAIKALKEENIQTLLINPNIATVQTSQGLADKVYFLPITPHYVTQVIRNERPDGVLLTFGGQTALNCGVELTKAGVLARYGVRVLGTTVETIELTEDRRAFAARMAEIGEHVAPSEAGNSLEQAQAAAERLGYPVLVRAAFAVGGLGSGFASNREELSALVAPAFAHTSQVLVDKSLKGWKEIEYEVVRDAYGNCVTVCNMENLDPLGIHTGESIVVAPSQTLNDREYQLLRQTAIKVTQHLGIVGECNVQYALNPESEQYYIIEVNARLSRSSALASKATGYPLAYVAAKLALGIPLPELRNSVTGGTAAFEPSVDYCVVKIPRWDLSKFLRVSTKIGSCMKSVGEVMGIGRSFEEAFQKALRMVDENCVGFDHTVKPVSDMELETPTDKRIFVVAAALWAGYSVDRLYELTRIDRWFLHRMKRIIAHAQLLEQHRGQPLPPDLLQQAKCLGFSDKQIALAVLSTELAVRKLRQELGICPAVKQIDTVAAEWPAQTNYLYLTYWGTTHDLTFRTPHVLVLGSGVYRIGSSVEFDWCAVGCIQQLRKMGYKTIMVNYNPETVSTDYDMCDRLYFDEISFEVVMDIYELENPEGVILSMGGQLPNNMAMALHRQQCRVLGTSPEAIDSAENRFKFSRLLDTIGISQPQWRELSDLESARQFCQTVGYPCVVRPSYVLSGAAMNVAYTDGDLERFLSSAAAVSKEHPVVISKFIQEAKEIDVDAVASDGVVAAIAISEHVENAGVHSGDATLVTPPQDITAKTLERIKAIVHAVGQELQVTGPFNLQLIAKDDQLKVIECNVRVSRSFPFVSKTLGVDLVALATRVIMGEEVEPVGLMTGSGVVGVKVPQFSFSRLAGADVVLGVEMTSTGEVAGFGESRCEAYLKAMLSTGFKIPKKNILLTIGSYKNKSELLPTVRLLESLGYSLYASLGTADFYTEHGVKVQELWQPTPLLPFPKGVKILHQRIIWAGHGGIYL

SEQ ID NO: 755492 - protein, 2101 aa, Homo sapiens
LPGRRLEESPVCVTTTYTGGAPRILALDCGLKYNQIRCLCQRGAEVTVVPWDHALDSQEYEGLFLSNGPGDPASYPSVVSTLSRVLSEPNPRPVFGICLGHQLLALAIGAKTYKMRYGNRGHNQPCLLVGSGRCFLTSQNHGFAVETDSLPADWAPLFTNANDGSNEGIVHNSLPFFSVQFHPEHQAGPSDMELLFDIFLETVKEATAGNPGGQTVRERLTERLCPPGIPTPGSGLPPPRKVLILGSGGLSIGQAGEFDYSGSQAIKALKEENIQTLLINPNIATVQTSQGLADKVYFLPITPHYVTQVIRNERPDGVLLTFGGQTALNCGVELTKAGVLARYGVRVLGTTVETIELTEDRRAFAARMAEIGEHVAPSEAGNSLEQAQAAAERLGYPVLVRAAFAVGGLGSGFASNREELSALVAPAFAHTSQVLVDKSLKGWKEIEYEVVRDAYGNCVTVCNMENLDPLGIHTGESIVVAPSQTLNDREYQLLRQTAIKVTQHLGIVGECNVQYALNPESEQYYIIEVNARLSRSSALASKATGYPLAYVAAKLALGIPLPELRNSVTGGTAAFEPSVDYCVVKIPRWDLSKFLRVSTKIGSCMKSVGEVMGIGRSFEEAFQKALRMVDENCVGFDHTVKPVSDMELETPTDKRIFVVAAALWAGYSVDRLYELTRIDRWFLHRMKRIIAHAQLLEQHRGQPLPPDLLQQAKCLGFSDKQIALAVLSTELAVRKLRQELGICPAVKQIDTVAAEWPAQTNYLYLTYWGTTHDLTFRTPHVLVLGSGVYRIGSSVEFDWCAVGCIQQLRKMGYKTIMVNYNPETVSTDYDMCDRLYFDEISFEVVMDIYELENPEGVILSMGGQLPNNMAMALHRQQCRVLGTSPEAIDSAENRFKFSRLLDTIGISQPQWRELSDLEVGWDLVGYPEAGGCLGESVNNSAKLPASCESARQFCQTVGYPCVVRPSYVLSGAAMNVAYTDGDLERFLSSAAAVSKEHPVVISKFIQEAKEIDVDAVASDGVVAAIAISEHVENAGVHSGDATLVTPPQDITAKTLERIKAIVHAVGQELQVTGPFNLQLIAKDDQLKVIECNVRVSRSFPFVSKTLGVDLVALATRVIMGEEVEPVGLMTGSGVVGVKVPQFSFSRLAGADVVLGVEMTSTGEVAGFGESRCEAYLKAMLSTGFKIPKKNILLTIGSYKNKSELLPTVRLLESLGYSLYASLGTADFYTEHGVKVTAVDWHFEEAVDGECPPQRSILEQLAEKNFELVINLSMRGAGGRRLSSFVTKGYRTRRLAADFSVPLIIDIKCTKLFVEALGQIGPAPPLKVHVDCMTSQKLVRLPGLIDVHVHLREPGGTHKEDFASGTAAALAGGITMVCAMPNTRPPIIDAPALALAQKLAEAGARCDFALFLGASSENAGTLGTVAGSAAGLKLYLNETFSELRLDSVVQWMEHFETWPSHLPIVAHAEQQTVAAVLMVAQLTQRSVHICHVARKEEILLIKAAKARGLPVTCEVAPHHLFLSHDDLERLGPGKGEVRPELGSRQDVEALWENMAVIDCFASDHAPHTLEEKCGSRPPPGFPGLETMLPLLLTAVSEGRLSLDDLLQRLHHNPRRIFHLPPQEDTYVEVDLEHEWTIPSHMPFSKAHWTPFEGQKVKGTVRRVVLRGEVAYIDGQVLVPPGYGQDVRKWPQGAVPQLPPSAPATSEMTTTPERPRRGIPGLPDGRFHLPPRIHRASDPGLPAEEPKEKSSRKVAEPELMGTPDGTCYPPPPVPRQASPQNLGTPGLLHPQTSPLLHSLVGQHILSVQQFTKDQMSHLFNVAHTLRMMVQKERSLDILKGKVMASMFYEVSTRTSSSFAAAMARLGGAVLSFSEATSSVQKGESLADSVQTMSCYADVVVLRHPQPGAVELAAKHCRRPVINAGDGVGEHPTQALLDIFTIREELGTVNGMTITMVGDLKHGRTVHSLACLLTQYRVSLRYVAPPSLRMPPTVRAFVASRGTKQEEFESIEEALPDTDVLYMTRIQKERFGSTQEYEACFGQFILTPHIMTRAKKKMVVMHPMPRVNEISVEVDSDPRAAYFRQAENGMYIRMALLATVLGRF

SEQ ID NO: 755493 - protein, 2152 aa, Homo sapiens
MPGRRLEESPVCVTTTYTGGAPRILALDCGLKYNQIRCLCQRGAEVTVVPWDHALDSQEYEGLFLSNGPGDPASYPSVVSTLSRVLSEPNPRPVFGICLGHQLLALAIGAKTYKMRYGNRGHNQPCLLVGSGRCFLTSQNHGFAVETDSLPADWAPLFTNANDGSNEGIVHNSLPFFSVQFHPEHQAGPSDMELLFDIFLETVKEATAGNPGGQTVRERLTERLCPPGIPTPGSGLPPPRKVLILGSGGLSIGQAGEFDYSGSQAIKALKEENIQTLLINPNIATVQTSQGLADKVYFLPITPHYVTQVIRNERPDGVLLTFGGQTALNCGVELTKAGVLARYGVRVLGTTVETIELTEDRRAFAARMAEIGEHVAPSEAGNSLEQAQAAAERLGYPVLVRAAFAVGGLGSGFASNREELSALVAPAFAHTSQVLVDKSLKGWKEIEYEVVRDAYGNCVTVCNMENLDPLGIHTGESIVVAPSQTLNDREYQLLRQTAIKVTQHLGIVGECNVQYALNPESEQYYIIEVNARLSRSSALASKATGYPLAYVAAKLALGIPLPELRNSVTGGTAAFEPSVDYCVVKIPRWDLSKFLRVSTKIGSCMKSVGEVMGIGRSFEEAFQKALRMVDENCVGFDHTVKPVSDMELETPTDKRIFVVAAALWAGYSVDRLYELTRIDRWFLHRMKRIIAHAQLLEQHRGQPLPPDLLQQAKCLGFSDKQIALAVLSTELAVRKLRQELGICPAVKQIDTVAAEWPAQTNYLYLTYWGTTHDLTFRTPHVLVLGSGVYRIGSSVEFDWCAVGCIQQLRKMGYKTIMVNYNPETVSTDYDMCDRLYFDEISFEVVMDIYELENPEGVILSMGGQLPNNMAMALHRQQCRVLGTSPEAIDSAENRFKFSRLLDTIGISQPQWRELSDLESARQFCQTVGYPCVVRPSYVLSGAAMNVAYTDGDLERFLSSAAAVSKEHPVVISKFIQEAKEIDVDAVASDGVVAAIAISEHVENAGVHSGDATLVTPPQDITAKTLERIKAIVHAVGQELQVTGPFNLQLIAKDDQLKVIECNVRVSRSFPFVSKTLGVDLVALATRVIMGEEVEPVGLMTGSGVVGVKVPQFSFSRLAGADVVLGVEMTSTGEVAGFGESRCEAYLKAMLSTGFKIPKKNILLTIGSYKNKSELLPTVRLLESLGYSLYASLGTADFYTEHGVKVTAVDWHFEEAVDGECPPQRSILEQLAEKNFELVINLSMRGAGGRRLSSFVTKGYRTRRLAADFSVPLIIDIKCTKLFVEALGQIGPAPPLKVHVDCMTSQKLVRLPGLIDVHVHLREPGGTHKEDFASGTAAALAGGITMVCAMPNTRPPIIDAPALALAQKLAEAGARCDFALFLGASSENAGTLGTVAGSAAGLKLYLNETFSELRLDSVVQWMEHFETWPSHLPIVAHAEQQTVAAVLMVAQLTQRSVHICHVARKEEVRVHLRSCCPCCFPSNTKGQVVLRGRRQQEESLETAGGGSRASTLAGLHHHFFEQGCWPLGLCVGQGIWVVPLLDLPIVPQILLIKAAKARGLPVTCEVAPHHLFLSHDDLERLGPGKGEVRPELGSRQDVEALWENMAVIDCFASDHAPHTLEEKCGSRPPPGFPGLETMLPLLLTAVSEGRLSLDDLLQRLHHNPRRIFHLPPQEDTYVEVDLEHEWTIPSHMPFSKAHWTPFEGQKVKGTVRRVVLRGEVAYIDGQVLVPPGYGQDVRKWPQGAVPQLPPSAPATSEMTTTPERPRRGIPGLPDGRFHLPPRIHRASDPGLPAEEPKEKSSRKVAEPELMGTPDGTCYPPPPVPRQASPQNLGTPGLLHPQTSPLLHSLVGQHILSVQQFTKDQMSHLFNVAHTLRMMVQKERSLDILKGKVMASMFYEVSTRTSSSFAAAMARLGGAVLSFSEATSSVQKGESLADSVQTMSCYADVVVLRHPQPGAVELAAKHCRRPVINAGDGVGEHPTQALLDIFTIREELGTVNGMTITMVGDLKHGRTVHSLACLLTQYRVSLRYVAPPSLRMPPTVRAFVASRGTKQEEFESIEEALPDTDVLYMTRIQKERFGSTQEYEACFGQFILTPHIMTRAKKKMVVMHPMPRVNEISVEVDSDPRAAYFRQAENGMYIRMALLATVLGRF

SEQ ID NO: 755494 - protein, 2071 aa, Homo sapiens; identical to SEQ ID NO: 755483

SEQ ID NO: 755495 - protein, 345 aa, Homo sapiens
PRVRGRVGCYPPPPVPRQASPQNLGTPGLLHPQTSPLLHSLVGQHILSVQQFTKDQMSHLFNVAHTLRMMVQKERSLDILKGKVMASMFYEVSTRTSSSFAAAMARLGGAVLSFSEATSSVQKGESLADSVQTMSCYADVVVLRHPQPGAVELAAKHCRRPVINAGDGVGEHPTQALLDIFTIREELGTVNGMTITMVGDLKHGRTVHSLACLLTQYRVSLRYVAPPSLRMPPTVRAFVASRGTKQEEFESIEEALPDTDVLYMTRIQKERFGSTQEYEACFGQFILTPHIMTRAKKKMVVMHPMPRVNEISVEVDSDPRAAYFRQAENGMYIRMALLATVLGRF

SEQ ID NO: 755496 - protein, 1684 aa, Homo sapiens
LPGRRLEESPVCVTTTYTGGAPRILALDCGLKYNQIRCLCQRGAEVTVVPWDHALDSQEYEGLFLSNGPGDPASYPSVVSTLSRVLSEPNPRPVFGICLGHQLLALAIGAKTYKMRYGNRGHNQPCLLVGSGRCFLTSQNHGFAVETDSLPADWAPLFTNANDGSNEGIVHNSLPFFSVQFHPEHQAGPSDMELLFDIFLETVKEATAGNPGGQTVRERLTERLCPPGIPTPGSGLPPPRKVLILGSGGLSIGQAGEFDYSGSQAIKALKEENIQTLLINPNIATVQTSQGLADKVYFLPITPHYVTQVIRNERPDGVLLTFGGQTALNCGVELTKAGVLARYGVRVLGTTVETIELTEDRRAFAARMAEIGEHVAPSEAGNSLEQAQAAAERLGYPVLVRAAFAVGGLGSGFASNREELSALVAPAFAHTSQVLVDKSLKGWKEIEYEVVRDAYGNCVTVCNMENLDPLGIHTGESIVVAPSQTLNDREYQLLRQTAIKVTQHLGIVGECNVQYALNPESEQYYIIEVNARLSRSSALASKATGYPLAYVAAKLALGIPLPELRNSVTGGTAAFEPSVDYCVVKIPRWDLSKFLRVSTKIGSCMKSVGEVMGIGRSFEEAFQKALRMVDENCVGFDHTVKPVSDMELETPTDKRIFVVAAALWAGYSVDRLYELTRIDRWFLHRMKRIIAHAQLLEQHRGQPLPPDLLQQAKCLGFSDKQIALAVLSTELAVRKLRQELGICPAVKQIDTVAAEWPAQTNYLYLTYWGTTHDLTFRTPHVLVLGSGVYRIGSSVEFDWCAVGCIQQLRKMGYKTIMVNYNPETVSTDYDMCDRLYFDEISFEVVMDIYELENPEGVILSMGGQLPNNMAMALHRQQCRVLGTSPEAIDSAENRFKFSRLLDTIGISQPQWRELSDLESARQFCQTVGYPCVVRPSYVLSGAAMNVAYTDGDLERFLSSAAAVSKEHPVVISKFIQEAKEIDVDAVASDGVVAAIAISEHVENAGVHSGDATLVTPPQDITAKTLERIKAIVHAVGQELQVTGPFNLQLIAKDDQLKVIECNVRVSRSFPFVSKTLGVDLVALATRVIMGEEVEPVGLMTGSGVVGVKVPQFSFSRLAGADVVLGVEMTSTGEVAGFGESRCEAYLKAMLSTGFKIPKKNILLTIGSYKNKSELLPTVRLLESLGYSLYASLGTADFYTEHGVKVTAVDWHFEEAVDGECPPQRSILEQLAEKNFELVINLSMRGAGGRRLSSFVTKGYRTRRLAADFSVPLIIDIKCTKLFVEALGQIGPAPPLKVHVDCMTSQKLVRLPGLIDVHVHLREPGGTHKEDFASGTAAALAGGITMVCAMPNTRPPIIDAPALALAQKLAEAGARCDFALFLGASSENAGTLGTVAGSAAGLKLYLNETFSELRLDSVVQWMEHFETWPSHLPIVAHAEQQTVAAVLMVAQLTQRSVHICHVARKEEILLIKAAKARGLPVTCEVAPHHLFLSHDDLERLGPGKGEVRPELGSRQDVEALWENMAVIDCFASDHAPHTLEEKCGSRPPPGFPGLETMLPLLLTAVSEGRLSLDDLLQRLHHNPRRIFHLPPQEDTYVEVDLEHEWTIPSHMPFSKAHWTPFEGQKVKGTVRRVVLRGEVAYIDGQVLVPPGYGQDVRKWPQGAVPQLPPSAPATSEMTTVSTLLG

SEQ ID NO: 755497 - protein, 1166 aa, Homo sapiens
LPGRRLEESPVCVTTTYTGGAPRILALDCGLKYNQIRCLCQRGAEVTVVPWDHALDSQEYEGLFLSNGPGDPASYPSVVSTLSRVLSEPNPRPVFGICLGHQLLALAIGAKTYKMRYGNRGHNQPCLLVGSGRCFLTSQNHGFAVETDSLPADWAPLFTNANDGSNEGIVHNSLPFFSVQFHPEHQAGPSDMELLFDIFLETVKEATAGNPGGQTVRERLTERLCPPGIPTPGSGLPPPRKVLILGSGGLSIGQAGEFDYSGSQAIKALKEENIQTLLINPNIATVQTSQGLADKVYFLPITPHYVTQVIRNERPDGVLLTFGGQTALNCGVELTKAGVLARYGVRVLGTTVETIELTEDRRAFAARMAEIGEHVAPSEAGNSLEQAQAAAERLGYPVLVRAAFAVGGLGSGFASNREELSALVAPAFAHTSQVLVDKSLKGWKEIEYEVVRDAYGNCVTVCNMENLDPLGIHTGESIVVAPSQTLNDREYQLLRQTAIKVTQHLGIVGECNVQYALNPESEQYYIIEVNARLSRSSALASKATGYPLAYVAAKLALGIPLPELRNSVTGGTAAFEPSVDYCVVKIPRWDLSKFLRVSTKIGSCMKSVGEVMGIGRSFEEAFQKALRMVDENCVGFDHTVKPVSDMELETPTDKRIFVVAAALWAGYSVDRLYELTRIDRWFLHRMKRIIAHAQLLEQHRGQPLPPDLLQQAKCLGFSDKQIALAVLSTELAVRKLRQELGICPAVKQIDTVAAEWPAQTNYLYLTYWGTTHDLTFRTPHVLVLGSGVYRIGSSVEFDWCAVGCIQQLRKMGYKTIMVNYNPETVSTDYDMCDRLYFDEISFEVVMDIYELENPEGVILSMGGQLPNNMAMALHRQQCRVLGTSPEAIDSAENRFKFSRLLDTIGISQPQWRELSDLESARQFCQTVGYPCVVRPSYVLSGAAMNVAYTDGDLERFLSSAAAVSKEHPVVISKFIQEAKEIDVDAVASDGVVAAIAISEHVENAGVHSGDATLVTPPQDITAKTLERIKAIVHAVGQELQVTGPFNLQLIAKDDQLKVIECNVRVSRSFPFVSKTLGVDLVALATRVIMGEEVEPVGLMTGSGVVGVKVPQFSFSRLAGADVVLGVEMTSTGEVAGFGESRCEAYLKAMLSTGFKIPKKKPTLPTP

SEQ ID NO: 755498 - protein, 427 aa, Homo sapiens
GEGRSGLPPVHKDNLCLPCGGFYEGGDSRLSLVCFLDAFKRGQLEDINCGNSPEPSSDGISPSCAAVAPSLEEIRNQKSVTVLLREEVSRLQEEVHLLRQMKEMLAKDLEESQGGKSSEVLSATELRVQLAQKEQELARAKEALQAMKADRKRLKGEKTDLVSQMQQLYATLESREEQLRDFIRNYEQHRKESEDAVKALAKEKDLLEREKWELRRQAKEATDHATALRSQLDLKDNRMKELEAELAMAKQSLATLTKDVPKRHSLAMPGETVLNGNQEWVVQADLPLTAAIRQSQQTLYHSHPPHPADRQAVRVSPCHSRQPSVISDASAAEGDRSSTPSDINSPRHRTHSLCNGDSPGPVQKNLHNPIVQSLEDLEDQKRKKKKEKMGFGSISRVFARGKQRKSLDPGLFDGTAPDYYIEEDADW

SEQ ID NO: 755499 - protein, 501 aa, Homo sapiens
APARRGLGDRCSSSSFSSSFFSSASSPRRLATAAARAGGAAVIPVPEEPALPVPGGRGAGEAGPRRTQQVEPGVPGRAPPAHHAALCHLSRPQAKILSMMEDNKQLALRIDGAVQSASQEVTNLRAELTATNRRLAELSGGGGPGPGPGAAASASAAGDSAATNMENPQLGAQVLLREEVSRLQEEVHLLRQMKEMLAKDLEESQGGKSSEVLSATELRVQLAQKEQELARAKEALQAMKADRKRLKGEKTDLVSQMQQLYATLESREEQLRDFIRNYEQHRKESEDAVKALAKEKDLLEREKWELRRQAKEATDHATALRSQLDLKDNRMKELEAELAMAKQSLATLTKDVPKRHSLAMPGETVLNGNQEWVVQADLPLTAAIRQSQQTLYHSHPPHPADRQAVRVSPCHSRQPSVISDASAAEGDRSSTPSDINSPRHRTHSLCNGDSPGPVQKNLHNPIVQSLEDLEDQKRRKQRKSLDPGLFDGTAPDYYIEEDADW

SEQ ID NO: 755500 - protein, 519 aa, Homo sapiens
APARRGLGDRCSSSSFSSSFFSSASSPRRLATAAARAGGAAVIPVPEEPALPVPGGRGAGEAGPRRTQQVEPGVPGRAPPAHHAALCHLSRPQAKILSMMEDNKQLALRIDGAVQSASQEVTNLRAELTATNRRLAELSGGGGPGPGPGAAASASAAGDSAATNMENPQLGAQVLLREEVSRLQEEVHLLRQMKEMLAKDLEESQGGKSSEVLSATELRVQLAQKEQELARAKEALQAMKADRKRLKGEKTDLVSQMQQLYATLESREEQLRDFIRNYEQHRKESEDAVKALAKEKDLLEREKWELRRQAKEATDHATALRSQLDLKDNRMKELEAELAMAKQSLATLTKDVPKRHSLAMPGETVLNGNQEWVVQADLPLTAAIRQSQQTLYHSHPPHPADRQAVRVSPCHSRQPSVISDASAAEGDRSSTPSDINSPRHRTHSLCNGDSPGPVQKNLHNPIVQSLEDLEDQKRKKKKEKMGFGSISRVFARGKQRKSLDPGLFDGTAPDYYIEEDADW

SEQ ID NO: 755501 - protein, 415 aa, Homo sapiens
MRAADSGSWERVRQLAAQGEPAPSCGAGAGPARPPGPAACEQCVDAAGPGDRPRAGVPRVRADGDCSQPVLLREEVSRLQEEVHLLRQMKEMLAKDLEESQGGKSSEVLSATELRVQLAQKEQELARAKEALQAMKADRKRLKGEKTDLVSQMQQLYATLESREEQLRDFIRNYEQHRKESEDAVKALAKEKDLLEREKWELRRQAKEATDHATALRSQLDLKDNRMKELEAELAMAKQSLATLTKDVPKRHSLAMPGETVLNGNQEWVVQADLPLTAAIRQSQQTLYHSHPPHPADRQAVRVSPCHSRQPSVISDASAAEGDRSSTPSDINSPRHRTHSLCNGDSPGPVQKNLHNPIVQSLEDLEDQKRKKKKEKMGFGSISRVFARGKQRKSLDPGLFDGTAPDYYIEEDADW

SEQ ID NO: 755502 - protein, 430 aa, Homo sapiens
HQQLSASVDGGLMGARPLAGAFYLSSGIGTAALGDEYYCDLHSPHKDREVTCQGQTTTQGQSQDLNQAIQFQNHCSSLSFGHFTVLLREEVSRLQEEVHLLRQMKEMLAKDLEESQGGKSSEVLSATELRVQLAQKEQELARAKEALQAMKADRKRLKGEKTDLVSQMQQLYATLESREEQLRDFIRNYEQHRKESEDAVKALAKEKDLLEREKWELRRQAKEATDHATALRSQLDLKDNRMKELEAELAMAKQSLATLTKDVPKRHSLAMPGETVLNGNQEWVVQADLPLTAAIRQSQQTLYHSHPPHPADRQAVRVSPCHSRQPSVISDASAAEGDRSSTPSDINSPRHRTHSLCNGDSPGPVQKNLHNPIVQSLEDLEDQKRKKKKEKMGFGSISRVFARGKQRKSLDPGLFDGTAPDYYIEEDADW

SEQ ID NO: 755503 - protein, 986 aa, Homo sapiens
MAGIFYFALFSCLFGICDAVTGSRVYPANEVTLLDSRSVQGELGWIASPLEGGWEEVSIMDEKNTPIRTYQVCNVMEPSQNNWLRTDWITREGAQRVYIEIKFTLRDCNSLPGVMGTCKETFNLYYYESDNDKERFIRENQFVKIDTIAADESFTQVDIGDRIMKLNTEIRDVGPLSKKGFYLAFQDVGACIALVSVRVFYKKCPLTVRNLAQFPDTITGADTSSLVEVRGSCVNNSEEKDVPKMYCGADGEWLVPIGNCLCNAGHEERSGECQACKIGYYKALSTDATCAKCPPHSYSVWEGATSCTCDRGFFRADNDAASMPCTRPPSAPLNLISNVNETSVNLEWSSPQNTGGRQDISYNVVCKKCGAGDPSKCRPCGSGVHYTPQQNGLKTTKVSITDLLAHTNYTFEIWAVNGVSKYNPNPDQSVSVTVTTNQAAPSSIALVQAKEVTRYSVALAWLEPDRPNGVILEYEVKYYEKDQNERSYRIVRTAARNTDIKGLNPLTSYVFHVRARTAAGYGDFSEPLEVTTNTVPSRIIGDGANSTVLLVSVSGSVVLVVILIAAFVISRRRSKYSKAKQEADEEKHLNQGVRTYVDPFTYEDPNQAVREFAKEIDASCIKIEKVIGVGEFGEVCSGRLKVPGKREICVAIKTLKAGYTDKQRRDFLSEASIMGQFDHPNIIHLEGVVTKCKPVMIITEYMENGSLDAFLRKNDGRFTVIQLVGMLRGIGSGMKYLSDMSYVHRDLAARNILVNSNLVCKVSDFGMSRVLEDDPEAAYTTRGGKIPIRWTAPEAIAYRKFTSASDVWSYGIVMWEVMSYGERPYWDMSNQDVIKAIEEGYRLPPPMDCPIALHQLMLDCWQKERSDRPKFGQIVNMLDKLIRNPNSLKRTGTESSRPNTALLDPSSPEFSAVVSVGDWLQAIKMDRYKDNFTAAGYTTLEAVVHVNQEDLARIGITAITHQNKILSSVQAMRTQMQQMHGRMVPV

SEQ ID NO: 755504 - protein, 968 aa, Homo sapiens
MAGIFYFALFSCLFGICDAVTGSRVYPANEVTLLDSRSVQGELGWIASPLEGGWEEVSIMDEKNTPIRTYQVCNVMEPSQNNWLRTDWITREGAQRVYIEIKFTLRDCNSLPGVMGTCKETFNLYYYESDNDKERFIRENQFVKIDTIAADESFTQVDIGDRIMKLNTEIRDVGPLSKKGFYLAFQDVGACIALVSVRVFYKKCPLTVRNLAQFPDTITGADTSSLVEVRGSCVNNSEEKDVPKMYCGADGEWLVPIGNCLCNAGHEERSGECQACKIGYYKALSTDATCAKCPPHSYSVWEGATSCTCDRGFFRADNDAASMPCTRPPSAPLNLISNVNETSVNLEWSSPQNTGGRQDISYNVVCKKCGAGDPSKCRPCGSGVHYTPQQNGLKTTKVSITDLLAHTNYTFEIWAVNGVSKYNPNPDQSVSVTVTTNQAAPSSIALVQAKEVTRYSVALAWLEPDRPNGVILEYEVKYYEKDQNERSYRIVRTAARNTDIKGLNPLTSYVFHVRARTAAGYGDFSEPLEVTTNTVPSRIIGDGANSTVLLVSVSGSVVLVVILIAAFVISRRRSKYSKAKQEADEEKHLNQGVRTYVDPFTYEDPNQAVREFAKEIDASCIKIEKVIGVGEFGEVCSGRLKVPGKREICVAIKTLKAGYTDKQRRDFLSEASIMGQFDHPNIIHLEGVVTKCKPVMIITEYMENGSLDAFLRKNDGRFTVIQLVGMLRGIGSGMKYLSDMSYVHRDLAARNILVNSNLVCKVSDFGMSRVLEDDPEAAYTTRGGKIPIRWTAPEAIAYRKFTSASDVWSYGIVMWEVMSYGERPYWDMSNQDVIKAIEEGYRLPPPMDCPIALHQLMLDCWQKERSDRPKFGQIVNMLDKLIRNPNSLKRTGTESSRPNTALLDPSSPEFSAVVSVGDWLQAIKMDRYKDNFTAAGYTTLEAVVHVNQDSVQAMRTQMQQMHGRMVPV

SEQ ID NO: 755505 - protein, 833 aa, Homo sapiens
MAGIFYFALFSCLFGICDAVTGSRVYPANEVTLLDSRSVQGELGWIASPLEGGWEEVSIMDEKNTPIRTYQVCNVMEPSQNNWLRTDWITREGAQRVYIEIKFTLRDCNSLPGVMGTCKETFNLYYYESDNDKERFIRENQFVKIDTIAADESFTQVDIGDRIMKLNTEIRDVGPLSKKGFYLAFQDVGACIALVSVRVFYKKCPLTVRNLAQFPDTITGADTSSLVEVRGSCVNNSEEKDVPKMYCGADGEWLVPIGNCLCNAGHEERSGECQACKIGYYKALSTDATCAKCPPHSYSVWEGATSCTCDRGFFRADNDAASMPCTRPPSAPLNLISNVNETSVNLEWSSPQNTGGRQDISYNVVCKKCGAGDPSKCRPCGSGVHYTPQQNGLKTTKVSITDLLAHTNYTFEIWAVNGVSKYNPNPDQSVSVTVTTNQAAPSSIALVQAKEVTRYSVALAWLEPDRPNGVILEYEVKYYEKDQNERSYRIVRTAARNTDIKGLNPLTSYVFHVRARTAAGYGDFSEPLEVTTNTVPSRIIGDGANSTVLLVSVSGSVVLVVILIAAFVISRRRSKYSKAKQEADEEKHLNQGVRTYVDPFTYEDPNQAVREFAKEIDASCIKIEKVIGVGEFGEVCSGRLKVPGKREICVAIKTLKAGYTDKQRRDFLSEASIMGQFDHPNIIHLEGVVTKCKPVMIITEYMENGSLDAFLRKNDGRFTVIQLVGMLRGIGSGMKYLSDMSYVHRDLAARNILVNSNLVCKVSDFGMSRVLEDDPEAAYTTRGGKIPIRWTAPEAIAYRKFTSASDVWSYGIVMWEVMSYGERPYWDMSNQDT

SEQ ID NO: 755506 - protein, 949 aa, Homo sapiens
MAGIFYFALFSCLFGICDAVTGSRVYPANEVTLLDSRSVQGELGWIASPLEGGWEEVSIMDEKNTPIRTYQVCNVMEPSQNNWLRTDWITREGAQRVYIEIKFTLRDCNSLPGVMGTCKETFNLYYYESDNDKERFIRENQFVKIDTIAADESFTQVDIGDRIMKLNTEIRDVGPLSKKGFYLAFQDVGACIALVSVRVFYKKCPLTVRNLAQFPDTITGADTSSLVEVRGSCVNNSEEKDVPKMYCGADGEWLVPIGNCLCNAGHEERSGECQACKIGYYKALSTDATCAKCPPHSYSVWEGATSCTCDRGFFRADNDAASMPCTRPPSAPLNLISNVNETSVNLEWSSPQNTGGRQDISYNVVCKKCGAGDPSKCRPCGSGVHYTPQQNGLKTTKVSITDLLAHTNYTFEIWAVNGVSKYNPNPDQSVSVTVTTNQAAPSSIALVQAKEVTRYSVALAWLEPDRPNGVILEYEVKYYEKDQNERSYRIVRTAARNTDIKGLNPLTSYVFHVRARTAAGYGDFSEPLEVTTNTVPSRIIGDGANSTVLLVSVSGSVVLVVILIAAFVISRRRSKYSKAKQEADEEKHLNQGVRTYVDPFTYEDPNQAVREFAKEIDASCIKIEKVIGVGEFGEVCSGRLKVPGKREICVAIKTLKAGYTDKQRRDFLSEASIMGQFDHPNIIHLEGVVTKCKPVMIITEYMENGSLDAFLRKNDGRFTVIQLVGMLRGIGSGMKYLSDMSYVHRDLAARNILVNSNLVCKVSDFGMSRVLEDDPEAAYTTRGGKIPIRWTAPEAIAYRKFTSASDVWSYGIVMWEVMSYGERPYWDMSNQDVIKAIEEGYRLPPPMDCPIALHQLMLDCWQKERSDRPKFGQIVNMLDKLIRNPNSLKRTGTESSRPNTALLDPSSPEFSAVVSVGDWLQAIKMDRYKDNFTAAGYTTLEAVVHVNQE

SEQ ID NO: 755507 - protein, 116 aa, Homo sapiens
MASTVVAVGLTIAAAGFAGRYVLQAMKHMEPQVKQVFQSLPKSAFSGGYYRGGFEPKMTKREAALILGVSPTANKGKIRDAHRRIMLLNHPDKGGSPYIAAKINEAKDLLEGQAKK

SEQ ID NO: 755508 - protein, 116 aa, Homo sapiens; identical to SEQ ID NO: 755507

SEQ ID NO: 755509 - protein, 78 aa, Homo sapiens
FVVTGKPAGLWKQGSPAGAMASTVVAVGLTIAAAGFAGRYVLQAMKHMEPQVKQVFQSLPKSAFSGGYYRALLPIKGK

SEQ ID NO: 755510 - protein, 116 aa, Homo sapiens; identical to SEQ ID NO: 755507

SEQ ID NO: 755511 - protein, 116 aa, Homo sapiens; identical to SEQ ID NO: 755507

SEQ ID NO: 755512 - protein, 135 aa, Homo sapiens
CVTGKNLACSGKQGSPAGAMASTVVAVGLTIAAAGFAGRYVLQAMKHMEPQVKQVFQSLPKSAFSGGYYRGGFEPKMTKREAALILGVSPTANKGKIRDAHRRIMLLNHPDKGGSPYIAAKINEAKDLLEGQAKK

SEQ ID NO: 755513 - protein, 256 aa, Homo sapiens
EVIRRAKQDLERLKKKEVRQRRKSPEKEAFKKRAKLQQENSEETDENEAEEEEEERDESGCEEEEGREDEDEDSGSEESLVDSDSDPEEKEVNFQADLADLTCEIEIKQKLIDELENSQRRLQTLKHQYEEKLILLQNKIRDTQLERDRVLQNLSTMECYTEEKANKIKADYEKRLREMNRDLQKLQAAQKEHARLLKNQSRYERELKKLQAEVAEMKKAKVATDEADDGPFSHDGCQPMAIAMYSSSQPCHLSGY

SEQ ID NO: 755514 - protein, 210 aa, Homo sapiens
ATALLAGIIDPDAIRREEEGREDEDEDSGSEESLVDSDSDPEEKEVNFQADLADLTCEIEIKQKLIDELENSQRRLQTLKHQYEEKLILLQNKIRDTQLERDRVLQNLSTMECYTEEKANKIKADYEKRLREMNRDLQKLQAAQKEHARLLKNQSRYERELKKLQAEVAEMKKAKVATDEADDGPFSHDGCQPMAIAMYSSSQPCHLSGY

SEQ ID NO: 755515 - protein, 273 aa, Homo sapiens
EVIRRAKQDLERLKKKEVRQRRKSPEKEAFKKRAKLQQENSEETDENEAEEEEEERDESGCEEEEGREDEDEDSGSEESLVDSDSDPEEKEVNFQADLADLTCEIEIKQKLIDELENSQRRLQTLKHQYEEKLILLQNKIRDTQLERDRVLQNLSTMECYTEEKANKIKADYEKRLREMNRDLQKLQAAQKEHARLLKNQSRYERELKKLQAEVAEMKKAKVALMKQMREEQQRRRLVETKRNREIAQLKKEQRRQEFQIRALESQKRQQEMV

SEQ ID NO: 755516 - protein, 166 aa, Homo sapiens
EVIRRAKQDLERLKKKEVRQRRKSPEKEAFKKRAKLQQENSEETDENEAEEEEEERDESGCEEEEGREDEDEDSGSEESLVDSDSDPEEKEVNFQADLADLTCEIEIKQKLIDELENSQRRLQTLKHQYEEKLILLQNKIRDTQLAQSLVNSGRLQVDNMESSQQR

SEQ ID NO: 755517 - protein, 116 aa, Homo sapiens
MVPETWGLKKHEDLFTAKGTFPCREIRRERKSPIVYQKKKSLGAFKEEWLHDGNERHRLKDSLRESPRAAEEQGSSPTYIPPYGRAYLSGASKGRTAIQANVVGVKLSRSWVKNKD

SEQ ID NO: 755518 - protein, 72 aa, Homo sapiens
MVKVEPVENQCPTSPSYRGQHILANSNNSNPCSASQASQLEPLTPVGSDIMSFVVGTEQAVACSLPQSPEYI

SEQ ID NO: 755519 - protein, 66 aa, Homo sapiens
TAGAAQRRIVGPSEGRRGLGVAGAMGTLRLRQVDSAVWVTWAESRAWRQRVGGEEVFLVFFFQSQK

SEQ ID NO: 755520 - protein, 104 aa, Homo sapiens
GQLTLTQRSSGSGNNSSSAFSTMSLRLDTTPSCNSARPLHALQVLLLLSLLLTALASSTKGQTKRNLAKGKEESLDSDLYAELRCMCIKTTSGIQLPKTSKVWK

SEQ ID NO: 755521 - protein, 104 aa, Homo sapiens; identical to SEQ ID NO: 755520

SEQ ID NO: 755522 - protein, 104 aa, Homo sapiens; identical to SEQ ID NO: 755520

SEQ ID NO: 755523 - protein, 126 aa, Homo sapiens
YFHQSPDPPHHTQLPPPYQGTEVFPMLGSVLRDPSFFSNPQDFNPQHFLNDKGQFKKSDAFVPFSIGKRNCFGEGLARMELFLFFTTVMQNFRLKSSQSPKDIDVSPKHVVFATIPRNYTMSFLPR

SEQ ID NO: 755524 - protein, 494 aa, Homo sapiens
MLASGMLLVALLVCLTVMVLMSVWQQRKSKGKLPPGPTPLPFIGNYLQLNTEQMYNSLMKISERYGPVFTIHLGPRRVVVLCGHDAVREALVDQAEEFSGRGEQATFDWVFKGYGVVFSNGERAKQLRRFSIATLRDFGVGKRGIEERIQEEAGFLIDALRGTGGANIDPTFFLSRTVSNVISSIVFGDRFDYKDKEFLSLLRMMLGIFQFTSTSTGQLYEMFSSVMKHLPGPQQQAFQLLQGLEDFIAKKVEHNQRTLDPNSPRDFIDSFLIRMQEEEKNPNTEFYLKNLVMTTLNLFIGGTETVSTTLRYGFLLLMKHPEVEAKVHEEIDRVIGKNRQPKFEDRAKMPYMEAVIHEIQRFGDVIPMSLARRVKKDTKFRDFFLPKGTEVFPMLGSVLRDPSFFSNPQDFNPQHFLNDKGQFKKSDAFVPFSIGKRNCFGEGLARMELFLFFTTVMQNFRLKSSQSPKDIDVSPKHVVFATIPRNYTMSFLPR

SEQ ID NO: 755525 - protein, 2039 aa, Homo sapiens
MGASSPRSPEPVGPPAPGLPFCCGGSLLAVVVLLALPVAWGQCNAPEWLPFARPTNLTDEFEFPIGTYLNYECRPGYSGRPFSIICLKNSVWTGAKDRCRRKSCRNPPDPVNGMVHVIKGIQFGSQIKYSCTKGYRLIGSSSATCIISGDTVIWDNETPICDRIPCGLPPTITNGDFISTNRENFHYGSVVTYRCNPGSGGRKVFELVGEPSIYCTSNDDQVGIWSGPAPQCIIPNKCTPPNVENGILVSDNRSLFSLNEVVEFRCQPGFVMKGPRRVKCQALNKWEPELPSCSRVCQPPPDVLHAERTQRDKDNFSPGQEVFYSCEPGYDLRGAASMRCTPQGDWSPAAPTCEVKSCDDFMGQLLNGRVLFPVNLQLGAKVDFVCDEGFQLKGSSASYCVLAGMESLWNSSVPVCEQIFCPSPPVIPNGRHTGKPLEVFPFGKAVNYTCDPHPDRGTSFDLIGESTIRCTSDPQGNGVWSSPAPRCGILGHCQAPDHFLFAKLKTQTNASDFPIGTSLKYECRPEYYGRPFSITCLDNLVWSSPKDVCKRKSCKTPPDPVNGMVHVITDIQVGSRINYSCTTGHRLIGHSSAECILSGNAAHWSTKPPICQRIPCGLPPTIANGDFISTNRENFHYGSVVTYRCNPGSGGRKVFELVGEPSIYCTSNDDQVGIWSGPAPQCIIPNKCTPPNVENGILVSDNRSLFSLNEVVEFRCQPGFVMKGPRRVKCQALNKWEPELPSCSRVCQPPPDVLHAERTQRDKDNFSPGQEVFYSCEPGYDLRGAASMRCTPQGDWSPAAPTCEVKSCDDFMGQLLNGRVLFPVNLQLGAKVDFVCDEGFQLKGSSASYCVLAGMESLWNSSVPVCEQIFCPSPPVIPNGRHTGKPLEVFPFGKAVNYTCDPHPDRGTSFDLIGESTIRCTSDPQGNGVWSSPAPRCGILGHCQAPDHFLFAKLKTQTNASDFPIGTSLKYECRPEYYGRPFSITCLDNLVWSSPKDVCKRKSCKTPPDPVNGMVHVITDIQVGSRINYSCTTGHRLIGHSSAECILSGNTAHWSTKPPICQRIPCGLPPTIANGDFISTNRENFHYGSVVTYRCNLGSRGRKVFELVGEPSIYCTSNDDQVGIWSGPAPQCIIPNKCTPPNVENGILVSDNRSLFSLNEVVEFRCQPGFVMKGPRRVKCQALNKWEPELPSCSRVCQPPPEILHGEHTPSHQDNFSPGQEVFYSCEPGYDLRGAASLHCTPQGDWSPEAPRCAVKSCDDFLGQLPHGRVLFPLNLQLGAKVSFVCDEGFRLKGSSVSHCVLVGMRSLWNNSVPVCEHIFCPNPPAILNGRHTGTPSGDIPYGKEISYTCDPHPDRGMTFNLIGESTIRCTSDPHGNGVWSSPAPRCELSVRAGHCKTPEQFPFASPTIPINDFEFPVGTSLNYECRPGYFGKMFSISCLENLVWSSVEDNCRRKSCGPPPEPFNGMVHINTDTQFGSTVNYSCNEGFRLIGSPSTTCLVSGNNVTWDKKAPICEIISCEPPPTISNGDFYSNNRTSFHNGTVVTYQCHTGPDGEQLFELVGERSIYCTSKDDQVGVWSSPPPRCISTNKCTAPEVENAIRVPGNRSFFSLTEIIRFRCQPGFVMVGSHTVQCQTNGRWGPKLPHCSRVCQPPPEILHGEHTLSHQDNFSPGQEVFYSCEPSYDLRGAASLHCTPQGDWSPEAPRCTVKSCDDFLGQLPHGRVLLPLNLQLGAKVSFVCDEGFRLKGRSASHCVLAGMKALWNSSVPVCEQIFCPNPPAILNGRHTGTPFGDIPYGKEISYACDTHPDRGMTFNLIGESSIRCTSDPQGNGVWSSPAPRCELSVPAACPHPPKIQNGHYIGGHVSLYLPGMTISYICDPGYLLVGKGFIFCTDQGIWSQLDHYCKEVNCSFPLFMNGISKELEMKKVYHYGDYVTLKCEDGYTLEGSPWSQCQADDRWDPPLAKCTSRAHDALIVGTLSGTIFFILLIIFLSWIILKHRKGNNAHENPKEVAIHLHSQGGSSVHPRTLQTNEENSRVLP

SEQ ID NO: 755526 - protein, 1986 aa, Homo sapiens
MGASSPRSPEPVGPPAPGLPFCCGGSLLAVVVLLALPVAWGQCNAPEWLPFARPTNLTDEFEFPIGTYLNYECRPGYSGRPFSIICLKNSVWTGAKDRCRRKSCRNPPDPVNGMVHVIKGIQFGSQIKYSCTKGYRLIGSSSATCIISGDTVIWDNETPICDRIPCGLPPTITNGDFISTNRENFHYGSVVTYRCNPGSGGRKVFELVGEPSIYCTSNDDQVGIWSGPAPQCIIPNKCTPPNVENGILVSDNRSLFSLNEVVEFRCQPGFVMKGPRRVKCQALNKWEPELPSCSRVCQPPPDVLHAERTQRDKDNFSPGQEVFYSCEPGYDLRGAASMRCTPQGDWSPAAPTCEVKSCDDFMGQLLNGRVLFPVNLQLGAKVDFVCDEGFQLKGSSASYCVLAGMESLWNSSVPVCEQIFCPSPPVIPNGRHTGKPLEVFPFGKAVNYTCDPHPDRGTSFDLIGESTIRCTSDPQGNGVWSSPAPRCGILGHCQAPDHFLFAKLKTQTNASDFPIGTSLKYECRPEYYGRPFSITCLDNLVWSSPKDVCKRKSCKTPPDPVNGMVHVITDIQVGSRINYSCTTGHRLIGHSSAECILSGNAAHWSTKPPICQRIPCGLPPTIANGDFISTNRENFHYGSVVTYRCNPGSGGRKVFELVGEPSIYCTSNDDQVGIWSGPAPQCIIPNKCTPPNVENGILVSDNRSLFSLNEVVEFRCQPGFVMKGPRRVKCQALNKWEPELPSCSRVCQPPPDVLHAERTQRDKDNFSPGQEVFYSCEPGYDLRGAASMRCTPQGDWSPAAPTCEVKSCDDFMGQLLNGRVLFPVNLQLGAKVDFVCDEGFQLKGSSASYCVLAGMESLWNSSVPVCEQIFCPSPPVIPNGRHTGKPLEVFPFGKAVNYTCDPHPDRGTSFDLIGESTIRCTSDPQGNGVWSSPAPRCGILGHCQAPDHFLFAKLKTQTNASDFPIGTSLKYECRPEYYGRPFSITCLDNLVWSSPKDVCKRKSCKTPPDPVNGMVHVITDIQVGSRINYSCTTGHRLIGHSSAECILSGNTAHWSTKPPICQRIPCGLPPTIANGDFISTNRENFHYGSVVTYRCNLGSRGRKVFELVGEPSIYCTSNDDQVGIWSGPAPQCIIPNKCTPPNVENGILVSDNRSLFSLNEVVEFRCQPGFVMKGPRRVKCQALNKWEPELPSCSRVCQPPPEILHGEHTPSHQDNFSPGQEVFYSCEPGYDLRGAASLHCTPQGDWSPEAPRCAVKSCDDFLGQLPHGRVLFPLNLQLGAKVSFVCDEGFRLKGSSVSHCVLVGMRSLWNNSVPVCEHIFCPNPPAILNGRHTGTPSGDIPYGKEISYTCDPHPDRGMTFNLIGESTIRCTSDPHGNGVWSSPAPRCELSVRAGHCKTPEQFPFASPTIPINDFEFPVGTSLNYECRPGYFGKMFSISCLENLVWSSVEDNCRRKSCGPPPEPFNGMVHINTDTQFGSTVNYSCNEGFRLIGSPSTTCLVSGNNVTWDKKAPICEIISCEPPPTISNGDFYSNNRTSFHNGTVVTYQCHTGPDGEQLFELVGERSIYCTSKDDQVGVWSSPPPRCISTNKCTAPEVENAIRVPGNRSFFSLTEIIRFRCQPGFVMVGSHTVQCQTNGRWGPKLPHCSRVCQPPPEILHGEHTLSHQDNFSPGQEVFYSCEPSYDLRGAASLHCTPQGDWSPEAPRCTVKSCDDFLGQLPHGRVLLPLNLQLGAKVSFVCDEGFRLKGRSASHCVLAGMKALWNSSVPVCEQIFCPNPPAILNGRHTGTPFGDIPYGKEISYACDTHPDRGMTFNLIGESSIRCTSDPQGNGVWSSPAPRCELSVPAACPHPPKIQNGHYIGGHVSLYLPGMTISYICDPGYLLVGKGFIFCTDQGIWSQLDHYCKEVNCSFPLFMNGISKELEMKKVYHYGDYVTLKCEDGYTLEGSPWSQCQADDRWDPPLAKCTSRAHDALIVAQKKAIMHMKT

SEQ ID NO: 755527 - protein, 2489 aa, Homo sapiens
  misc_feature (1134)..(1134): Xaa can be any naturally occurring amino acid
  misc_feature (1230)..(1230): Xaa can be any naturally occurring amino acid
  misc_feature (1472)..(1472): Xaa can be any naturally occurring amino acid
MGASSPRSPEPVGPPAPGLPFCCGGSLLAVVVLLALPVAWGQCNAPEWLPFARPTNLTDEFEFPIGTYLNYECRPGYSGRPFSIICLKNSVWTGAKDRCRRKSCRNPPDPVNGMVHVIKGIQFGSQIKYSCTKGYRLIGSSSATCIISGDTVIWDNETPICDRIPCGLPPTITNGDFISTNRENFHYGSVVTYRCNPGSGGRKVFELVGEPSIYCTSNDDQVGIWSGPAPQCIIPNKCTPPNVENGILVSDNRSLFSLNEVVEFRCQPGFVMKGPRRVKCQALNKWEPELPSCSRVCQPPPDVLHAERTQRDKDNFSPGQEVFYSCEPGYDLRGAASMRCTPQGDWSPAAPTCEVKSCDDFMGQLLNGRVLFPVNLQLGAKVDFVCDEGFQLKGSSASYCVLAGMESLWNSSVPVCEQIFCPSPPVIPNGRHTGKPLEVFPFGKAVNYTCDPHPDRGTSFDLIGESTIRCTSDPQGNGVWSSPAPRCGILGHCQAPDHFLFAKLKTQTNASDFPIGTSLKYECRPEYYGRPFSITCLDNLVWSSPKDVCKRKSCKTPPDPVNGMVHVITDIQVGSRINYSCTTGHRLIGHSSAECILSGNAAHWSTKPPICQRIPCGLPPTIANGDFISTNRENFHYGSVVTYRCNPGSGGRKVFELVGEPSIYCTSNDDQVGIWSGPAPQCIIPNKCTPPNVENGILVSDNRSLFSLNEVVEFRCQPGFVMKGPRRVKCQALNKWEPELPSCSRVCQPPPDVLHAERTQRDKDNFSPGQEVFYSCEPGYDLRGAASMRCTPQGDWSPAAPTCEVKSCDDFMGQLLNGRVLFPVNLQLGAKVDFVCDEGFQLKGSSASYCVLAGMESLWNSSVPVCEQIFCPSPPVIPNGRHTGKPLEVFPFGKAVNYTCDPHPDRGTSFDLIGESTIRCTSDPQGNGVWSSPAPRCGILGHCQAPDHFLFAKLKTQTNASDFPIGTSLKYECRPEYYGRPFSITCLDNLVWSSPKDVCKRKSCKTPPDPVNGMVHVITDIQVGSRINYSCTTGHRLIGHSSAECILSGNAAHWSTKPPICQRIPCGLPPTIANGDFISTNRENFHYGSVVTYRCNPGSGGRKVFELVGEPSIYCTSNDDQVGIWSGPAPQCIXPNKCTPPNVENGILVSDNRSLFSLNEVVEFRCQPGFVMKGPRRVKCQALNKWEPELPSCSRVCQPPPDVLHAERTQRDKDNFSPGQEVFYSCEPGXDLRGAASMRCTPQGDWSPAAPTCEVKSCDDFMGQLLNGRVLFPVNLQLGAKVDFVCDEGFQLKGSSASYCVLAGMESLWNSSVPVCEQIFCPSPPVIPNGRHTGKPLEVFPFGKAVNYTCDPHPDRGTSFDLIGESTIRCTSDPQGNGVWSSPAPRCGILGHCQAPDHFLFAKLKTQTNASDFPIGTSLKYECRPEYYGRPFSITCLDNLVWSSPKDVCKRKSCKTPPDPVNGMVHVITDIXVGSRINYSCTTGHRLIGHSSAECILSGNTAHWSTKPPICQRIPCGLPPTIANGDFISTNRENFHYGSVVTYRCNLGSRGRKVFELVGEPSIYCTSNDDQVGIWSGPAPQCIIPNKCTPPNVENGILVSDNRSLFSLNEVVEFRCQPGFVMKGPRRVKCQALNKWEPELPSCSRVCQPPPEILHGEHTPSHQDNFSPGQEVFYSCEPGYDLRGAASLHCTPQGDWSPEAPRCAVKSCDDFLGQLPHGRVLFPLNLQLGAKVSFVCDEGFRLKGSSVSHCVLVGMRSLWNNSVPVCEHIFCPNPPAILNGRHTGTPSGDIPYGKEISYTCDPHPDRGMTFNLIGESTIRCTSDPHGNGVWSSPAPRCELSVRAGHCKTPEQFPFASPTIPINDFEFPVGTSLNYECRPGYFGKMFSISCLENLVWSSVEDNCRRKSCGPPPEPFNGMVHINTDTQFGSTVNYSCNEGFRLIGSPSTTCLVSGNNVTWDKKAPICEIISCEPPPTISNGDFYSNNRTSFHNGTVVTYQCHTGPDGEQLFELVGERSIYCTSKDDQVGVWSSPPPRCISTNKCTAPEVENAIRVPGNRSFFSLTEIIRFRCQPGFVMVGSHTVQCQTNGRWGPKLPHCSRVCQPPPEILHGEHTLSHQDNFSPGQEVFYSCEPSYDLRGAASLHCTPQGDWSPEAPRCTVKSCDDFLGQLPHGRVLLPLNLQLGAKVSFVCDEGFRLKGRSASHCVLAGMKALWNSSVPVCEQIFCPNPPAILNGRHTGTPFGDIPYGKEISYACDTHPDRGMTFNLIGESSIRCTSDPQGNGVWSSPAPRCELSVPAACPHPPKIQNGHYIGGHVSLYLPGMTISYICDPGYLLVGKGFIFCTDQGIWSQLDHYCKEVNCSFPLFMNGISKELEMKKVYHYGDYVTLKCEDGYTLEGSPWSQCQADDRWDPPLAKCTSRAHDALIVGTLSGTIFFILLIIFLSWIILKHRKGNNAHENPKEVAIHLHSQGGSSVHPRTLQTNEENSRVLP

SEQ ID NO: 755528 - protein, 238 aa, Homo sapiens
MDEQSQGMQGPPVPQFQPQKALRPDMGYNTLANFRIEKKIGRGQFSEVYRAACLLDGVPVALKKVQIFDLMDAKARADCIKEIDLLKQLNHPNVIKYYASFIEDNELNIVLELADAGDLSRMIKHFKKQKRLIPERTVWKYFVQLCSALEHMHSRRVMHRDIKPANVFITATGVVKLGDLGLGRFFSSKTTAAHSLLVRLITCLQREYMKNGYNFESDIWSLGCLLYEMGAFTKSFQW

SEQ ID NO: 755529 - protein, 236 aa, Homo sapiens
MDEQSQGMQGPPVPQFQPQKALRPDMGYNTLANFRIEKKIGRGQFSEVYRAACLLDGVPVALKKVQIFDLMDAKARADCIKEIDLLKQLNHPNVIKYYASFIEDNELNIVLELADAGDLSRMIKHFKKQKRLIPERTVWKYFVQLCSALEHMHSRRVMHRDIKPANVFITATGVVKLGDLGLGRFFSSKTTAAHSLVGTPYYMSPERIHEMAALQSPFYGDQMDLYLLRKKFEQCD

SEQ ID NO: 755530 - protein, 236 aa, Homo sapiens
MDEQSQGMQGPPVPQFQPQKALRPDMGYNTLANFRIEKKIGRGQFSEVYRAACLLDGVPVALKKVQIFDLMDAKARADCIKEIDLLKQLNHPNVIKYYASFIEDNELNIVLELADAGDLSRMIKHFKKQKRLIPERTVWKYFVQLCSALEHMHSRRVMHRDIKPANVFITATGVVKLGDLGLGRFFSSKTTAAHSLLVRLITCLQREYMSMAALQSPFYGDQMDLYLLRKKFEQCD

SEQ ID NO: 755531 - protein, 436 aa, Homo sapiens
MAANHGPPPGAYEAGGPGAFMHGAGAASSPVYVPTPRVPSSVLGLSYLQGGGAGSASGGASGGSSGGAASGAGPGTQQGSPGWSQAGADGAAYTPPPVSPRFSFPGTTGSLAAAAAAAAAREAAAYSSGGGAAGAGLAGREQYGRAGFAGSYSSPYPAYMADVGASWAAAAAASAGPFDSPVLHSLPGRANPAARHPNLDMFDDFSEGRECVNCGAMSTPLWRRDGTGHYLCNACGLYHKMNGINRPLIKPQRRLSASRRVGLSCANCQTTTTTLWRRNAEGEPVCNACGLYMKLHGVPRPLAMRKEGIQTRKRKPKNLNKSKTPAAPSGSESLPPASGASSNSSNATTSSSEEMRPIKTEPGLSSHYGHSSSVSQTFSVSAMSGHGPSIHPVLSALKLSPQGYASPVSQSPQTSSKQDSWNSLVLADSHGDIITA

SEQ ID NO: 755532 - protein, 436 aa, Homo sapiens; identical to SEQ ID NO: 755531

SEQ ID NO: 755533 - protein, 190 aa, Homo sapiens
MKHLFPVLQSASRRVGLSCANCQTTTTTLWRRNAEGEPVCNACGLYMKLHGVPRPLAMRKEGIQTRKRKPKNLNKSKTPAAPSGSESLPPASGASSNSSNATTSSSEEMRPIKTEPGLSSHYGHSSSVSQTFSVSAMSGHGPSIHPVLSALKLSPQGYASPVSQSPQTSSKQDSWNSLVLADSHGDIITA

SEQ ID NO: 755534 - protein, 207 aa, Homo sapiens
MYQSLAMAANHGPPPGAYEAGGPGAFMHGAGAASSPVYVPTPRVPSSVLGLSYLQGGGAGSASGGASGGSSGGAASGAGPGTQQGSPGWSQAGADGAAYTPPPVSPRFSFPGTTGSLAAAAAAAAAREAAAYSSGGGAAGAGLAGREQYGRAGFAGSYSSPYPAYMADVGASWAAAAAASAGPFDSPVLHSLPGRANPAARHPNLGE

SEQ ID NO: 755535 - protein, 166 aa, Homo sapiens
  misc_feature (9)..(9): Xaa can be any naturally occurring amino acid
SKTNDPPAXEIRTMPSARASSPPLSLGRRWQATSAPRGWRAPDGAVGNRVPVPAPGATLRTTSYAETGPGVHPAAALQHTGLRGNFSSALWRLLGFRPGWGYGMKAAIGPESACCSAGGLSHPYPGHRPGGPFTPCLASLSSRSLEAQGLQQHQEGLRFSGPEDRH

SEQ ID NO: 755536 - protein, 255 aa, Homo sapiens
MQPLLLLLAFLLPTGAEAGEIIGGRESRPHSRPYMAYLQIQSPAGQSRCGGFLVREDFVLTAAHCWGSNINVTLGAHNIQRRENTQQHITARRAIRHPQYNQRTIQNDIMLLQLSRRVRRNRNVNPVALPRAQEGLRPGTLCTVAGWGRVSMRRGTDTLREVQLRVQRDRQCLRIFGSYDPRRQICVGDRRERKAAFKGDSGGPLLCNNVAHGIVSYGKSSGVPPEVFTRVSSFLPWIRTTMRSFKLLDQMETPL

SEQ ID NO: 755537 - protein, 255 aa, Homo sapiens; identical to SEQ ID NO: 755536

SEQ ID NO: 755538 - protein, 480 aa, Homo sapiens [sequence omitted]

SEQ ID NO: 755539 - protein, 458 aa, Homo sapiens
MASNHKSSAARPVSRGGVGLTGRPPSGIRPLSGNIRVATAMPPGTARPGSRGCPIGTGGVLSSQIKVAHRPVTQQGLTGMKTGTKGPQRQILDKSYYLGLLRSKISELTTEVNKLQKGIEMYNQENSVYLSYEKRAETLAVEIKELQGQLADYNMLVDKLNTNTEMEEVMNDYNMLKAQNDRETQSLDVIFTERQAKEKQIRSVEEEIEQEKQATDDIIKNMSFENQVKYLEMKTTNEKLLQELDTLQQQLDSQNMKKESLEAEIAHSQVKQEAVLLHEKLYELESHRDQMIAEDKSIGSPMEEREKLLKQIKDDNQEIASMERQLTDTKEKINQFIEEIRQLDMDLEEHQGEMNQKYKELKKREEHMDTFIETFEETKNQELKRKAQIEANIVALLEHCSRNINRIEQISSITNQELKMMQDDLNFKSTEVQKSQSTAQNLTSDIQRLRLSAAGVPS

SEQ ID NO: 755540 - protein, 264 aa, Homo sapiens
MRITLYSDMDLEEHQGEMNQKYKELKKREEHMDTFIETFEETKNQELKRKAQIEANIVALLEHCSRNINRIEQISSITNQELKMMQDDLNFKSTEVQKSQSTAQNLTSDIQRLQLDLQKMELLESKMTEEQHSLKSKIKQMTTDLEIYNDLPALKSSGEEKIKKLHQERMILSTHRNAFKKIMEKQNIEYEALKTQLQENETHSQLTNLERKWQHLEQNNFAMKEFIATKSQESDYQPIKKNVTKQIAEYNKTIVDALHSTSGN

SEQ ID NO: 755541 - protein, 129 aa, Homo sapiens
LLLLNKRPVDEIYNDLPALKSSGEEKIKKLHQERMILSTHRNAFKKIMEKQNIEYEALKTQLQENETHSQLTNLERKWQHLEQNNFAMKEFIATKSQESDYQPIKKNVTKQIAEYNKTIVDALHSTSGN

SEQ ID NO: 755542 - protein, 152 aa, Homo sapiens
DAWVDPRVRIDKRTIEKFEKEAAEMGKGSFKYAWVLDKLKAELNVVSPLISKLHQERMILSTHRNAFKKIMEKQNIEYEALKTQLQENETHSQLTNLERKWQHLEQNNFAMKEFIATKSQESDYQPIKKNVTKQIAEYNKTIVDALHSTSGN

SEQ ID NO: 755543 - protein, 600 aa, Homo sapiens
MASNHKSSAARPVSRGGVGLTGRPPSGIRPLSGNIRVATAMPPGTARPGSRGCPIGTGGVLSSQIKVAHRPVTQQGLTGMKTGTKGPQRQILDKSYYLGLLRSKISELTTEVNKLQKGIEMYNQENSVYLSYEKRAETLAVEIKELQGQLADYNMLVDKLNTNTEMEEVMNDYNMLKAQNDRETQSLDVIFTERQAKEKQIRSVEEEIEQEKQATDDIIKNMSFENQVKYLEMKTTNEKLLQELDTLQQQLDSQNMKKESLEAEIAHSQVKQEAVLLHEKLYELESHRDQMIAEDKSIGSPMEEREKLLKQIKDDNQEIASMERQLTDTKEKINQFIEEIRQLDMDLEEHQGEMNQKYKELKKREEHMDTFIETFEETKNQELKRKAQIEANIVALLEHCSRNINRIEQISSITNQELKMMQDDLNFKSTEVQKSQSTAQNLTSDIQRLQLDLQKMELLESKMTEEQHSLKSKIKQMTTDLEIYNDLPALKSSGEEKIKKLHQERMILSTHRNAFKKIMEKQNIEYEALKTQLQENETHSQLTNLERKWQHLEQNNFAMKEFIATKSQESDYQPIKKNVTKQIAEYNKTIVDALHSTSGN

SEQ ID NO: 755544 - protein, 372 aa, Homo sapiens
MASNHKSSAARPVSRGGVGLTGRPPSGIRPLSGNIRVATAMPPGTARPGSRGCPIGTGGVLSSQIKVAHRPVTQQGLTGMKTGTKGPQRQILDKSYYLGLLRSKISELTTEVNKLQKGIEMYNQENSVYLSYEKRAETLAVEIKELQGQLADYNMLVDKLNTNTEMEEVMNDYNMLKAQNDRETQSLDVIFTERQAKEKQIRSVEEEIEQEKQATDDIIKNMSFENQVKYLEMKTTNEKLLQELDTLQQQLDSQNMKKESLEAEIAHSQVKQEAVLLHEKLYELESHRDQMIAEDKSIGSPMEEREKLLKQIKDDNQEIASMERQLTDTKEKINQFIEEIRQLDMDLEEHQDPTNYGWKILEKNTGSFKKQV

SEQ ID NO: 755545 - protein, 171 aa, Homo sapiens
  misc_feature (1)..(1): Xaa can be any naturally occurring amino acid
  misc_feature (7)..(7): Xaa can be any naturally occurring amino acid
XFMEGGXNKTVQIDLDIQRLQLDLQKMELLESKMTEEQHSLKSKIKQMTTDLEIYNDLPALKSSGEEKIKKLHQERMILSTHRNAFKKIMEKQNIEYEALKTQLQENETHSQLTNLERKWQHLEQNNFAMKEFIATKSQESDYQPIKKNVTKQIAEYNKTIVDALHSTSGN

SEQ ID NO: 755546 - protein, 165 aa, Homo sapiens
MLLSKSPSSLSANISSSPKGSPSSSRKSGTSCPSSKNSSPNSSPRTLGRSKGRLWLPQIGSKNKLSSSKKNLDASKENGAGQICELADALSRGHMRGVGSQPELVTPQDHEVALANGFLYEHEAYGNGYSNGQLGNHSEEDSTDDQREDTHIKPIYMQFHAIQEF

SEQ ID NO: 755547 - protein, 165 aa, Homo sapiens; identical to SEQ ID NO: 755546

SEQ ID NO: 755548 - protein, 165 aa, Homo sapiens; identical to SEQ ID NO: 755546

SEQ ID NO: 755549 - protein, 353 aa, Homo sapiens
MPWPLLLLLAVSGAQTTRPCFPGCQCEVETFGLFDSFSLTRVDCSGLGPHIMPVPIPLDTAHLDLSSNRLEMVNESVLAGPGYTTLAGLDLSHNLLTSISPTAFSRLRYLESLDLSHNGLTALPAESFTSSPLSDVNLSHNQLREVSVSAFTTHSQGRALHVDLSHNLIHRLVPHPTRAGLPAPTIQSLNLAWNRLHAVPNLRDLPLRYLSLDGNPLAVIGPGAFAGLGGLTHLSLASLQRLPELAPSGFRELPGLQVLDLSGNPKLNWAGAEVFSGLSSLQELDLSGTNLVPLPEALLLHLPALQSVSVGQDVRCRRLVREGTYPRRPGSSPKVALHCVDTRESAARGPTIL

SEQ ID NO: 755550 - protein, 369 aa, Homo sapiens
PGCQCEVEHGRVVWAPLTASSSSRGHGMVGAGSRPCFPGCQCEVETFGLFDSFSLTRVDCSGLGPHIMPVPIPLDTAHLDLSSNRLEMVNESVLAGPGYTTLAGLDLSHNLLTSISPTAFSRLRYLESLDLSHNGLTALPAESFTSSPLSDVNLSHNQLREVSVSAFTTHSQGRALHVDLSHNLIHRLVPHPTRAGLPAPTIQSLNLAWNRLHAVPNLRDLPLRYLSLDGNPLAVIGPGAFAGLGGLTHLSLASLQRLPELAPSGFRELPGLQVLDLSGNPKLNWAGAEVFSGLSSLQELDLSGTNLVPLPEALLLHLPALQSVSVGQDVRCRRLVREGTYPRRPGSSPKVALHCVDTRESAARGPTIL

SEQ ID NO: 755551 - protein, 353 aa, Homo sapiens; identical to SEQ ID NO: 755549

SEQ ID NO: 755552 - protein, 353 aa, Homo sapiens; identical to SEQ ID NO: 755549

SEQ ID NO: 755553 - protein, 353 aa, Homo sapiens; identical to SEQ ID NO: 755549

SEQ ID NO: 755554 - protein, 470 aa, Homo sapiens
MNLIEHSHLPTTDEFSFSENLFGVLTEQVAGPLGQNLEVEPYSQYSNVQFPQVQPQISSSSYYSNLGFYPQQPEEWYSPGIYELRRMPAETLYQGETEVAEMPVTKKPRMGASAGRIKGDELCVVCGDRASGYHYNALTCEGCKGFFRRSITKNAVYKCKNGGNCVMDMYMRRKCQECRLRKCKEMGMLAECRCLLTEIQCKSKRLRKNVKQHADQTVNEDSEGRDLRQVTSTTKSCREKTELTPDQQTLLHFIMDSYNKQRMPQEITNKILKEEFSAEENFLILTEMATNHVQVLVEFTKKLPGFQTLDHEDQIALLKGSAVEAMFLRSAEIFNKKLPSGHSDLLEERIRNSGISDEYITPMFSFYKSIGELKMTQEEYALLTAIVILSPDRQYIKDREAVEKLQEPLLDVLQKLCKIHQPENPQHFACLLGRLTELRTFNHHHAEMLMSWRVNDHKFTPLLCEIWDVQ

SEQ ID NO: 755555 - protein, 426 aa, Homo sapiens
MNFLFLKIYLLEVEPYSQYSNVQFPQVQPQISSSSYYSNLGFYPQQPEEWYSPGIYELRRMPAETLYQGETEVAEMPVTKKPRMGASAGRIKGDELCVVCGDRASGYHYNALTCEGCKGFFRRSITKNAVYKCKNGGNCVMDMYMRRKCQECRLRKCKEMGMLAECRCLLTEIQCKSKRLRKNVKQHADQTVNEDSEGRDLRQVTSTTKSCREKTELTPDQQTLLHFIMDSYNKQRMPQEITNKILKEEFSAEENFLILTEMATNHVQVLVEFTKKLPGFQTLDHEDQIALLKLPSGHSDLLEERIRNSGISDEYITPMFSFYKSIGELKMTQEEYALLTAIVILSPDRQYIKDREAVEKLQEPLLDVLQKLCKIHQPENPQHFACLLGRLTELRTFNHHHAEMLMSWRVNDHKFTPLLCEIWDVQ

SEQ ID NO: 755556 - protein, 484 aa, Homo sapiens
MVMQFQGLENPIQISPHCSCTPSGFFMEMMSMKPAKGVLTEQVAGPLGQNLEVEPYSQYSNVQFPQVQPQISSSSYYSNLGFYPQQPEEWYSPGIYELRRMPAETLYQGETEVAEMPVTKKPRMGASAGRIKGDELCVVCGDRASGYHYNALTCEGCKGFFRRSITKNAVYKCKNGGNCVMDMYMRRKCQECRLRKCKEMGMLAECRCLLTEIQCKSKRLRKNVKQHADQTVNEDSEGRDLRQVTSTTKSCREKTELTPDQQTLLHFIMDSYNKQRMPQEITNKILKEEFSAEENFLILTEMATNHVQVLVEFTKKLPGFQTLDHEDQIALLKGSAVEAMFLRSAEIFNKKLPSGHSDLLEERIRNSGISDEYITPMFSFYKSIGELKMTQEEYALLTAIVILSPDRQYIKDREAVEKLQEPLLDVLQKLCKIHQPENPQHFACLLGRLTELRTFNHHHAEMLMSWRVNDHKFTPLLCEIWDVQ

SEQ ID NO: 755557 - protein, 470 aa, Homo sapiens; identical to SEQ ID NO: 755554

SEQ ID NO: 755558 - protein, 395 aa, Homo sapiens
MNFLFLKIYLLEVEPYSQYSNVQFPQVQPQISSSSYYSNLGFYPQQPEEWYSPGIYELRRMPAETLYQGETEVAEMPVTKKPRMGASAGRIKGDELCVVCGDRASGYHYNALTCEGCKGLLTEIQCKSKRLRKNVKQHADQTVNEDSEGRDLRQVTSTTKSCREKTELTPDQQTLLHFIMDSYNKQRMPQEITNKILKEEFSAEENFLILTEMATNHVQVLVEFTKKLPGFQTLDHEDQIALLKGSAVEAMFLRSAEIFNKKLPSGHSDLLEERIRNSGISDEYITPMFSFYKSIGELKMTQEEYALLTAIVILSPDRQYIKDREAVEKLQEPLLDVLQKLCKIHQPENPQHFACLLGRLTELRTFNHHHAEMLMSWRVNDHKFTPLLCEIWDVQ

SEQ ID NO: 755559 - protein, 122 aa, Homo sapiens
MNFLFLKIYLLEVEPYSQYSNVQFPQVQPQISSSSYYSNLGFYPQQPEEWYSPGIYELRRMPAETLYQGETEVAEMPVTKKPRMGASAGRIKGDELCVVCGDRASGYHYNALTCEGCKGKHL

SEQ ID NO: 755560 - protein, 474 aa, Homo sapiens
MWRVRKRGYFGIWSFPLIIAAVCAQSVNDPSNMSLVKETVDRLLKGYDIRLRPDFGGPPVAVGMNIDIASIDMVSEVNMDYTLTMYFQQAWRDKRLSYNVIPLNLTLDNRVADQLWVPDTYFLNDKKSFVHGVTVKNRMIRLHPDGTVLYGLRITTTAACMMDLRRYPLDEQNCTLEIESYGYTTDDIEFYWRGDDNAVTGVTKIELPQFSIVDYKLITKKVVFSTGSYPRLSLSFKLKRNIGYFILQTYMPSILITILSWVSFWINYDASAARVALGITTVLTMTTINTHLRETLPKIPYVKAIDMYLMGCFVFVFMALLEYALVNYIFFGRGPQRQKKAAEKAASANNEKMRLDVNKMDPHENILLSTLEIKNEMATSEAVMGLGDPRSTMLAYDASSIQYRKAGLPRHSFGRNALERHVAQKKSRLRRRASQLKITIPDLTDVNAIDRWSRIFFPVVFSFFNIVYWLYYVN

SEQ ID NO: 755561 - protein, 115 aa, Homo sapiens
MDPHENILLSTLEIKNEMATSEAVMGLGDPRSTMLAYDASSIQYRKAGLPRHSFGRNALERHVAQKKSRLRRRASQLKITIPDLTDVNAIDRWSRIFFPVVFSFFNIVYWLYYVN

SEQ ID NO: 755562 - protein, 512 aa, Homo sapiens
MWRVRKRGYFGIWSFPLIIAAVCAQSVNDPSNMSLVKETVDRLLKGYDIRLRPDFGGPPVAVGMNIDIASIDMVSEVNMDYTLTMYFQQAWRDKRLSYNVIPLNLTLDNRVADQLWVPDTYFLNDKKSFVHGVTVKNRMIRLHPDGTVLYGLRITTTAACMMDLRRYPLDEQNCTLEIESYGYTTDDIEFYWRGDDNAVTGVTKIELPQFSIVDYKLITKKVVFSTGSYPRLSLSFKLKRNIGYFILQTYMPSILITILSWVSFWINYDASAARVALGITTVLTMTTINTHLRETLPKIPYVKAIDMYLMGCFVFVFMALLEYALVNYIFFGRGPQRQKKAAEKAASANNEKMRLDVNKIFYKDIKQNGTQYRSLWDPTGNLSPTRRTTNYDFSLYTMDPHENILLSTLEIKNEMATSEAVMGLGDPRSTMLAYDASSIQYRKAGLPRHSFGRNALERHVAQKKSRLRRRASQLKITIPDLTDVNAIDRWSRIFFPVVFSFFNIVYWLYYVN

SEQ ID NO: 755563 - protein, 75 aa, Homo sapiens
NFQKWAAVVVPSGEEQRYMCHVQHEGLPKPLTLRWKQSSQPTIPIVGYRCWPGSPWSCSHWSCGFCCDVQEEELR

SEQ ID NO: 755564 - protein, 812 aa, Homo sapiens
MEPLGNWRSLRAPLPPMLLLLLLQVAGPVGALAETLLNAPRAMGTSSSPPSPASVVAPGTTLFEESRLPVFTLDYPHVQIPFEITLWILLASLAKIGFHLYHKLPTIVPESCLLIMVGLLLGGIIFGVDEKSPPAMKTDVFFLYLLPPIVLDAGYFMPTRPFFENIGTIFWYAVVGTLWNSIGIGVSLFGICQIEAFGLSDITLLQNLLFGSLISAVDPVAVLAVFENIHVNEQLYILVFGESLLNDAVTVVLYNLFKSFCQMKTIETIDVFAGIANFFVVGIGGVLIGIFLGFIAAFTTRFTHNIRVIEPLFVFLYSYLSYITAEMFHLSGIMAITACAMTMNKYVEENVSQKSYTTIKYFMKMLSSVSETLIFIFMGVSTVGKNHEWNWAFVCFTLAFCLMWRALGVFVLTQVINRFRTIPLTFKDQFIIAYGGLRGAICFALVFLLPAAVFPRKKLFITAAIVVIFFTVFILGITIRPLVEFLDVKRSNKKQQAVSEEIYCRLFDHVKTGIEDVCGHWGHNFWRDKFKKFDDKYLRKLLIRENQPKSSIVSLYKKLEIKHAIEMAETGMISTVPTFASLNDCREEKIRKVTSSETDEIRELLSRNLYQIRQRTLSYNRHSLTADTSERQAKEILIRRRHSLRESIRKDSSLNREHRASTSTSRYLSLPKNTKLPEKLQKRRTISIADGNSSDSDADAGTTVLNLQPRARRFLPEQFSKKSPQSYKMEWKNEVDVDSGRDMPSTPPTPHSREKGTQTSGLLQQPLLSKDQSGSEREDSLTEGIPPKPPPRLVWRASEPGSRKARFGSEKP

SEQ ID NO: 755565 - protein, 697 aa, Homo sapiens
MVGLLLGGIIFGVDEKSPPAMKTDVFFLYLLPPIVLDAGYFMPTRPFFENIGTIFWYAVVGTLWNSIGIGVSLFGICQIEAFGLSDITLLQNLLFGSLISAVDPVAVLAVFENIHVNEQLYILVFGESLLNDAVTVVLYNLFKSFCQMKTIETIDVFAGIANFFVVGIGGVLIGIFLGFIAAFTTRFTHNIRVIEPLFVFLYSYLSYITAEMFHLSGIMAITACAMTMNKYVEENVSQKSYTTIKYFMKMLSSVSETLIFIFMGVSTVGKNHEWNWAFVCFTLAFCLMWRALGVFVLTQVINRFRTIPLTFKDQFIIAYGGLRGAICFALVFLLPAAVFPRKKLFITAAIVVIFFTVFILGITIRPLVEFLDVKRSNKKQQAVSEEIYCRLFDHVKTGIEDVCGHWGHNFWRDKFKKFDDKYLRKLLIRENQPKSSIVSLYKKLEIKHAIEMAETGMISTVPTFASLNDCREEKIRKVTSSETDEIRELLSRNLYQIRQRTLSYNRHSLTADTSERQAKEILIRRRHSLRESIRKDSSLNREHRASTSTSRYLSLPKNTKLPEKLQKRRTISIADGNSSDSDADAGTTVLNLQPRARRFLPEQFSKKSPQSYKMEWKNEVDVDSGRDMPSTPPTPHSREKGTQTSGLLQQPLLSKDQSGSEREDSLTEGIPPKPPPRLVWRASEPGSRKARFGSEKP

SEQ ID NO: 755566 - protein, 265 aa, Homo sapiens
MSEQQMDLKDLMPTKRKYMWKTAEDRRMSDLTCVLEWLERRQGKKKQAPEKQKPKVVTVLKRNKKKEEKKGKGLMTARGGNRRDTETSQQALGKRFRKDAASYRSLYGVEQKGKHLSMVPGSYIKDGPKKSDTDIKDAVDPESTQRPNPFRRQSIVLDPMLQEGTFNSQRATFIRDWSNKMPDMAYERKLKSLMEKSTEPKMETMRMLKPEEVLSCRYLRLSKENIRTLLKLCKDAGMNVDIHPHMVEEDIDAKKVFTGIPSMAL

SEQ ID NO: 755567 - protein, 120 aa, Homo sapiens
WGCPREGSYSRNSHTPNNHQCTNHSMLFGTRQEMLQAGVRSWQKWAVGEMELLQPFSVPALTAPTKSSRAGWAETSIPAGLSLGGGAGAKEPPWVGASGAGAGPEDCSPCMEGRPGWSPG

SEQ ID NO: 755568 - protein, 188 aa, Homo sapiens
EWVDVVVDDLLPIKDGKLVFVHSAEGNEFWSALLEKAYAKLSSGCGGNSSFQLPLGVGAHDCLLRGSCLMPECCPGAAHRVNGSYEALSGGSTSEGFEDFTGGVTEWYELRKAPSDLYQIILKALGRGSLLGCSIDISSVLDMEAITFKKLVKGHAYSVTGAKQVLPWVGPSLKGGSCPLACPCLSGT

SEQ ID NO: 755569 - protein, 188 aa, Homo sapiens; identical to SEQ ID NO: 755568

SEQ ID NO: 755570 - protein, 103 aa, Homo sapiens
FFYQDQNSHFNFSARMVLMASTLPESKLQTPHNTTAYKEYLGPGVDTFSSAKLFQKLYCLSRWWYLLTSYPTQGSGLSAGIQGILQGSLLVYTSPVSAPSSGA

SEQ ID NO: 755571 - protein, 150 aa, Homo sapiens [sequence omitted]

SEQ ID NO: 755572 - protein, 148 aa, Homo sapiens
QLATAGQPAADSLERGSQETARHPGKPLFAPLTLSSLFRPPSGAPNPPRHARLGRMVRFGVWAGRVPGPLGGRRREEGKRFGHGGGCALTRAVPGRLQVEYHKKYGKIFRMKLGSFESVHLGSPCLLEALYRTESAYPQRLEIKPWKA

SEQ ID NO: 755573 - protein, 85 aa, Homo sapiens
IFYILSFGLKLQNQVCLPCLQHSSVWIGSISSDRRYTCVAAMWDSELQATLAFIFHPGLLTSNFRLAALSSHCGPIPVSWGPVGF

SEQ ID NO: 755574 - protein, 80 aa, Homo sapiens
RFNCLYSAVAVAGSPWGGKWRRGDGCQVEKSKDKLDPMRMISMCCRRNGCPLSLSSATAFRMLKKDPGRGKALAGPPTTL

SEQ ID NO: 755575 - protein, 296 aa, Homo sapiens
MNALCVKNSSYVHSSLHRHIISHSGNNPYGCEECGKKPCTCKQCQKTSLSVTRVHRDTVMHTGNGHYGCTICEKVFNIPSSFQIHQRNHTGEKPYECMECGKALGFSRSLNRHKRIHTGEKRYECKQCGKAFSRSSHLRDHERTHTGEKPYECKHCGKAFRYSNCLHYHERTHTGEKPYVCMECGKAFSCLSSLQGHIKAHAGEEPYPCKQCGKAFRYASSLQKHEKTHIAQKPYVCNNCGKGFRCSSSLRDHERTHTGEKPYECQKCGKAFSRASTLWKHKKTHTGEKPYKCKKM

SEQ ID NO: 755576 - protein, 248 aa, Homo sapiens
MQETFRNLASIGNKGEDQSIEDQYKNSSRNLSSFQIHQRNHTGEKPYECMECGKALGFSRSLNRHKRIHTGEKRYECKQCGKAFSRSSHLRDHERTHTGEKPYECKHCGKAFRYSNCLHYHERTHTGEKPYVCMECGKAFSCLSSLQGHIKAHAGEEPYPCKQCGKAFRYASSLQKHEKTHIAQKPYVCNNCGKGFRCSSSLRDHERTHTGEKPYECQKCGKAFSRASTLWKHKKTHTGEKPYKCKKM

SEQ ID NO: 755577 - protein, 117 aa, Homo sapiens
MSGHPGSWEMNSVAFEDVAVNFTQEEWALLDPSQKNLYRDVMQETFRNLASIGNKGEDQSIEDQYTLVSFGSMYVPFFLCTLGARNCHVIDRRIVHFKLVQNFYVLFLLKQTKTGYV

SEQ ID NO: 755578 - protein, 135 aa, Homo sapiens
MAASRLELNLVRLLSRCEAMAAEKRDPDEWRLEKYVGALEDMLQALKVHASKPASEVINEYSWKVDFLKGMLQAEKLTSSSEKALANQFLAPGRVPTTARERVPATKTVHLQSRARYTSEMRSELLGTDSAGESP

SEQ ID NO: 755579 - protein, 259 aa, Homo sapiens
MAASRLELNLVRLLSRCEAMAAEKRDPDEWRLEKYVGALEDMLQALKVHASKPASEVINEYSWKVDFLKGMLQAEKLTSSSEKALANQFLAPGRVPTTARERVPATKTVHLQSRARYTSEMRSELLGTDSAEPEMDVRKRTGVAGSQPVSEKQSAAELDLVLQRHQNLQEKLAEEMLGLARSLKTNTLAAQSVIKKDNQTLSHSLKMADQNLEKLKTESERLEQHTQKSVNWLLWAMLIIVCFIFISMILFIRIMPKLK

SEQ ID NO: 755580 - protein, 128 aa, Homo sapiens
ASEKASQHRSIVAGALRDEEEFRRRQKWHSQQRAQHQQATRGAGQSQGSRERPFLAPVLLTPFPPPPQTLSHSLKMADQNLEKLKTESERLEQHTQKSVNWLLWAMLIIVCFIFISMILFIRIMPKLK

SEQ ID NO: 755581 - protein, 259 aa, Homo sapiens; identical to SEQ ID NO: 755579

SEQ ID NO: 755582 - protein, 146 aa, Homo sapiens
MAASRLELNLVRLLSRCEAMAAEKRDPDEWRLEKYVGALEDMLQALKVHASKPASEVINEYSWKVDFLKGMLQAEKLTSSSEKALANQFLAPGRVPTTARERVPATKTVHLQSRARYTSEMRSELLGTDSAEPEMDVRKRTPCHTH

SEQ ID NO: 755583 - protein, 146 aa, Homo sapiens; identical to SEQ ID NO: 755582

SEQ ID NO: 755584 - protein, 214 aa, Homo sapiens
LEVPDVFQQMRELGLARRVPDSLFRSLLERYLTAATASVGSGVPVLSRVPLKQKQPGLDYFYPQLQLGVTEAVVITQVCHPHRIHCQLRSVSQEIHRLSESMAQVYRGSTGTGDENSTSATWEEREESPDKPGSPCASCGLDGHWYRALLLETFRPQRCAQVLHVDYGRKELVSCSSLRYLLPEYFRMPVVTYPCALYGLWDGGRGWSRSQVGD

SEQ ID NO: 755585 - protein, 449 aa, Homo sapiens
MEFFISMSETIKYNDDDHKTLFLKTLNEQRLEGEFCDIAIVVEDVKFRAHRCVLAACSTYFKKLFKKLEVDSSSVIEIDFLRSDIFEEVLNYMYTAKISVKKEDVNLMMSSGQILGIRFLDKLCSQKRDVSSPDENNGQSKSKYCLKINRPIGDAADTQDDDVEEIGDQDDSPSDDTVEGTPPSQEDGKSPTTTLRVQEAILKELGSEEVRKVNCYGQEVESMETPESKDLGSQTPQALTFNDGMSEVKDEQTPGWTTAASDMKFEYLLYGHHREQIACQACGKTFSDEGRLRKHEKLHTADRPFVCEMCTKGFTTQAHLKEHLKIHTGYKPYSCEVCGKSFIRAPDLKKHERVHSNERPFACHMCDKAFKHKSHLKDHERRHRGEKPFVCGSCTKAFAKASDLKRHENNMHSERKQVTPSAIQSETEQLQAAAMAAEAEQQLETIACS

SEQ ID NO: 755586 - protein, 449 aa, Homo sapiens; identical to SEQ ID NO: 755585

SEQ ID NO: 755587 - protein, 415 aa, Homo sapiens
MEFFISMSETIKYNDDDHKTLFLKTLNEQRLEGEFCDIAIVVEDVKFRAHRCVLAACSTYFKKLFKKLEVDSSSVIEIDFLRSDIFEEVLNYMYTAKISDENNGQSKSKYCLKINRPIGDAADTQDDDVEEIGDQDDSPSDDTVEGTPPSQEDGKSPTTTLRVQEAILKELGSEEVRKVNCYGQEVESMETPESKDLGSQTPQALTFNDGMSEVKDEQTPGWTTAASDMKFEYLLYGHHREQIACQACGKTFSDEGRLRKHEKLHTADRPFVCEMCTKGFTTQAHLKEHLKIHTGYKPYSCEVCGKSFIRAPDLKKHERVHSNERPFACHMCDKAFKHKSHLKDHERRHRGEKPFVCGSCTKAFAKASDLKRHENNMHSERKQVTPSAIQSETEQLQAAAMAAEAEQQLETIACS

SEQ ID NO: 755588 - protein, 449 aa, Homo sapiens; identical to SEQ ID NO: 755585

SEQ ID NO: 755589 - protein, 449 aa, Homo sapiens; identical to SEQ ID NO: 755585

SEQ ID NO: 755590 - protein, 449 aa, Homo sapiens; identical to SEQ ID NO: 755585

SEQ ID NO: 755591 - protein, 143 aa, Homo sapiens
MEFFISMSETIKYNDDDHKTLFLKTLNEQRLEGEFCDIAIVVEDVKFRAHRCVLAACSTYFKKLFKKLEVDSSSVIEIDFLRSDIFEEVLNYMYTAKISVKKEDVNLMMSSGQILGIRFLDKLCSQKRDVSSPDENNGQSKSN

SEQ ID NO: 755592 - protein, 100 aa, Homo sapiens
LAADWLGQRRNHRGLMLSSCQLNGFRVEPQERGCLCRWSHRFQVEPWVSDMQKTWKGISKVRSTAVVVFAGVTGGSCISYNLRNTCLHLSRTQAPLLPSA

SEQ ID NO: 755593 - protein, 369 aa, Homo sapiens
SLCKATAVPAGLWQAPGSMAVKLGTLLLALALGLAQPASARRKLLVFLLDGFRSDYISDEALESLPGFKEIVSRGVKVDYLTPDFPSLSYPNYYTLMTGRHCEVHQMIGNYMWDPTTNKSFDIGVNKDSLMPLWWNGSEPLWVTLTKAKRKVYMYYWPGCEVEILGVRPTYCLEYKNVPTDINFANAVSDALDSFKSGRADLAAIYHERIDVEGHHYGPASPQRKDALKAVDTVLKYMTKWIQERGLQDRLNVIIFSDHGMTDIFWMDKVIELNKYISLNDLQQVKDRGPVVSLWPAPGKHSEIYNKLSTVEHMTVYEKEAIPSRFYYKKGKFVSPLTLVADEGWFITEVIMKYVPIYSLCKFYKTVQS

SEQ ID NO: 755594 - protein, 34 aa, Homo sapiens
MNLSLEPQTHRYKLLMDVSVWMHHKHPNMPQMAF

SEQ ID NO: 755595 - protein, 407 aa, Homo sapiens
LPLASRTELARGTPPSTALHSLRDKGEARGAEGAVMAELEAVADDLDALIDDLDYLPGHFHLEMQLNFEPRSPAPQRARDLKLQREGLRQELQLAAAPQRPAVRHLLGAFAFYLEELDEARECFLEVAHEHPGNLNAWANLAHVYGRLGQEEEEEACAARLADLMGLAEEPEAAGDPQLRAARCLAEQGYAHGFDVGCASPEERARGLAAGIALYDKALGYGQQIPMEEKRGWYFTMATLYIRLDGIFLELGSEEQKRLPAFNRTLALLRQVLKSEDPRHRALAWCYLGMLLERKDTFSTTPMGVHDCGYSGTDPLDCFGKAIEIAKNQPPILNRLAKIFYFLGKQDMAIGTCNMALDVLRDPELNWQAYCTRAKRRGLTMLPRLVSNSWAQAVLPPRPPKVLEFQV

SEQ ID NO: 755596 - protein, 140 aa, Homo sapiens
MAIGTCNMALDVLRDPELNWQAYCTRAKIHIRAYLHDLKRAKMGLGGMPDRNHLACAKADLEEVVRVCPGFKAYLDIGQVYYYMGVDAVQELLAVDEAALNQALVFLAKAGESELGATLPELQLLRGKCLRIKGEDANAA

SEQ ID NO: 755597 - protein, 487 aa, Homo sapiens
LPLASRTELARGTPPSTALHSLRDKGEARGAEGAVMAELEAVADDLDALIDDLDYLPGHFHLEMQLNFEPRSPAPQRARDLKLQREGLRQELQLAAAPQRPAVRHLLGAFAFYLEELDEARECFLEVAHEHPGNLNAWANLAHVYGRLGQEEEEEACAARLADLMGLAEEPEAAGDPQLRAARCLAEQGYAHGFDVGCASPEERARGLAAGIALYDKALGYGQQIPMEEKRGWYFTMATLYIRLDGIFLELGSEEQKRLPAFNRTLALLRQVLKSEDPRHRALAWCYLGMLLERKDTFSTTPMGVHDCGYSGTDPLDCFGKAIEIAKNQPPILNRLAKIFYFLGKQDMAIGTCNMALDVLRDPELNWQAYCTRAKIHIRAYLHDLKRAKMGLGGMPDRNHLACAKADLEEVVRVCPGFKAYLDIGQVYYYMGVDAVQELLAVDEAALNQALVFLAKAGESELGATLPELQLLRGKCLRIKGEDANAA

SEQ ID NO: 755598 - protein, 424 aa, Homo sapiens
LPLASRTELARGTPPSTALHSLRDKGEARGAEGAVMAELEAVADDLDALIDDLDYLPGHFHLEMQLNFEPRSPAPQRARDLKLQREGLRQELQLAAAPQRPAVRHLLGAFAFYLEELDEARECFLEVAHEHPGNLNAWANLAHVYGRLGQEEEEEACAARLADLMGLAEEPEAAGDPQLRAARCLAEQGYAHGFDVGCASPEERARGLAAGIALYDKALGYGQQIPMEEKRGWYFTMATLYIRLDGIFLELGSEEQKRLPAFNRTLALLRQVLKSEDPRHRALAWCYLGMLLERKDTFSTTPMGVHDCGYSGTDPLDCFGKAIEIAKNQPPILNRLAKIFYFLGKQDMAIGTCNMALDVLRDPELNWQAYCTRAKLPALVPDLPPRAHTEPMCLRKPTRSSQFTSLQAEESSHPLIFSTTIHMT

SEQ ID NO: 755599 - protein, 81 aa, Homo sapiens
FLVVAHPFHLNNKARFPPSPSFLMVAHPAYLTNKARFPPSPSFLMVVHPVGFHSHGSSALKSVSEEVLMILTLLTRDKMSH

SEQ ID NO: 755600 - protein, 86 aa, Homo sapiens
FLVVAHPFHLNNKARFPPSPSFLMVAHPAYLTNKARFPPSPSFLMVVHPVGFHSHGSSALKSVSEEVLMAAVSPPASDCHLWGPEK

SEQ ID NO: 755601 - protein, 96 aa, Homo sapiens
FDATILKGFTARTSPKFLALSSGPYPAEEAATAAAGGEEEKEASPAEANAALRLSAKKFPAPMSPRRASPTIPRRAWGTGPSADDRCRFALGSRMW

SEQ ID NO: 755602 - protein, 127 aa, Homo sapiens
MRRCLECTGPRDPLDPAEGGWRRDGQAVGSVMVRCPVFSLPRPLQIAAVLPLGVGCGERMGLLPYGAHNGQRRFREVSALPALRPQSALLESSHSTSKRSFKDGLVERPSFVSEEIKCRLSDLPKIR

SEQ ID NO: 755603 - protein, 305 aa, Homo sapiens
MAREDSVKCLRCLLYALNLLFWLMSISVLAVSAWMRDYLNNVLTLTAETRVEEAVILTYFPVVHPVMIAVCCFLIIVGMLGYCGTVKRNLLLLAWYFGSLLVIFCVELACGVWTYEQELMVPVQWSDMVTLKARMTNYGLPRYRWLTHAWNFFQREFKCCGVVYFTDWLEMTEMDWPPDSCCVREFPGCSKQAHQEDLSDLYQEGCGKKMYSFLRGTKQLQVLRFLGISIGVTQILAMILTITLLWALYYDRREPGTDQMMSLKNDNSQHLSCPSVELLKPSLSRIFEHTSMANSFNTHFEMEEL

SEQ ID NO: 755604 - protein, 305 aa, Homo sapiens; identical to SEQ ID NO: 755603

SEQ ID NO: 755605 - protein, 305 aa, Homo sapiens; identical to SEQ ID NO: 755603

SEQ ID NO: 755606 - protein, 875 aa, Homo sapiens
PAASAAQSAPARPCWNPGLSRSRSGADMTTAPQEPPARPLQAGSGAGPAPGRAMRSTTLLALLALVLLYLVSGALVFRALEQPHEQQAQRELGEVREKFLRAHPCVSDQELGLLIKEVADALGGGADPETNSTSNSSHSAWDLGSAFFFSGTIITTIGYGNVALRTDAGRLFCIFYALVGIPLFGILLAGVGDRLGSSLRHGIGHIEAIFLKWHVPPELVRVLSAMLFLLIGCLLFVLTPTFVFCYMEDWSKLEAIYFVIVTLTTVGFGDYVAGADPRQDSPAYQPLVWFWILLGLAYFASVLTTIGNWLRVVSRRTRAEMGGLTAQAASWTGTVTARVTQRAGPAAPPPEKEQPLLPPPPCPAQPLGRPRSPSPPEKAQPPSPPTASALDYPSENLAFIDESSDTQSERGCPLPRAPRGRRRPNPPRKPVRPRGPGRPRDKGVPVYGQDPWPGLSRASFLLSPACLACLTKEPSFHETEVWGGGYSCLSASSLAPALPSLPSISRPPQGFLCRCPGRVYPSQHLTTVPQSLHQEMKTVCTAAGVTLPDASGCGIAFLGPPWGHLWPPVTPRPRVPGHPGRSSLGPLRPASLPGGDCVGSGVGISRDGLRVSSLCTHIGGWGAGRERQGRENGISRGGLSFELSQRERPCPAPFLERCLPSRLEACGVWVRWGRTMEEKPSKVSLKSSDRQGSDEESVHSDTRDLWTTTTLSQAQLNMPLSEVCEGFDEEGRNISKTRGWHSPGRGSLDEGYKASHKPEELDEHALVELELHRGSSMEINLGEKDTASQIEAEKSSSMSSLNIAKHMPHRAYWAEQQSRLPLPLMELMENEALEILTKALRSYQLGIGRDHFLTKELQRYIEGLKKRRSKRLYVN

SEQ ID NO: 755607 - protein, 393 aa, Homo sapiens
MRSTTLLALLALVLLYLVSGALVFRALEQPHEQQAQRELGEVREKFLRAHPCVSDQELGLLIKEVADALGGGADPETNSTSNSSHSAWDLGSAFFFSGTIITTIGYGNVALRTDAGRLFCIFYALVGIPLFGILLAGVGDRLGSSLRHGIGHIEAIFLKWHVPPELVRVLSAMLFLLIGCLLFVLTPTFVFCYMEDWSKLEAIYFVIVTLTTVGFGDYVAGADPRQDSPAYQPLVWFWILLGLAYFASVLTTIGNWLRVVSRRTRAEMGGLTAQAASWTGTVTARVTQRAGPAAPPPEKEQPLLPPPPCPAQPLGRPRSPSPPEKAQPPSPPTASALDYPSENLAFIDESSDTQSERGCPLPRAPRGRRRPNPPRKPVRPRGPGRPRDKGVPV

SEQ ID NO: 755608 - protein, 822 aa, Homo sapiens
MRSTTLLALLALVLLYLVSGALVFRALEQPHEQQAQRELGEVREKFLRAHPCVSDQELGLLIKEVADALGGGADPETNSTSNSSHSAWDLGSAFFFSGTIITTIGYGNVALRTDAGRLFCIFYALVGIPLFGILLAGVGDRLGSSLRHGIGHIEAIFLKWHVPPELVRVLSAMLFLLIGCLLFVLTPTFVFCYMEDWSKLEAIYFVIVTLTTVGFGDYVAGADPRQDSPAYQPLVWFWILLGLAYFASVLTTIGNWLRVVSRRTRAEMGGLTAQAASWTGTVTARVTQRAGPAAPPPEKEQPLLPPPPCPAQPLGRPRSPSPPEKAQPPSPPTASALDYPSENLAFIDESSDTQSERGCPLPRAPRGRRRPNPPRKPVRPRGPGRPRDKGVPVYGQDPWPGLSRASFLLSPACLACLTKEPSFHETEVWGGGYSCLSASSLAPALPSLPSISRPPQGFLCRCPGRVYPSQHLTTVPQSLHQEMKTVCTAAGVTLPDASGCGIAFLGPPWGHLWPPVTPRPRVPGHPGRSSLGPLRPASLPGGDCVGSGVGISRDGLRVSSLCTHIGGWGAGRERQGRENGISRGGLSFELSQRERPCPAPFLERCLPSRLEACGVWVRWGRTMEEKPSKVSLKSSDRQGSDEESVHSDTRDLWTTTTLSQAQLNMPLSEVCEGFDEEGRNISKTRGWHSPGRGSLDEGYKASHKPEELDEHALVELELHRGSSMEINLGEKDTASQIEAEKSSSMSSLNIAKHMPHRAYWAEQQSRLPLPLMELMENEALEILTKALRSYQLGIGRDHFLTKELQRYIEGLKKRRSKRLYVN

SEQ ID NO: 755609 - protein, 1088 aa, Homo sapiens
PAASAAQSAPARPCWNPGLSRSRSGADSKCGAGSGARAGLRGRDAPGATGRAGCPPLARGRLREWCGRRSRRPPRSEASLCGRGGGGGSELRALRGGPAVWRVHASVHTRVRGLWVPWRGRHAHGGRGCRGVCGECRWVTTAPQEPPARPLQAGSGAGPAPGRAMRSTTLLALLALVLLYLVSGALVFRALEQPHEQQAQRELGEVREKFLRAHPCVSDQELGLLIKEVADALGGGADPETNSTSNSSHSAWDLGSAFFFSGTIITTIGGGGDWHVGGGKELPHGGRCRETEGSQVAPRLPASPLCPGYGNVALRTDAGRLFCIFYALVGIPLFGILLAGVGDRLGSSLRHGIGHIEAIFLVSCSMPCLPLLLGSGYPSPCPWHMSAPPKTISLSHRLPGGGSGEYGSGDCWCLLGRAYCPIPQKWHVPPELVRVLSAMLFLLIGCLLFVLTPTFVFCYMEDWSKLEAIYFVIVTLTTVGFGDYVAGADPRQDSPAYQPLVWFWILLGLAYFASVLTTIGNWLRVVSRRTRAEMGGLTAQAASWTGTVTARVTQRAGPAAPPPEKEQPLLPPPPCPAQPLGRPRSPSPPEKAQPPSPPTASALDYPSENLAFIDESSDTQSERGCPLPRAPRGRRRPNPPRKPVRPRGPGRPRDKGVPVYGQDPWPGLSRASFLLSPACLACLTKEPSFHETEVWGGGYSCLSASSLAPALPSLPSISRPPQGFLCRCPGRVYPSQHLTTVPQSLHQEMKTVCTAAGVTLPDASGCGIAFLGPPWGHLWPPVTPRPRVPGHPGRSSLGPLRPASLPGGDCVGSGVGISRDGLRVSSLCTHIGGWGAGRERQGRENGISRGGLSFELSQRERPCPAPFLERCLPSRLEACGVWVRWGRTMEEKPSKVSLKSSDRQGSDEESVHSDTRDLWTTTTLSQAQLNMPLSEVCEGFDEEGRNISKTRGWHSPGRGSLDEGYKASHKPEELDEHALVELELHRGSSMEINLGEKDTASQIEAEKSSSMSSLNIAKHMPHRAYWAEQQSRLPLPLMELMENEALEILTKALRSYQLGIGRDHFLTKELQRYIEGLKKRRSKRLYVN

SEQ ID NO: 755610 - protein, 888 aa, Homo sapiens
LPPPRPSRHRRGRAGTRASAAAAAGPTEVADALGGGADPETNSTSNSSHSAWDLGSAFFFSGTIITTIGGGGDWHVGGGKELPHGGRCRETEGSQVAPRLPASPLCPGYGNVALRTDAGRLFCIFYALVGIPLFGILLAGVGDRLGSSLRHGIGHIEAIFLVSCSMPCLPLLLGSGYPSPCPWHMSAPPKTISLSHRLPGGGSGEYGSGDCWCLLGRAYCPIPQKWHVPPELVRVLSAMLFLLIGCLLFVLTPTFVFCYMEDWSKLEAIYFVIVTLTTVGFGDYVAGADPRQDSPAYQPLVWFWILLGLAYFASVLTTIGNWLRVVSRRTRAEMGGLTAQAASWTGTVTARVTQRAGPAAPPPEKEQPLLPPPPCPAQPLGRPRSPSPPEKAQPPSPPTASALDYPSENLAFIDESSDTQSERGCPLPRAPRGRRRPNPPRKPVRPRGPGRPRDKGVPVYGQDPWPGLSRASFLLSPACLACLTKEPSFHETEVWGGGYSCLSASSLAPALPSLPSISRPPQGFLCRCPGRVYPSQHLTTVPQSLHQEMKTVCTAAGVTLPDASGCGIAFLGPPWGHLWPPVTPRPRVPGHPGRSSLGPLRPASLPGGDCVGSGVGISRDGLRVSSLCTHIGGWGAGRERQGRENGISRGGLSFELSQRERPCPAPFLERCLPSRLEACGVWVRWGRTMEEKPSKVSLKSSDRQGSDEESVHSDTRDLWTTTTLSQAQLNMPLSEVCEGFDEEGRNISKTRGWHSPGRGSLDEGYKASHKPEELDEHALVELELHRGSSMEINLGEKDTASQIEAEKSSSMSSLNIAKHMPHRAYWAEQQSRLPLPLMELMENEALEILTKALRSYQLGIGRDHFLTKELQRYIEGLKKRRSKRLYVN

SEQ ID NO: 755611 - protein, 1107 aa, Homo sapiens
HGSENQKLGQGAPWRDSRGAGRGPKPGVGAGGAPAATPPEVGPNLHVGQFQVAPPGFPHPFVPRSPSLMSAEPKGQAVPRGGELRALPDPVMGLGDARLAWCLSGETGQLMPRSGPCRWPHWAPVQGKKAGPCCNPSPAPLPPTSRGWPAVGSQAAAVTTAPQEPPARPLQAGSGAGPAPGRAMRSTTLLALLALVLLYLVSGALVFRALEQPHEQQAQRELGEVREKFLRAHPCVSDQELGLLIKEVADALGGGADPETNSTSNSSHSAWDLGSAFFFSGTIITTIGGGGDWHVGGGKELPHGGRCRETEGSQVAPRLPASPLCPGYGNVALRTDAGRLFCIFYALVGIPLFGILLAGVGDRLGSSLRHGIGHIEAIFLVSCSMPCLPLLLGSGYPSPCPWHMSAPPKTISLSHRLPGGGSGEYGSGDCWCLLGRAYCPIPQKWHVPPELVRVLSAMLFLLIGCLLFVLTPTFVFCYMEDWSKLEAIYFVIVTLTTVGFGDYVAGADPRQDSPAYQPLVWFWILLGLAYFASVLTTIGNWLRVVSRRTRAEMGGLTAQAASWTGTVTARVTQRAGPAAPPPEKEQPLLPPPPCPAQPLGRPRSPSPPEKAQPPSPPTASALDYPSENLAFIDESSDTQSERGCPLPRAPRGRRRPNPPRKPVRPRGPGRPRDKGVPVYGQDPWPGLSRASFLLSPACLACLTKEPSFHETEVWGGGYSCLSASSLAPALPSLPSISRPPQGFLCRCPGRVYPSQHLTTVPQSLHQYMKTVCTAAGVTLPDASGCGIAFLGPPWGHLWPPVTPRPRVPGHPGRSSLGPLRPASLPGGDCVGSGVGISRDGLRVSSLCTHIGGWGAGRERQGRENGISRGGLSFELSQRERPCPAPFLERCLPSRLEACGVWVRWGRTMEEKPSKVSLKSSDRQGSDEESVHSDTRDLWTTTTLSQAQLNMPLSEVCEGFDEEGRNISKTRGWHSPGRGSLDEGYKASHKPEELDEHALVELELHRGSSMEINLGEKDTASQIEAEKSSSMSSLNIAKHMPHRAYWAEQQSRLPLPLMELMENEALEILTKALRSYQLGIGRDHFLTKELQRYIEGLKKRRSKRLYVN

SEQ ID NO: 755612 - protein, 263 aa, Homo sapiens
RPLTLSAPTHPWSDSGPWRYFLLSLGCPQPPPNPTFYGIPNPARLSSPARSSFPLQPSATLGSLLVCGPQVSLKSSDRQGSDEESVHSDTRDLWTTTTLSQAQLNMPLSEVCEGFDEEGRNISKTRGWHSPGRGSLDEGYKASHKPEELDEHALVELELHRGSSMEINLGEKDTASQIEAEKSSSMSSLNIAKHMPHRAYWAEQQSRLPLPLMELMENEALEILTKALRSYQLGIGRDHFLTKELQRYIEGLKKRRSKRLYVN

SEQ ID NO: 755613 - protein, 393 aa, Homo sapiens; identical to SEQ ID NO: 755607

SEQ ID NO: 755614 - protein, 159 aa, Homo sapiens
LSPSSPAAPALCSASEETMARPLCTLLLLMATLAGALASSSKEENRIIPGGIYDADLNDEWVQRALHFAISEYNKATKDDYYRRPLRVLRARQQTVGGVNYFFDVEVGRTICTKSQPNLDTCAFHEQPELQKKQLCSFEIYEVPWENRRSLVKSRCQES

SEQ ID NO: 755615 - protein, 159 aa, Homo sapiens; identical to SEQ ID NO: 755614

SEQ ID NO: 755616 - protein, 159 aa, Homo sapiens; identical to SEQ ID NO: 755614

SEQ ID NO: 755617 - protein, 52 aa, Homo sapiens
LPCYLQYDYSVLKIIASYKHTTSIFDDFSHYEKRQEEEESVKKVTHFFLLRF

SEQ ID NO: 755618 - protein, 579 aa, Homo sapiens
MSASSLLEQRPKGQGNKVQNGSVHQKDGLNDDDFEPYLSPQARPNNAYTAMSDSYLPSYYSPSIGFSYSLGEAAWSTGGDTAMPYLTSYGQLSNGEPHFLPDAMFGQPGALGSTPFLGQHGFNFFPSGIDFSAWGNNSSQGQSTQSSGYSSNYAYAPSSLGGAMIDGQSAFANETLNKAPGMNTIDQGMAALKLGSTEVASNVPKVVGSAVGSGSITSNIVASNSLPPATIAPPKPASWADIASKPAKQQPKLKTKNGIAGSSLPPPPIKHNMDIGTWDNKGPVAKAPSQALVQNIGQPTQGSPQPVGQQANNSPPVAQASVGQQTQPLPPPPPQPAQLSVQQQAAQPTRWVAPRNRGSGFGHNGVDGNGVGQSQAGSGSTPSEPHPVLEKLRSINNYNPKDFDWNLKHGRVFIIKSYSEDDIHRSIKYNIWCSTEHGNKRLDAAYRSMNGKGPVYLLFSVNGSGHFCGVAEMKSAVDYNTCAGVWSQDKWKGRFDVRWIFVKDVPNSQLRHIRLENNENKPVTNSRDTQEVPLEKAKQVLKIIASYKHTTSIFDDFSHYEKRQEEEESVKKERQGRGK

SEQ ID NO: 755619 - protein, 579 aa, Homo sapiens; identical to SEQ ID NO: 755618

SEQ ID NO: 755620 - protein, 579 aa, Homo sapiens; identical to SEQ ID NO: 755618

SEQ ID NO: 755621 - protein, 529 aa, Homo sapiens
MSDSYLPSYYSPSIGFSYSLGEAAWSTGGDTAMPYLTSYGQLSNGEPHFLPDAMFGQPGALGSTPFLGQHGFNFFPSGIDFSAWGNNSSQGQSTQSSGYSSNYAYAPSSLGGAMIDGQSAFANETLNKAPGMNTIDQGMAALKLGSTEVASNVPKVVGSAVGSGSITSNIVASNSLPPATIAPPKPASWADIASKPAKQQPKLKTKNGIAGSSLPPPPIKHNMDIGTWDNKGPVAKAPSQALVQNIGQPTQGSPQPVGQQANNSPPVAQASVGQQTQPLPPPPPQPAQLSVQQQAAQPTRWVAPRNRGSGFGHNGVDGNGVGQSQAGSGSTPSEPHPVLEKLRSINNYNPKDFDWNLKHGRVFIIKSYSEDDIHRSIKYNIWCSTEHGNKRLDAAYRSMNGKGPVYLLFSVNGSGHFCGVAEMKSAVDYNTCAGVWSQDKWKGRFDVRWIFVKDVPNSQLRHIRLENNENKPVTNSRDTQEVPLEKAKQVLKIIASYKHTTSIFDDFSHYEKRQEEEESVKKERQGRGK

SEQ ID NO: 755622 - protein, 529 aa, Homo sapiens; identical to SEQ ID NO: 755621

SEQ ID NO: 755623 - protein, 529 aa, Homo sapiens; identical to SEQ ID NO: 755621

SEQ ID NO: 755624 - protein, 265 aa, Homo sapiens
MPVAQASVGQQTQPLPPPPPQPAQLSVQQQAAQPTRWVAPRNRGSGFGHNGVDGNGVGQSQAGSGSTPSEPHPVLEKLRSINNYNPKDFDWNLKHGRVFIIKSYSEDDIHRSIKYNIWCSTEHGNKRLDAAYRSMNGKGPVYLLFSVNGSGHFCGVAEMKSAVDYNTCAGVWSQDKWKGRFDVRWIFVKDVPNSQLRHIRLENNENKPVTNSRDTQEVPLEKAKQVLKIIASYKHTTSIFDDFSHYEKRQEEEESVKKERQGRGK

SEQ ID NO: 755625 - protein, 388 aa, Homo sapiens
MSASSLLEQRPKGQGNKVQNGSVHQKDGLNDDDFEPYLSPQARPNNAYTAMSDSYLPSYYSPSIGFSYSLGEAAWSTGGDTAMPYLTSYGQLSNGEPHFLPDAMFGQPGALGSTPFLGQHGFNFFPSGIDFSAWGNNSSQGQSTQSSGYSSNYAYAPSSLGGAMIDGQSAFANETLNKAPGMNTIDQGMAALKLGSTEVASNVPKVVGSAVGSGSITSNIVASNSLPPATIAPPKPASWADIASKPAKQQPKLKTKNGIAGSSLPPPPIKHNMDIGTWDNKGPVAKAPSQALVQNIGQPTQGSPQPVGQQANNSPPVAQASVGQQTQPLPPPPPQPAQLSVQQQAAQPTRWVAPRNRGSGFGHNGVADLYSDKACEGLCTGERYELII

SEQ ID NO: 755626 - protein, 579 aa, Homo sapiens; identical to SEQ ID NO: 755618

SEQ ID NO: 755627 - protein, 579 aa, Homo sapiens; identical to SEQ ID NO: 755618

SEQ ID NO: 755628 - protein, 579 aa, Homo sapiens; identical to SEQ ID NO: 755618

SEQ ID NO: 755629 - protein, 481 aa, Homo sapiens
MSASSLLEQRPKGQGNKVQNGSVHQKDGLNDDDFEPYLSPQARPNNAYTAMSDSYLPSYYSPSIGFSYSLGEAAWSTGGDTAMPYLTSYGQLSNGEPHFLPDAMFGQPGALGSTPFLGQHGFNFFPSGIDFSAWGNNSSQGQSTQSSGYSSNYAYAPSSLGGAMIDGQSAFANETLNKAPGMNTIDQGMAALKLGSTEVASNVPKVVGSAVGSGSITSNIVASNSLPPATIAPPKPASWADIASKPAKQQPKLKTKNGIAGSSLPPPPIKHNMDIGTWDNKGPVAKAPSQALVQNIGQPTQGSPQPVGQQANNSPPVAQASVGQQTQPLPPPPPQPAQLSVQQQAAQPTRWVAPRNRGSGFGHNGVDGNGVGQSQAGSGSTPSEPHPVLEKLRSINNYNPKDFDWNLKHGRVFIIKSYSEDDIHRSIKYNIWCSTEHGNKRLDAAYRSMNGKGPVYLLLPLGVSHSVRSHQKWKWCACSWL

SEQ ID NO: 755630 - protein, 87 aa, Homo sapiens
HIRLENNENKPVTNSRRMCRIGYGNNENKPVTNSRDTQEVPLEKAKQVLKIIASYKHTTSIFDDFSHYEKRQEEEESVKKERQGRGK

SEQ ID NO: 755631 - protein, 199 aa, Homo sapiens
PLRVQASAEVINTLADHRHRGTDFGGSPWLLIITVFLRSYKFAISLCTSYLCVSFLKTIFPSQNGHDGSTDVQQRARRSNCRRQEGIKIVLEDIFTLWRQVETKVRAKIRKMKVTTKVNRHDKINGKRKTAKEHLRKLSMKEREHGEKERQVSEAEENGKLDMKEIHTYMLECHDVILGHCKLCLPGSKPGFTVLARMV

SEQ ID NO: 755632 - protein, 107 aa, Homo sapiens
MKVTTKVNRHDKINGKRKTAKEHLRKLSMKEREHGEKERQVSEAEENGKLDMKEIHTYMEMFQRAQALRRRAEDYYRCKITPSGKKASLQPGQNGGSGSIRHSSGLA

SEQ ID NO: 755633 - protein, 369 aa, Homo sapiens
LNPLSVDTVAVGLVSSVVVYPVYLAILFLFRMSRSKVAGSPSPTPAGQQVLDVDSCLDSSVLDSSFLTFSGLHAEVEGSTGGPAALAQLGLKTLCTSQQAFAGQMKSDLFLDDSKRLMDGWLHGCDGDGLLSGTFRILLMFCCLGYEWLSGGCKTWHSAWVINTLADHRHRGTDFGGSPWLLIITVFLRSYKFAISLCTSYLCVSFLKTIFPSQNGHDGSTDVQQRARRSNCRRQEGIKIVLEDIFTLWRQVETKVRAKIRKMKVTTKVNRHDKINGKRKTAKEHLRKLSMKEREHGEKERQVSEAEENGKLDMKEIHTYMEMFQRAQALRRRAEDYYRCKITPSGKKASLQPGQNGGSGSIRHSSGLA

SEQ ID NO: 755634 - protein, 354 aa, Homo sapiens
LNPLSVDTVAVGLVSSVVVYPVYLAILFLFRMSRSKVAGSPSPTPAGQQVLDVDSCLDSSVLDSSFLTFSGLHAEVEGSTGGPAALAQLGLKTLCTSQQAFAGQMKSDLFLDDSKRVTLRNPGSSGRKEHPEAGTGSWLGRTRNQVINTLADHRHRGTDFGGSPWLLIITVFLRSYKFAISLCTSYLCVSFLKTIFPSQNGHDGSTDVQQRARRSNCRRQEGIKIVLEDIFTLWRQVETKVRAKIRKMKVTTKVNRHDKINGKRKTAKEHLRKLSMKEREHGEKERQVSEAEENGKLDMKEIHTYMEMFQRAQALRRRAEDYYRCKITPSGKKASLQPGQNGGSGSIRHSSGLA

SEQ ID NO: 755635 - protein, 1133 aa, Homo sapiens
AAGPKPGSASATSSRGPQGTAQGCQPPGPVICLQGNWGVRKLGTHINMANLLKTVVTGCSCPLLSNLGSCKGLRVKKDFLRTFYTHQELWCKAPVKPGIPYKQLTVGVPKEIFQNEKRVALSPAGVQNLVKQGFNVVVESGAGEASKFSDDHYRVAGAQIQGAKEVLASDLVVKVRAPMVNPTLGVHEADLLKTSGTLISFIYPAQNPELLNKLSQRKTTVLAMDQVPRVTIAQGYDALSSMANIAGYKAVVLAANHFGRFFTGQITAAGKVPPAKILIVGGGVAGLASAGAAKSMGAIVRGFDTRAAALEQFKSLGAEPLEVDLKESGEGQGGYAKEMSKEFIEAEMKLFAQQCKEVDILISTALIPGKKAPVLFNKEMIESMKEGSVVVDLAAEAGGNFETTKPGELYIHKGITHIGYTDLPSRMATQASTLYSNNITKLLKAISPDKDNFYFDVKDDFDFGTMGHVIRGTVVMKDGKVIFPAPTPKNIPQGAPVKQKTVAELEAEKAATITPFRKTMSTASAYTAGLTGILGLGIAAPNLAFSQMVTTFGLAGIVGYHTVWGVTPALHSPLMSVTNAISGLTAVGGLALMGGHLYPSTTSQGLAALAAFISSVNIAGGFLVTQRMLDMFKRPTDPPEYNYLYLLPAGTFVGGYLAALYSGYNIEQIMYLGSGLCCVGALAGLSTQGTARLGNALGMIGVAGGLAATLGVLKPGPELLAQMSGAMALGGTIGLTIAKRIQISDLPQLVAAFHSLVGLAAVLTCIAEYIIEYPHFATDAAANLTKIVAYLGTYIGGVTFSGSLIAYGKLQGLLKSAPLLLPGRHLLNAGLLAASVGGIIPFMVDPSFTTGITCLGSVSALSAVMGVTLTAAIGGADMPVVITVLNSYSGWALCAEGFLLNNNLLTIVGALIGSSGAILSYIMCVAMNRSLANVILGGYGTTSTAGGKPMEISGTHTEINLDNAIDMIREANSIIITPGYGLCAAKAQYPIADLVKMLTEQGKKVRFGIHPVAGRMPGQLNVLLAEAGVPYDIVLEMDEINHDFPDTDLVLVIGANDTVNSAAQEDPNSIIAGMPVLEVWKSKQVIVMKRSLGVGYAAVDNPIFYKPNTAMLLGDAKKTCDALQAKVRESYQK

SEQ ID NO: 755636 - protein, 1086 aa, Homo sapiens
MANLLKTVVTGCSCPLLSNLGSCKGLRVKKDFLRTFYTHQELWCKAPVKPGIPYKQLTVGVPKEIFQNEKRVALSPAGVQNLVKQGFNVVVESGAGEASKFSDDHYRVAGAQIQGAKEVLASDLVVKVRAPMVNPTLGVHEADLLKTSGTLISFIYPAQNPELLNKLSQRKTTVLAMDQVPRVTIAQGYDALSSMANIAGYKAVVLAANHFGRFFTGQITAAGKVPPAKILIVGGGVAGLASAGAAKSMGAIVRGFDTRAAALEQFKSLGAEPLEVDLKESGEGQGGYAKEMSKEFIEAEMKLFAQQCKEVDILISTALIPGKKAPVLFNKEMIESMKEGSVVVDLAAEAGGNFETTKPGELYIHKGITHIGYTDLPSRMATQASTLYSNNITKLLKAISPDKDNFYFDVKDDFDFGTMGHVIRGTVVMKDGKVIFPAPTPKNIPQGAPVKQKTVAELEAEKAATITPFRKTMSTASAYTAGLTGILGLGIAAPNLAFSQMVTTFGLAGIVGYHTVWGVTPALHSPLMSVTNAISGLTAVGGLALMGGHLYPSTTSQGLAALAAFISSVNIAGGFLVTQRMLDMFKRPTDPPEYNYLYLLPAGTFVGGYLAALYSGYNIEQIMYLGSGLCCVGALAGLSTQGTARLGNALGMIGVAGGLAATLGVLKPGPELLAQMSGAMALGGTIGLTIAKRIQISDLPQLVAAFHSLVGLAAVLTCIAEYIIEYPHFATDAAANLTKIVAYLGTYIGGVTFSGSLIAYGKLQGLLKSAPLLLPGRHLLNAGLLAASVGGIIPFMVDPSFTTGITCLGSVSALSAVMGVTLTAAIGGADMPVVITVLNSYSGWALCAEGFLLNNNLLTIVGALIGSSGAILSYIMCVAMNRSLANVILGGYGTTSTAGGKPMEISGTHTEINLDNAIDMIREANSIIITPGYGLCAAKAQYPIADLVKMLTEQGKKVRFGIHPVAGRMPGQLNVLLAEAGVPYDIVLEMDEINHDFPDTDLVLVIGANDTVNSAAQEDPNSIIAGMPVLEVWKSKQVIVMKRSLGVGYAAVDNPIFYKPNTAMLLGDAKKTCDALQAKVRESYQK

SEQ ID NO: 755637 - protein, 1086 aa, Homo sapiens; identical to SEQ ID NO: 755636

SEQ ID NO: 755638 - protein, 1086 aa, Homo sapiens; identical to SEQ ID NO: 755636

SEQ ID NO: 755639 - protein, 1086 aa, Homo sapiens; identical to SEQ ID NO: 755636

SEQ ID NO: 755640 - protein, 1086 aa, Homo sapiens; identical to SEQ ID NO: 755636

SEQ ID NO: 755641 - protein, 1086 aa, Homo sapiens; identical to SEQ ID NO: 755636

SEQ ID NO: 755642 - protein, 464 aa, Homo sapiens [sequence omitted]

SEQ ID NO: 755643 - protein, 712 aa, Homo sapiens
MGAIVRGFDTRAAALEQFKSLGAEPLEVDLKESGEGQGGYAKEMSKEFIEAEMKLFAQQCKEVDILISTALIPGKKAPVLFNKEMIESMKEGSVVVDLAAEAGGNFETTKPGELYIHKGITHIGYTDLPSRMATQASTLYSNNITKLLKAISPDKDNFYFDVKDDFDFGTMGHVIRGTVVMKDGKVIFPAPTPKNIPQGAPVKQKTVAELEAEKAATITPFRKTMSTASAYTAGLTGILGLGIAAPNLAFSQMVTTFGLAGIVGYHTVWGVTPALHSPLMSVTNAISGLTAVGGLALMGGHLYPSTTSQGLAALAAFISSVNIAGGFLVTQRMLDMFKRPTDPPEYNYLYLLPAGTFVGGYLAALYSGYNIEQIMYLGSGLCCVGALAGLSTQGTARLGNALGMIGVAGGLAATLGVLKPGPELLAQMSGAMALGGTIGLTIAKRIQISDLPQLVAAFHSLVGLAAVLTCIAEYIIEYPHFATDAAANLTKIVAYLGTYIGGVTFSGSLIAYGKLQGLLKSAPLLLPGRHLLNAGLLAASVGGIIPFMVDPSFTTGITCLGSVSALSAVMGVTLTAAIGGADMPVVITVLNSYSGWALCAEGFLLNNNLLTIVGALIGSSGAILSYIMCVAMNRSLANVILGGYGTTSTAGGKPMEISGTHTEINLDNAIDMIREANSIIITPGYGLCAAKAQYPIADLVKMLTEQGKKVRY

SEQ ID NO: 755644 - protein, 438 aa, Homo sapiens
MGAIVRGFDTRAAALEQFKSLGAEPLEVDLKESGEGQGGYAKEMSKEFIEAEMKLFAQQCKEVDILISTALIPGKKAPVLFNKEMIESMKEGSVVVDLAAEAGGNFETTKPGELYIHKGITHIGYTDLPSRMATQASTLYSNNITKLLKAISPDKDNFYFDVKDDFDFGTMGHVIRGTVVMKDGKVIFPAPTPKNIPQGAPVKQKTVAELEAEKAATITPFRKTMSTASAYTAGLTGILGLGIAAPNLAFSQMVTTFGLAGIVGYHTVWGVTPALHSPLMSVTNAISGLTAVGGLALMGGHLYPSTTSQGLAALAAFISSVNIAGGFLVTQRMLDMFKRPTDPPEYNYLYLLPAGTFVGGYLAALYSGYNIEQIMYLGSGLCCVGALAGLSTQGTARLGNALGMIGVAGGLAATLGVLLVSTCGLLPSCELQFLNIYF

SEQ ID NO: 755645 - protein, 1086 aa, Homo sapiens; identical to SEQ ID NO: 755636

SEQ ID NO: 755646 - protein, 838 aa, Homo sapiens [sequence omitted]

SEQ ID NO: 755647 - protein, 955 aa, Homo sapiens
MVNPTLGVHEADLLKTSGTLISFIYPAQNPELLNKLSQRKTTVLAMDQVPRVTIAQGYDALSSMANIAGYKAVVLAANHFGRFFTGQITAAGKVPPAKILIVGGGVAGLASAGAAKSMGAIVRGFDTRAAALEQFKSLGAEPLEVDLKESGEGQGGYAKEMSKEFIEAEMKLFAQQCKEVDILISTALIPGKKAPVLFNKEMIESMKEGSVVVDLAAEAGGNFETTKPGELYIHKGITHIGYTDLPSRMATQASTLYSNNITKLLKAISPDKDNFYFDVKDDFDFGTMGHVIRGTVVMKDGKVIFPAPTPKNIPQGAPVKQKTVAELEAEKAATITPFRKTMSTASAYTAGLTGILGLGIAAPNLAFSQMVTTFGLAGIVGYHTVWGVTPALHSPLMSVTNAISGLTAVGGLALMGGHLYPSTTSQGLAALAAFISSVNIAGGFLVTQRMLDMFKRPTDPPEYNYLYLLPAGTFVGGYLAALYSGYNIEQIMYLGSGLCCVGALAGLSTQGTARLGNALGMIGVAGGLAATLGVLKPGPELLAQMSGAMALGGTIGLTIAKRIQISDLPQLVAAFHSLVGLAAVLTCIAEYIIEYPHFATDAAANLTKIVAYLGTYIGGVTFSGSLIAYGKLQGLLKSAPLLLPGRHLLNAGLLAASVGGIIPFMVDPSFTTGITCLGSVSALSAVMGVTLTAAIGGADMPVVITVLNSYSGWALCAEGFLLNNNLLTIVGALIGSSGAILSYIMCVAMNRSLANVILGGYGTTSTAGGKPMEISGTHTEINLDNAIDMIREANSIIITPGYGLCAAKAQYPIADLVKMLTEQGKKVRFGIHPVAGRMPGQLNVLLAEAGVPYDIVLEMDEINHDFPDTDLVLVIGANDTVNSAAQEDPNSIIAGMPVLEVWKSKQVIVMKRSLGVGYAAVDNPIFYKPNTAMLLGDAKKTCDALQAKVRESYQK

SEQ ID NO: 755648 - protein, 440 aa, Homo sapiens
MGAIVRGFDTRAAALEQFKSLGAEPLEVDLKESGEGQGGYAKEMSKEFIEAEMKLFAQQCKEVDILISTALIPGKKAPVLFNKEMIESMKEGSVVVDLAAEAGGNFETTKPGELYIHKGITHIGYTDLPSRMATQASTLYSNNITKLLKAISPDKDNFYFDVKDDFDFGTMGHVIRGTVVMKDGKVIFPAPTPKNIPQGAPVKQKTVAELEAEKAATITPFRKTMSTASAYTAGLTGILGLGIAAPNLAFSQMVTTFGLAGIVGYHTVWGVTPALHSPLMSVTNAISGLTAVGGLALMGGHLYPSTTSQGLAALAAFISSVNIAGGFLVTQRMLDMFKRPTDPPEYNYLYLLPAGTFVGGYLAALYSGYNIEQIMYLGSGLCCVGALAGLSTQGTARLGNALGMIGVAGGLAATLGVLKPGPELLAQMSGAMALGGTIDW

SEQ ID NO: 755649 - protein, 357 aa, Homo sapiens
MAAAAKPNNLSLVVHGPGDLRLENYPIPEPGPNEVLLRMHSVGICGSDVHYWEYGRIGNFIVKKPMVLGHEASGTVEKVGSSVKHLKPGDRVAIEPGAPRENDEFCKMGRYNLSPSIFFCATPPDDGNLCRFYKHNAAFCYKLPDNVTFEEGALIEPLSVGIHACRRGGVTLGHKVLVCGAGPIGMVTLLVAKAMGAAQVVVTDLSATRLSKAKEIGADLVLQISKESPQEIARKVEGQLGCKPEVTIECTGAEASIQAGIYATRSGGTLVLVGLGSEMTTVPLLHAAIREVDIKGVFRYCNTWPVAISMLASKSVNVKPLVTHRFPLEKALEAFETFKKGLGLKIMLKCDPSDQNP

SEQ ID NO: 755650 - protein, 357 aa, Homo sapiens; identical to SEQ ID NO: 755649

SEQ ID NO: 755651 - protein, 357 aa, Homo sapiens; identical to SEQ ID NO: 755649

SEQ ID NO: 755652 - protein, 336 aa, Homo sapiens
MENYPIPEPGPNEVLLRMHSVGICGSDVHYWEYGRIGNFIVKKPMVLGHEASGTVEKVGSSVKHLKPGDRVAIEPGAPRENDEFCKMGRYNLSPSIFFCATPPDDGNLCRFYKHNAAFCYKLPDNVTFEEGALIEPLSVGIHACRRGGVTLGHKVLVCGAGPIGMVTLLVAKAMGAAQVVVTDLSATRLSKAKEIGADLVLQISKESPQEIARKVEGQLGCKPEVTIECTGAEASIQAGIYATRSGGTLVLVGLGSEMTTVPLLHAAIREVDIKGVFRYCNTWPVAISMLASKSVNVKPLVTHRFPLEKALEAFETFKKGLGLKIMLKCDPSDQNP

SEQ ID NO: 755653 - protein, 357 aa, Homo sapiens; identical to SEQ ID NO: 755649

SEQ ID NO: 755654 - protein, 257 aa, Homo sapiens
LIINDLCVIVISYNLSNFFCATPPDDGNLCRFYKHNAAFCYKLPDNVTFEEGALIEPLSVGIHACRRGGVTLGHKVLVCGAGPIGMVTLLVAKAMGAAQVVVTDLSATRLSKAKEIGADLVLQISKESPQEIARKVEGQLGCKPEVTIECTGAEASIQAGIYATRSGGTLVLVGLGSEMTTVPLLHAAIREVDIKGVFRYCNTWPVAISMLASKSVNVKPLVTHRFPLEKALEAFETFKKGLGLKIMLKCDPSDQNP

SEQ ID NO: 755655 - protein, 357 aa, Homo sapiens; identical to SEQ ID NO: 755649

SEQ ID NO: 755656 - protein, 339 aa, Homo sapiens
MAAAAKPNNLSLVVHGPGDLRLENYPIPEPGPNEVLLRMHSVGICGSDVHYWEYGRIGNFIVKKPMVLGHEASGTVEKVGSSVKHLKPGDRVAIEPGAPRVCATPPDDGNLCRFYKHNAAFCYKLPDNVTFEEGALIEPLSVGIHACRRGGVTLGHKVLVCGAGPIGMVTLLVAKAMGAAQVVVTDLSATRLSKAKEIGADLVLQISKESPQEIARKVEGQLGCKPEVTIECTGAEASIQAGIYATRSGGTLVLVGLGSEMTTVPLLHAAIREVDIKGVFRYCNTWPVAISMLASKSVNVKPLVTHRFPLEKALEAFETFKKGLGLKIMLKCDPSDQNP

SEQ ID NO: 755657 - protein, 221 aa, Homo sapiens
MAAAAKPNNLSLVVHGPGDLRLENYPIPEPGPNEVLLRMHSVGICGSDVHYWEYGRIGNFIVKKPMVLGHEASGTVEKVGSSVKHLKPGDRVAIEPGAPRVCATPPDDGNLCRFYKHNAAFCYKLPDNVTFEEGALIEPLSVGIHACRRGGVTLGHKVLVCGAGPIGMVTLLVAKAMGAAQVVVTDCLLPVGPRPGYWGCFSPSEFPGKALRKLRRKVDWH

SEQ ID NO: 755658 - protein, 78 aa, Homo sapiens
DWAVPAPETMPFPVTTQGSQQTQPPQKHYGITSPISLAAPKETDCVLTQKLIETLKPFGVFEEEEKLQLQDFNFGKTK

SEQ ID NO: 755659 - protein, 142 aa, Homo sapiens
MSSAPIRTSSGISGVRSAASFFGSRRRGVVPGRCLGYRCSRRTWLGLPYESAQLDGECTAGEGGTRRPRAEFGTRPLSMNWNTSRQVQLHDSLFRETLPTGIPIVYELDKNLKPIKPMQFLGDEETVRKAMEAVAAQGKAKK

SEQ ID NO: 755660 - protein, 264 aa, Homo sapiens
QSVPHPQPAAMAAYKLVLIRHGESAWNLENRFSGWYDADLSPAGHEEAKRGGQALRDAGYEFDICFTSVQKRAIRTLWTVLDAIDQMWLPVVRTWRLNERHYGGLTGLNKAETAAKHGEAQVKIWRRSYDVPPPPMEPDHPFYSNISKDRRYADLTEDQLPSCESLKDTIARALPFWNEEIVPQIKEGKRVLIAAHGNSLRGIVKHLEGLSEEAIMELNLPTGIPIVYELDKNLKPIKPMQFLGDEETVRKAMEAVAAQGKAKK

SEQ ID NO: 755661 - protein, 217 aa, Homo sapiens
QSVPHPQPAAMAAYKLVLIRHGESAWNLENRFSGWYDADLSPAGHEEAKRGGQALRDAGYEFDICFTSVQKRAIRTLWTVLDAIDQMWLPVVRTWRLNERHYGGLTGLNKAETAAKHGEAQVKIWRRSYDVPPPPMEPDHPFYSNISKDRRYADLTEDQLPSCESLKDTIARALPFWNEEIVPQIKEGKRVLIAAHGNSSGALSSIWRVSLKRLSWS

SEQ ID NO: 755662 - protein, 60 aa, Homo sapiens
MSLSRVLATVFGVSLPHQDPCFLLLPELSLLVRTEIPLKLLALVTAGFRFRRELSESVLL

SEQ ID NO: 755663 - protein, 326 aa, Homo sapiens
MSRYEAGLLHEYTAGREADDIVNWLKKRTGPAATTLPDGAAAESLVESSEVAVIGFFKNAGSPDICQAASSPGSQQAHRMHTTNFARPTFPNQGARCFLPTTTQTSHPNACAAQVPSFLQRKRFLHVHTAARANPPPFRTSGEADGSDPTRGYRQPGWPLWQPLVARPETSSHANSLRTHPLAPPQVIELPKSRAKEDMTKTPETAVPAWLTQRAGSARAHSSPKILARHRAVTTRGFSHNRNLSARNSAHPVPRNRATFDPSSGPRNGAANNPRSSAPPARQKRAKRPSDLRASPRTRNTHSQYAQTTSMTHHPHTPRTGPHRTH

SEQ ID NO: 755664 - protein, 166 aa, Homo sapiens
LLEDPRSPFHPEELTAERITEFCHRFLEGKIKPHLMSQELPEDWDKQPVKVLVGKNFEDVAFDEKKNVFVEFYAPWCGHCKQLAPIWDKLGETYKDHENIVIAKMDSTANEVEAVKVHSFPTLKFFPASADRTTVHAFPPDGAGAGSGKSSGPHASLGASLEGAWG

SEQ ID NO: 755665 - protein, 109 aa, Homo sapiens
GCCDFPRPGRPGPRGCAPSSNAQSGPSFCPHLMKAGTTLKGTVTKENLLDFIKHNQLPLVIEFTEQTAPKIFGGEIKTHILLFLPKSVSDYDGKLSNFKTAAESFKGKR

SEQ ID NO: 755666 - protein, 180 aa, Homo sapiens
MLRRALLCLAVAALVRADAPEEEDHVLVLRKSNFAEALAAHKYLLVEFYAPWCGHCKALAPEYAKAAGKLKAEGSEIRLAKVDATEESDLAQQYGVRGYPTIKFFRNGDTASPKEYTAGREADDIVNWLKKRTGPAATTLPDGAAAESLVESSEVAVIGFFKDVESDSAKAVFAGSRGHR

SEQ ID NO: 755667 - protein, 180 aa, Homo sapiens; identical to SEQ ID NO: 755666

SEQ ID NO: 755668 - protein, 329 aa, Homo sapiens
MTYHLGSLPTVTCSPNTSSTKMGLSSLRSLMKAGTTLKGTVTKENLLDFIKHNQLPLVIEFTEQTAPKIFGGEIKTHILLFLPKSVSDYDGKLSNFKTAAESFKGKILFIFIDSDHTDNQRILEFFGLKKEECPAVRLITLEEEMTKYKPESEELTAERITEFCHRFLEGKIKPHLMSQELPEDWDKQPVKVLVGKNFEDVAFDEKKNVFVEFYAPWCGHCKQLAPIWDKLGETYKDHENIVIAKMDSTANEVEAVKVHSFPTLKFFPASADRTVIDYNGERTLDGFKKFLESGGQDGAGDDDDLEDLEEAEEPDMEEDDDQKAVKDEL

SEQ ID NO: 755669 - protein, 329 aa, Homo sapiens; identical to SEQ ID NO: 755668

SEQ ID NO: 755670 - protein, 329 aa, Homo sapiens; identical to SEQ ID NO: 755668

SEQ ID NO: 755671 - protein, 329 aa, Homo sapiens; identical to SEQ ID NO: 755668

SEQ ID NO: 755672 - protein, 329 aa, Homo sapiens; identical to SEQ ID NO: 755668

SEQ ID NO: 755673 - protein, 329 aa, Homo sapiens; identical to SEQ ID NO: 755668

SEQ ID NO: 755674 - protein, 309 aa, Homo sapiens
MTYHLGSLPTVTCSPNTSSTKMGLSSLRSLMKAGTTLKGTVTKENLLDFIKHNQLPLVIEFTEQSVSDYDGKLSNFKTAAESFKGKILFIFIDSDHTDNQRILEFFGLKKEECPAVRLITLEEEMTKYKPESEELTAERITEFCHRFLEGKIKPHLMSQELPEDWDKQPVKVLVGKNFEDVAFDEKKNVFVEFYAPWCGHCKQLAPIWDKLGETYKDHENIVIAKMDSTANEVEAVKVHSFPTLKFFPASADRTVIDYNGERTLDGFKKFLESGGQDGAGDDDDLEDLEEAEEPDMEEDDDQKAVKDEL

SEQ ID NO: 755675 - protein, 319 aa, Homo sapiens
DLEDALPGQIDKMGCSLEDLMKAGTTLKGTVTKENLLDFIKHNQLPLVIEFTEQTAPKIFGGEIKTHILLFLPKSVSDYDGKLSNFKTAAESFKGKILFIFIDSDHTDNQRILEFFGLKKEECPAVRLITLEEEMTKYKPESEELTAERITEFCHRFLEGKIKPHLMSQELPEDWDKQPVKVLVGKNFEDVAFDEKKNVFVEFYAPWCGHCKQLAPIWDKLGETYKDHENIVIAKMDSTANEVEAVKVHSFPTLKFFPASADRTVIDYNGERTLDGFKKFLESGGQDGAGDDDDLEDLEEAEEPDMEEDDDQKAVKDEL

SEQ ID NO: 755676 - protein, 371 aa, Homo sapiens
MTYHLGSLPTVTCSPNTSSTKMGLSSLRSLMKAGTTLKGTVTKENLLDFIKHNQLPLVIEFTEQTAPKIFGGEIKTHILLFLPKSVSDYDGKLSNFKTAAESFKGKILFIFIDSDHTDNQRILEFFGLKKEECPAVRLITLEEEMTKYKPESEELTAERITEFCHRFLEGKIKPHLMSQELPEDWDKQPVKVLVGKNFEDVAFDEKKNVFVEFCKCCPFSSPGRAPGHAQGRQTPGEASASGFVSRTHPRTAFFSDAPWCGHCKQLAPIWDKLGETYKDHENIVIAKMDSTANEVEAVKVHSFPTLKFFPASADRTVIDYNGERTLDGFKKFLESGGQDGAGDDDDLEDLEEAEEPDMEEDDDQKAVKDEL

SEQ ID NO: 755677 - protein, 329 aa, Homo sapiens; identical to SEQ ID NO: 755668

SEQ ID NO: 755678 - protein, 252 aa, Homo sapiens
MTYHLGSLPTVTCSPNTSSTKMGLSSLRSLMKAGTTLKGTVTKENLLDFIKHNQLPLVIEFTEQTAPKIFGGEIKTHILLFLPKSVSDYDGKLSNFKTAAESFKGKILFIFIDSDHTDNQRILEFFGLKKEECPAVRLITLEEEMTKYKPESEELTAERITEFCHRFLEGKIKPHLMSQELPEDWDKQPVKVLVGKNFEDVAFDEKKNVFVEFYAPWCGHCKQLAPIWDKLGETYRSRGPGRSRGARHGGRR

SEQ ID NO: 755679 - protein, 329 aa, Homo sapiens; identical to SEQ ID NO: 755668

SEQ ID NO: 755680 - protein, 329 aa, Homo sapiens; identical to SEQ ID NO: 755668

SEQ ID NO: 755681 - protein, 372 aa, Homo sapiens
MTYHLGSLPTVTCSPNTSSTKMGLSSLRSLMKAGTTLKGTVTKENLLDFIKHNQLPLVIEFTEQTAPKIFGGEIKTHILLFLPKSVSDYDGKLSNFKTAAESFKGKILFIFIDSDHTDNQRILEFFGLKKEECPAVRLITLEEEMTKYKPESEELTAERITEFCHRFLEGKIKPHLMSQELPEDWDKQPVKVLVGKNFEDVAFDEKKNVFVEFCKCCPFSSPGRAPGHAQGRQTPGEASASGFVSRTHPRTAFFSDAPWCGHCKQLAPIWDKLGETYKDHENIVIAKMDSTANEVEAVKVHSFPTLKFFPASADRTRVIDYNGERTLDGFKKFLESGGQDGAGDDDDLEDLEEAEEPDMEEDDDQKAVKDEL

SEQ ID NO: 755682 - protein, 343 aa, Homo sapiens
MTYHLGSLPTVTCSPNTSSTKMGLSSLRSLMKAGTTLKGTVTKENLLDFIKHNQLPLVIEFTEQTAPKIFGGEIKTHILLFLPKSVSDYDGKLSNFKTAAESFKGKILFIFIDSDHTDNQRILEFFGLKKEECPAVRLITLEEEMTKYKPESEELTAERITEFCHRFLEGKIKPHLMSQELPEDWDKQPVKVLVGKNFEDVAFDEKKNVFVEFYAPWCGHCKQLAPIWDKLGETYKDHENIVIAKMDSTANEVEAVKVHSFPTLKFFPASADRTVIDYNGERTLDGFKKFLESGGQDGAGDDDDLEDLEEAEEPDMEEACPPCGRDGAGLDMVTQYRLQCRHD

SEQ ID NO: 755683 - protein, 276 aa, Homo sapiens
MTYHLGSLPTVTCSPNTSSTKMGLSSLRSLMKAGTTLKGTVTKENLLDFIKHNQLPLVIEFTEQTAPKIFGGEIKTHILLFLPKSVSDYDGKLSNFKTAAESFKGKILFIFIDSDHTDNQRILEFFGLKKEECPAVRLITLEEEMTKYKPESEELTAERITEFCHRFLEGKIKSPPWWGLFPETMMYFFIHESVQSACYRVRSLAASLPREVSPLFENSVCGIFRHFSTSGYLFHLGQASSEKLVPRVGGTEPDWTWSLSTACSVAMTDHGSCIFG

SEQ ID NO: 755684 - protein, 349 aa, Homo sapiens
MTYHLGSLPTVTCSPNTSSTKMGLSSLRSLMKAGTTLKGTVTKENLLDFIKHNQLPLVIEFTEQTAPKIFGGEIKTHILLFLPKSVSDYDGKLSNFKTAAESFKGKILFIFIDSDHTDNQRILEFFGLKKEECPAVRLITLEEEMTKYKPESEELTAERITEFCHRFLEGKIKPHLMSQELPEDWDKQPVKVLVGKNFEDVAFDEKKNVFVEFYAPWCGHCKQLAPIWDKLGETYKDHENIVIAKMDSTANEVEAVKVHSFPTLKFFPASADRTVIDYNGERTLDGFKKFLESGGQDGAGDDDIPTDLGHNAEEHRLDGITHDPTSGYSEPAIHKATRREQTRGGPTQR

SEQ ID NO: 755685 - protein, 307 aa, Homo sapiens
MTYHLGSLPTVTCSPNTSSTKMGLSSLRSLMKAGTTLKGTVTKENLLDFIKHNQLPLVIEFTEQTAPKIFGGEIKTHILLFLPKSVSDYDGKLSNFKTAAESFKGKILFIFIDSDHTDNQRILEFFGLKKEECPAVRLITLEEEMTKYKPESEELTAERITEFCHRFLEGKIKPHLMSQELPEDWDKQPVKVLVGKNFEDVAFDEKKNVFVEFYAPWCGHCKQLAPIWDKLGETYKDHENIVIAKMDSTANEVEAVKVHSFPTLKFFPASADRTTVHAFPPDGAGAGSGKSSGPHASLGASLEGAWG

SEQ ID NO: 755686 - protein, 289 aa, Homo sapiens
MTYHLGSLPTVTCSPNTSSTKMGLSSLRSLMKAGTTLKGTVTKENLLDFIKHNQLPLVIEFTEQTAPKIFGGEIKTHILLFLPKSVSDYDGKLSNFKTAAESFKGKILFIFIDSDHTDNQRILEFFGLKKEECPAVRLITLEEEMTKYKPESEELTAERITEFCHRFLEGKIKPHLMSQELPEDWDKQPVKVLVGKNFEDVAFDEKKNVFVEFYAPWCGHCKQLAPIWDKLGETYKDHENIVIAKMDSTANEVEAVKVHSFPTLKFFPASADRTTALITTGNARCGKGD

SEQ ID NO: 755687 - protein, 241 aa, Homo sapiens
MTYHLGSLPTVTCSPNTSSTKMGLSSLRSLMKAGTTLKGTVTKENLLDFIKHNQLPLVIEFTEQTAPKIFGGEIKTHILLFLPKSVSDYDGKLSNFKTAAESFKGKILFIFIDSDHTDNQRILEFFGLKKEECPAVRLITLEEEMTKYKPESEELTAERITEFCHRFLEGKIKPHLMSQELPEDWDKQPVKVLVGKNFEDVAFDEKKNVFVEFSLFLFHLQISPCLLLFPVIHLCAVLSSH

SEQ ID NO: 755688 - protein, 180 aa, Homo sapiens; identical to SEQ ID NO: 755666

SEQ ID NO: 755689 - protein, 180 aa, Homo sapiens; identical to SEQ ID NO: 755666

SEQ ID NO: 755690 - protein, 180 aa, Homo sapiens; identical to SEQ ID NO: 755666

SEQ ID NO: 755691 - protein, 180 aa, Homo sapiens; identical to SEQ ID NO: 755666

SEQ ID NO: 755692 - protein, 180 aa, Homo sapiens; identical to SEQ ID NO: 755666

SEQ ID NO: 755693 - protein, 128 aa, Homo sapiens
MLRRALLCLAVAALVRADAPEEEDHVLVLRKSNFAEALAAHKYLLVEFYAPWCGHCKALAPEYAKAAGKLKAEGSEIRLAKVDATEESDLAQQYGVRGYPTIKFFRNGDTASPKEYTGVAVALPLNCL

SEQ ID NO: 755694 - protein, 329 aa, Homo sapiens; identical to SEQ ID NO: 755668

SEQ ID NO: 755695 - protein, 464 aa, Homo sapiens
MLRRALLCLAVAALVRADAPEEEDHVLVLRKSNFAEALAAHKYLLVEFYAPWCGHCKALAPEYAKAAGKLKAEGSEIRLAKVDATEESDLAQQYGVRGYPTIKFFRNGDTASPKEYTGRGVGLCQGSFCRQQRPSMTYHLGSLPTVTCSPNTSSTKMGLSSLRSLMKAGTTLKGTVTKENLLDFIKHNQLPLVIEFTEQTAPKIFGGEIKTHILLFLPKSVSDYDGKLSNFKTAAESFKGKILFIFIDSDHTDNQRILEFFGLKKEECPAVRLITLEEEMTKYKPESEELTAERITEFCHRFLEGKIKPHLMSQELPEDWDKQPVKVLVGKNFEDVAFDEKKNVFVEFYAPWCGHCKQLAPIWDKLGETYKDHENIVIAKMDSTANEVEAVKVHSFPTLKFFPASADRTVIDYNGERTLDGFKKFLESGGQDGAGDDDDLEDLEEAEEPDMEEDDDQKAVKDEL

SEQ ID NO: 755696 - protein, 329 aa, Homo sapiens; identical to SEQ ID NO: 755668

SEQ ID NO: 755697 - protein, 299 aa, Homo sapiens
MKAGTTLKGTVTKENLLDFIKHNQLPLVIEFTEQTAPKIFGGEIKTHILLFLPKSVSDYDGKLSNFKTAAESFKGKILFIFIDSDHTDNQRILEFFGLKKEECPAVRLITLEEEMTKYKPESEELTAERITEFCHRFLEGKIKPHLMSQELPEDWDKQPVKVLVGKNFEDVAFDEKKNVFVEFYAPWCGHCKQLAPIWDKLGETYKDHENIVIAKMDSTANEVEAVKVHSFPTLKFFPASADRTVIDYNGERTLDGFKKFLESGGQDGAGDDDDLEDLEEAEEPDMEEDDDQKAVKDEL

SEQ ID NO: 755698 - protein, 329 aa, Homo sapiens; identical to SEQ ID NO: 755668

SEQ ID NO: 755699 - protein, 329 aa, Homo sapiens; identical to SEQ ID NO: 755668

SEQ ID NO: 755700 - protein, 329 aa, Homo sapiens; identical to SEQ ID NO: 755668

SEQ ID NO: 755701 - protein, 329 aa, Homo sapiens; identical to SEQ ID NO: 755668

SEQ ID NO: 755702 - protein, 329 aa, Homo sapiens; identical to SEQ ID NO: 755668

SEQ ID NO: 755703 - protein, 331 aa, Homo sapiens
MTYHLGSLPTVTCSPNTSSTKMGLSSLRSLMKAGTTLKGTVTKENLLDFIKHNQLPLVIEFTEQTAPKIFGGEIKTHILLFLPKSVSDYDGKLSNFKTAAESFKGKILFIFIDSDHTDNQRILEFFGLKKEECPAVRLITLEEEMTKYKPESEELTAERITEFCHRFLEGKIKPHLMSQELPEDWDKQPVKVLVGKNFEDVAFDEKKNVFVEFYAPWCGHCKQLAPIWDKLGETYKDHENIVIAKMDSTANEVEAVKVHSFPTLKFFPASADRTVIDYNGERTLDGFKKFLESGGQDGAGDDDDLEDLEEAEEPDMEEAGHGHSVPPAVSP

SEQ ID NO: 755704 - protein, 342 aa, Homo sapiens
MTYHLGSLPTVTCSPNTSSTKMGLSSLRSLMKAGTTLKGTVTKENLLDFIKHNQLPLVIEFTEQTAPKIFGGEIKTHILLFLPKSVSDYDGKLSNFKTAAESFKGKILFIFIDSDHTDNQRILEFFGLKKEECPAVRLITLEEEMTKYKPESEELTAERITEFCHRFLEGKIKPHLMSQELPEDWDKQPVKVLVGKNFEDVAFDEKKNVFVEFYAPWCGHCKQLAPIWDKLGETYKDHENIVIAKMDSTANEVEAVKVHSFPTLKFFPASADRTVIDYNGERTLDGFKKFLESGGQDGAGDDDDLEDLEEAEEPDMEEACGLFKAEPRPLTPGWGGGQGCWS

SEQ ID NO: 755705 - protein, 274 aa, Homo sapiens
MTYHLGSLPTVTCSPNTSSTKMGLSSLRSLMKAGTTLKGTVTKENLLDFIKHNQLPLVIEFTEQTAPKIFGGEIKTHILLFLPKSVSDYDGKLSNFKTAAESFKGKILFIFIDSDHTDNQRILEFFGLKKEECPAVRLITLEEEMTKYKPESEELTAERITEFCHRFLEGKIKPHLMSQELPEDWDKQPVKVLVGKNFEDVAFDEKKNVFVEFYAPWCGHCKQLAPIWDKLGETYKDHENIVIAKMDSTANEVEAVKVHSFPTLKFFPASADRT

SEQ ID NO: 755706 - protein, 285 aa, Homo sapiens
MTYHLGSLPTVTCSPNTSSTKMGLSSLRSLMKAGTTLKGTVTKENLLDFIKHNQLPLVIEFTEQTAPKIFGGEIKTHILLFLPKSVSDYDGKLSNFKTAAESFKGKILFIFIDSDHTDNQRILEFFGLKKEECPAVRLITLEEEMTKYKPESEELTAERITEFCHRFLEGKIKPHLMSQELPEDWDKQPVKVLVGKNFEDVAFDEKKNVFVEFYAPWCGHCKQLAPIWDKLGETYKDHENIVIAKMDSTANEVEAVKVHSFPTLKFFPASADRTRMEGATVISRE

SEQ ID NO: 755707 - protein, 180 aa, Homo sapiens; identical to SEQ ID NO: 755666

SEQ ID NO: 755708 - protein, 180 aa, Homo sapiens; identical to SEQ ID NO: 755666

SEQ ID NO: 755709 - protein, 180 aa, Homo sapiens; identical to SEQ ID NO: 755666

SEQ ID NO: 755710 - protein, 180 aa, Homo sapiens; identical to SEQ ID NO: 755666

SEQ ID NO: 755711 - protein, 401 aa, Homo sapiens
MPVQLSEHPEWNESMHSLRISVGGLPVLASMTKAADPRFRPRWKVILTFFVGAAILWLLCSHRPAPGRPPTHNAHNWRLGQAPANWYNDTYPLSPPQRTPAGIRYRIAVIADLDTESRAQEENTWFSYLKKGYLTLSDSGDKVAVEWDKDHGVLESHLAEKGRGMELSDLIVFNGKLYSVDDRTGVVYQIEGSKAVPWVILSDGDGTVEKGFKAEWLAVKDERLYVGGLGKEWTTTTGDVVNENPEWVKVVGYKGSVDHENWVSNYNALRAAAGIQPPGYLIHESACWSDTLQRWFFLPRRASQERYSEKDDERKGANLLLSASPDFGDIAVSHVGAVVPTHGFSSFKFIPNTDDQIIVALKSEEDSGRVASYIMAFTLDGRFLLPETKIGSVKYEGIEFI

SEQ ID NO: 755712 - protein, 401 aa, Homo sapiens; identical to SEQ ID NO: 755711

SEQ ID NO: 755713 - protein, 401 aa, Homo sapiens; identical to SEQ ID NO: 755711

SEQ ID NO: 755714 - protein, 549 aa, Homo sapiens
PSLVAFTPLNASHPKRSAGPTFQRNAVEDGPHVPVRTLAPLQPAASRPLLQRAGAGRKKKTQKNNKKKTQKNTNHSSQQPSRRPRAAAEQRLPGTRAQRRGERARGGSRPPSSVPAVSPAKPSQAQPSPADRGHRSQPRSGSRLSVTLMPVQLSEHPEWNESMHSLRISVGGLPVLASMTKAADPRFRPRWKVILTFFVGAAILWLLCSHRPAPGRPPTHNAHNWRLGQAPANWYNDTYPLSPPQRTPAGIRYRIAVIADLDTESRAQEENTWFSYLKKGYLTLSDSGDKVAVEWDKDHGVLESHLAEKGRGMELSDLIVFNGKLYSVDDRTGVVYQIEGSKAVPWVILSDGDGTVEKGFKAEWLAVKDERLYVGGLGKEWTTTTGDVVNENPEWVKVVGYKGSVDHENWVSNYNALRAAAGIQPPGYLIHESACWSDTLQRWFFLPRRASQERYSEKDDERKGANLLLSASPDFGDIAVSHVGAVVPTHGFSSFKFIPNTDDQIIVALKSEEDSGRVASYIMAFTLDGRFLLPETKIGSVKYEGIEFI

SEQ ID NO: 755715 - protein, 237 aa, Homo sapiens
MELSDLIVFNGKLYSVDDRTGVVYQIEGSKAVPWVILSDGDGTVEKGFKAEWLAVKDERLYVGGLGKEWTTTTGDVVNENPEWVKVVGYKGSVDHENWVSNYNALRAAAGIQPPGYLIHESACWSDTLQRWFFLPRRASQERYSEKDDERKGANLLLSASPDFGDIAVSHVGAVVPTHGFSSFKFIPNTDDQIIVALKSEEDSGRVASYIMAFTLDGRFLLPETKIGSVKYEGIEFI

SEQ ID NO: 755716 - protein, 401 aa, Homo sapiens; identical to SEQ ID NO: 755711

SEQ ID NO: 755717 - protein, 401 aa, Homo sapiens; identical to SEQ ID NO: 755711

SEQ ID NO: 755718 - protein, 78 aa, Homo sapiens
YEKEGVFLFGLDVFGIPMLQEPNPEEVETPLLHICLLQARHCSRSQDTEVETETNKPITVYNTLTSGGDKGQGPRDGG

SEQ ID NO: 755719 - protein, 141 aa, Homo sapiens
PSLVAFTPLNASHPKRSAGPTFQRNAVEDGPHVPVRTLAPLQPAASRPLLQRAGAGRKKKTQKNNKKKTQKNTNHSSQQPSRRPRAAAEQRLPGTRAQRRGERARGGSRPPSSVPAVSPAKPSQAQPSPADRGHRSQPRSG

SEQ ID NO: 755720 - protein, 401 aa, Homo sapiens; identical to SEQ ID NO: 755711

SEQ ID NO: 755721 - protein, 269 aa, Homo sapiens
TREDEPRLGTRLGWWDKDHGVLESHLAEKGRGMELSDLIVFNGKLYSVDDRTGVVYQIEGSKAVPWVILSDGDGTVEKGFKAEWLAVKDERLYVGGLGKEWTTTTGDVVNENPEWVKVVGYKGSVDHENWVSNYNALRAAAGIQPPGYLIHESACWSDTLQRWFFLPRRASQERYSEKDDERKGANLLLSASPDFGDIAVSHVGAVVPTHGFSSFKFIPNTDDQIIVALKSEEDSGRVASYIMAFTLDGRFLLPETKIGSVKYEGIEFI

SEQ ID NO: 755722 - protein, 401 aa, Homo sapiens; identical to SEQ ID NO: 755711

SEQ ID NO: 755723 - protein, 401 aa, Homo sapiens; identical to SEQ ID NO: 755711

SEQ ID NO: 755724 - protein, 401 aa, Homo sapiens; identical to SEQ ID NO: 755711

SEQ ID NO: 755725 - protein, 91 aa, Homo sapiens
PGSWLPDGGKLLGESAGEMPDTALLASDIKDILIFLVFKNYGKYTKDEIYHLKYFYVYDSVALNTLTVLCSHHHHPSPELSSSCNLKLCVR

SEQ ID NO: 755726 - protein, 295 aa, Homo sapiens [sequence omitted]

SEQ ID NO: 755727 - protein, 295 aa, Homo sapiens [sequence omitted]

SEQ ID NO: 755728 - protein, 295 aa, Homo sapiens [sequence omitted]

SEQ ID NO: 755729 - protein, 295 aa, Homo sapiens [sequence omitted]

SEQ ID NO: 755730 - protein, 324 aa, Homo sapiens
DPRAAGIRHPQSATAGEEGTRPGSQELRNMELIQDTSRPPLEYVKGVPLIKYFAEALGPLQSFQARPDDLLISTYPKSGTTWVSQILDMIYQGGDLEKCHRAPIFMRVPFLEFKAPGIPSGMETLKDTPAPRLLKTHLPLALLPQTLLDQKVKVVYVARNAKDVAVSYYHFYHMAKVHPEPGTWDSFLEKFMVGEVSYGSWYQHVQEWWELSRTHPVLYLFYEDMKENPKREIQKILEFVGRSLPEETVDFMVQHTSFKEMKKNPMTNYTTVPQEFMDHSISPFMRKGMAGDWKTTFTVAQNERFDADYAEKMAGCSLSFRSEL

SEQ ID NO: 755731 - protein, 295 aa, Homo sapiens [sequence omitted]

SEQ ID NO: 755732 - protein, 295 aa, Homo sapiens [sequence omitted]

SEQ ID NO: 755733 - protein, 295 aa, Homo sapiens [sequence omitted]

SEQ ID NO: 755734 - protein, 295 aa, Homo sapiens [sequence omitted]

SEQ ID NO: 755735 - protein, 295 aa, Homo sapiens [sequence omitted]

SEQ ID NO: 755736 - protein, 295 aa, Homo sapiens [sequence omitted]

SEQ ID NO: 755737 - protein, 295 aa, Homo sapiens [sequence omitted]

SEQ ID NO: 755738 - protein, 295 aa, Homo sapiens [sequence omitted]

SEQ ID NO: 755739 - protein, 295 aa, Homo sapiens [sequence omitted]

SEQ ID NO: 755740 - protein, 217 aa, Homo sapiens [sequence omitted]

SEQ ID NO: 755741 - protein, 469 aa, Homo sapiens
MELIQDTSRPPLEYVKGVPLIKYFAEALGPLQSFQARPDDLLISTYPKSGTTWVSQILDMIYQGGDLEKCHRAPIFMRVPFLEFKAPGIPSGMETLKDTPAPRLLKTHLPLALLPQTLLDQKVKVVYVARNAKDVAVSYYHFYHMAKVHPEPGTWDSFLEKFMVGEVSYGSWYQHVQEWWELSRTHPVLYLFYEDMKEVDHVRCFPPCDSWGQAPHRDPPRPPSPLPGQPPQQDQIPHPAFLAQASPLRPHLAAGPTQLSSLAPESAAWGATDQKLSPIATPCQRVCHPGPQSQKKTITVLTHRSQAQLMMGSQGRQQFFLPPGLGPWGLRSWLCRVSRRSGQIASEVEKGTPFTFPESVIRASTEGPSAAQNPKREIQKILEFVGRSLPEETVDFMVQHTSFKEMKKNPMTNYTTVPQEFMDHSISPFMRKGMAGDWKTTFTVAQNERFDADYAEKMAGCSLSFRSEL

SEQ ID NO: 755742 - protein, 298 aa, Homo sapiens
DCLPLALMTKNVRLFSVDLRKLEGGSSQAHKIWWRWDHGWWSMPCSRLGCDAIDADYITIEYDGLRDQAGLWLLSRVQLLTWPYRCREISNKSASKPQVPPLPIQEMSWPGTGCVVMVLGLSLLPLQVVYVARNAKDVAVSYYHFYHMAKVHPEPGTWDSFLEKFMVGEVSYGSWYQHVQEWWELSRTHPVLYLFYEDMKENPKREIQKILEFVGRSLPEETVDFMVQHTSFKEMKKNPMTNYTTVPQEFMDHSISPFMRKGMAGDWKTTFTVAQNERFDADYAEKMAGCSLSFRSEL

SEQ ID NO: 755743 - protein, 254 aa, Homo sapiens
MELIQDTSRPPLEYVKGVPLIKYFAEALGPLQSFQARPDDLLISTYPKSGTTWVSQILDMIYQGGDLEKCHRAPIFMRVPFLEFKAPGIPSGMETLKDTPAPRLLKTHLPLALLPQTLLDQKVKVVYVARNAKDVAVSYYHFYHMAKVHPEPGTWDSFLEKFMVGEVSYGSWYQHVQEWWELSRTHPVLYLFYEDMKEGDRGLHGSAHVVQGDEEEPYDQLHHRPPGVHGPQHLPLHEERHGWGLEDHLHRGAE

SEQ ID NO: 755744 - protein, 427 aa, Homo sapiens
MELIQDTSRPPLEYVKGVPLIKYFAEALGPLQSFQARPDDLLISTYPKSGMETLKDTPAPRLLKTHLPLALLPQTLLDQKVKVVYVARNAKDVAVSYYHFYHMAKVHPEPGTWDSFLEKFMVGEVSYGSWYQHVQEWWELSRTHPVLYLFYEDMKEVDHVRCFPPCDSWGQAPHRDPPRPPSPLPGQPPQQDQIPHPAFLAQASPLRPHLAAGPTQLSSLAPESAAWGATDQKLSPIATPCQRVCHPGPQSQKKTITVLTHRSQAQLMMGSQGRQQFFLPPGLGPWGLRSWLCRVSRRSGQIASEVEKGTPFTFPESVIRASTEGPSAAQNPKREIQKILEFVGRSLPEETVDFMVQHTSFKEMKKNPMTNYTTVPQEFMDHSISPFMRKGMAGDWKTTFTVAQNERFDADYAEKMAGCSLSFRSEL

SEQ ID NO: 755745 - protein, 345 aa, Homo sapiens
MELIQDTSRPPLEYVKGVPLIKYFAEALGPLQSFQARPDDLLISTYPKSGTTWVSQILDMIYQGGDLEKCHRAPIFMRVPFLEFKAPGIPSGMETLKDTPAPRLLKTHLPLALLPQTLLDQKVKVVYVARNAKDVAVSYYHFYHMAKVHPEPGTWDSFLEKFMVGEVSYGSWYQHVQEWWELSRTHPVLYLFYEDMKENPKREIQKILEFVGRSLPEETVDFMVQHTRHEYIKQNASDTTAPSPQARRPSSHQLLCDLHSRRGIAGDRKTHISSIDQYIRLQPSIGRTSSTVPKAISGALMVRMESGVPWVEAGGMCELRSPHSHALPLMTYAYRDLTHTLQIRF

SEQ ID NO: 755746 - protein, 225 aa, Homo sapiens
MELIQDTSRPPLEYVKGVPLIKYFAEALGPLQSFQARPDDLLISTYPKSGTTWVSQILDMIYQGGDLEKCHRAPIFMRVPFLEFKAPGIPSGMETLKDTPAPRLLKTHLPLALLPQTLLDQKVKVVYVARNAKDVAVSYYHFYHMAKVHPEPGTWDSFLEKFMVGEVSYGSWYQHVQEWWELSRTHPVLYLFYEDMKENPKREIQKILEFVGRSLPDLGKTNFKQ

SEQ ID NO: 755747 - protein, 141 aa, Homo sapiens
MELIQDTSRPPLEYVKGVPLIKYFAEALGPLQSFQARPDDLLISTYPKSGTTWVSQILDMIYQGGDLEKCHRAPIFMRVPFLEFKAPGIPSGMETLKDTPAPRLLKTHLPLALLPQTLLDQKVKVRQGTVFHIHNPSTLGG

SEQ ID NO: 755748 - protein, 125 aa, Homo sapiens
MELIQDTSRPPLEYVKGVPLIKYFAEALGPLQSFQARPDDLLISTYPKSGTTWVSQILDMIYQGGDLEKCHRAPIFMRVPFLEFKAPGIPSGAVSVSWVQGEWRKTGAGASAHQTFPDPLLGWRL

SEQ ID NO: 755749 - protein, 810 aa, Homo sapiens
MPNQGEDCYFFFYSTCTKGDSCPFRHCEAAIGNETVCTLWQEGRCFRQVCRFRHMEIDKKRSEIPCYWENQPTGCQKLNCAFHHNRGRYVDGLFLPPSKTVLPTVPESPEEEVKASQLSVQQNKLSVQSNPSPQLRSVMKVESSENVPSPTHPPVVINAADDDEDDDDQFSEEGDETKTPTLQPTPEVHNGLRVTSVRKPAVNIKQGECLNFGIKTLEEIKSKKMKEKSKKQGEGSSGVSSLLLHPEPVPGPEKENVRTVVRTVTLSTKQGEEPLVRLSLTERLGKRKFSAGGDSDPPLKRSLAQRLGKKVEAPETNIDKTPKKAQVSKSLKERLGMSADPDNEDATDKVNKVGEIHVKTLEEILLERASQKRGELQTKLKTEGPSKTDDSTSGARSSSTIRIKTFSEVLAEKKHRQQEAERQKSKKDTTCIKLKIDSEIKKTVVLPPIVASRGQSEEPAGKTKSMQEVHIKTLEEIKLEKALRVQQSSESSTSSPSQHEATPGARRLLRITKRTGMKEEKNLQEGNEVDSQSSIRTEAKEASGETTGVDITKIQVKRCETMREKHMQKQQEREKSVLTPLRGDVASCNTQVAEKPVLTAVPGITRHLTKRLPTKSSQKVEVETSGIGDSLLNVKCAAQTLEKRGKAKPKVNVKPSVVKVVSSPKLAPKRKAVEMHAAVIAAVKPLSSSSVLQEPPAKKAAVAVVPLVSEDKSVTVPEAENPRDSLVLPPTQSSSDSSPPEVSGPSSSQMSMKTRRLSSASTGKPPLSVEDDFEKLIWEISGGKLEAEIDLDPGKDEDDLLLELSEMIDS

SEQ ID NO: 755750 - protein, 810 aa, Homo sapiens; identical to SEQ ID NO: 755749

SEQ ID NO: 755751 - protein, 810 aa, Homo sapiens; identical to SEQ ID NO: 755749

SEQ ID NO: 755752 - protein, 810 aa, Homo sapiens; identical to SEQ ID NO: 755749

SEQ ID NO: 755753 - protein, 810 aa, Homo sapiens; identical to SEQ ID NO: 755749

SEQ ID NO: 755754 - protein, 810 aa, Homo sapiens; identical to SEQ ID NO: 755749

SEQ ID NO: 755755 - protein, 810 aa, Homo sapiens; identical to SEQ ID NO: 755749

SEQ ID NO: 755756 - protein, 810 aa, Homo sapiens; identical to SEQ ID NO: 755749

SEQ ID NO: 755757 - protein, 627 aa, Homo sapiens
MPNQGEDCYFFFYSTCTKGDSCPFRHCEAAIGNETVCTLWQEGRCFRQVCRFRHMEIDKKRSEIPCYWENQPTGCQKLNCAFHHNRGRYVDGLFLPPSKTVLPTVPESPEEEVKASQLSVQQNKLSVQSNPSPQLRSVMKVESSENVPSPTHPPVVINAADDDEDDDDQFSEEGDETKTPTLQPTPEVHNGLRVTSVRKPAVNIKQGECLNFGIKTLEEIKSKKMKEKSKKQGEGSSGVSSLLLHPEPVPGPEKENVRTVVRTVTLSTKQGEEPLVRLSLTERLGKRKFSAGGDSDPPLKRSLAQRLGKKVEAPETNIDKTPKKAQVSKSLKERLGMSADPDNEDATDKVNKVGEIHVKTLEEILLERASQKRGELQTKLKTEGPSKTDDSTSGARSSSTIRIKTFSEVLAEKKHRQQEAERQKSKKDTTCIKLKIDSEIKKTVVLPPIVASRGQSEEPAGKTKSMQEVHIKTLEEIKLEKALRVQQSSESSTSSPSQHEATPGARRLLRITKRTGMKEEKNLQEGNEVDSQSSIRTEAKEASGETTGVDITKIQVKRCETMREKHMQKQQERDGRETSAHCCARNHTAPDQAASHKVIPEGGGRNLRDWRLIIECEMCSTDLGKKG

SEQ ID NO: 755758 - protein, 450 aa, Homo sapiens
TGPGIPGISSQKRGELQTKLKTEGPSKTDDSTSGARSSSTIRIKTFSEVLAEKKHRQQEAERQKSKKDTTCIKLKIDSEIKKTVVLPPIVASRGQSEEPAGKTKSMQEVHIKTLEEIKLEKALRVQQSSESSTSSPSQHEATPGARRLLRITKRTGMKEEKNLQEGNEVDSQSSIRTEAKEASGETTGVDITKIQVKRCETMREKHMQKQQEREKSVLTPLRGDVASCNTQVAEKPVLTAVPGITRHLTKRLPTKSSQKVEVETSGIGDSLLNVKCAAQTLEKRGKAKPKVNVKPSVVKVVSSPKLAPKRKAVEMHAAVIAAVKPLSSSSVLQEPPAKKAAVAVVPLVSEDKSVTVPEAENPRDSLVLPPTQSSSDSSPPEVSGPSSSQMSMKTRRLSSASTGKPPLSVEDDFEKLIWEISGGKLEAEIDLDPGKDEDDLLLELSEMIDS

SEQ ID NO: 755759 - protein, 219 aa, Homo sapiens
MAEKPVLTAVPGITRHLTKRLPTKSSQKVEVETSGIGDSLLNVKCAAQTLEKRGKAKPKVNVKPSVVKVVSSPKLAPKRKAVEMHAAVIAAVKPLSSSSVLQEPPAKKAAVAVVPLVSEDKSVTVPEAENPRDSLVLPPTQSSSDSSPPEVSGPSSSQMSMKTRRLSSASTGKPPLSVEDDFEKLIWEISGGKLEAEIDLDPGKDEDDLLLELSEMIDS

SEQ ID NO: 755760 - protein, 136 aa, Homo sapiens [sequence omitted]

SEQ ID NO: 755761 - protein, 810 aa, Homo sapiens; identical to SEQ ID NO: 755749

SEQ ID NO: 755762 - protein, 810 aa, Homo sapiens; identical to SEQ ID NO: 755749

SEQ ID NO: 755763 - protein, 810 aa, Homo sapiens; identical to SEQ ID NO: 755749

SEQ ID NO: 755764 - protein, 810 aa, Homo sapiens; identical to SEQ ID NO: 755749

SEQ ID NO: 755765 - protein, 80 aa, Homo sapiens
CEPGAIFDAGSLGFLLVLLLLGGRRTAAAKQEERRGSKRESGIVSSVRLNVDILISFLRKVMKPKHLPCNQLLKFTMDYE

SEQ ID NO: 755766 - protein, 791 aa, Homo sapiens
MPNQGEDCYFFFYSTCTKGDSCPFRHCEAAIGNETVCTLWQEGRCFRQVCRFRHMEIDKKRSEIPCYWENQPTGCQKLNCAFHHNRGRYVDGLFLPPSKTVLPTVPESPEEEVKASQLSVQQNKLSVQSNPSPQLRSVMKVESSENVPSPTHPPVVINAADDDEDDDDQFSEEGDETKTPTLQPTPEVHNGLRVTSVRKPAVNIKQGECLNFGIKTLEEIKSKKMKEKSKKQGEGSSGVSSLLLHPEPVPGPEKENVRTVVRTVTLSTKQGEEPLVRLSLTERLGKRKFSAGGDSDPPLKRSLAQRLGKKVEAPETNIDKTPKKAQVSKSLKERLGMSADPDNEDATDKVNKVGEIHVKTLEEILLERASQKRGELQTKLKTEGPSKTDDSTSGARSSSTIRIKTFSEVLAEKKHRQQEAERQKSKKDTTCIKLKIDSEIKKTVVLPPIVASRGQSEEPAGKTKSMQEVHIKTLEEIKLEKALRVQQSSESSTSSPSQHEATPGARRLLRITKRTGHATAHAAQQPFQAQCNMKVRISPRASHTTHTRQHQPAVPLHGAEPPAQCRPSTTQYQRQRSTVSTTEQTASTMHDNSNGTRQHHQLLNTPLPRADVAISSQYPTAGTQIKQMLPTCMYQRNHTGTMTKDGIHNTTVIPTNGWERTTPSRRIREANSIHSRTLLAHQSVGHATKHHNRAHKTRRRVKQTDNPHNVRHHTQTQSKSDPQPTQDTTTPTQRDHKNTTSKGQSQEAHSQPMPQHDSAPLAGEDHSSTLPHQHRTHTRHKPATTTPTDNT

SEQ ID NO: 755767 - protein, 810 aa, Homo sapiens; identical to SEQ ID NO: 755749

SEQ ID NO: 755768 - protein, 810 aa, Homo sapiens; identical to SEQ ID NO: 755749

SEQ ID NO: 755769 - protein, 810 aa, Homo sapiens; identical to SEQ ID NO: 755749

SEQ ID NO: 755770 - protein, 810 aa, Homo sapiens; identical to SEQ ID NO: 755749

SEQ ID NO: 755771 - protein, 810 aa, Homo sapiens; identical to SEQ ID NO: 755749

SEQ ID NO: 755772 - protein, 759 aa, Homo sapiens
MCFSLLQKKRSEIPCYWENQPTGCQKLNCAFHHNRGRYVDGLFLPPSKTVLPTVPESPEEEVKASQLSVQQNKLSVQSNPSPQLRSVMKVESSENVPSPTHPPVVINAADDDEDDDDQFSEEGDETKTPTLQPTPEVHNGLRVTSVRKPAVNIKQGECLNFGIKTLEEIKSKKMKEKSKKQGEGSSGVSSLLLHPEPVPGPEKENVRTVVRTVTLSTKQGEEPLVRLSLTERLGKRKFSAGGDSDPPLKRSLAQRLGKKVEAPETNIDKTPKKAQVSKSLKERLGMSADPDNEDATDKVNKVGEIHVKTLEEILLERASQKRGELQTKLKTEGPSKTDDSTSGARSSSTIRIKTFSEVLAEKKHRQQEAERQKSKKDTTCIKLKIDSEIKKTVVLPPIVASRGQSEEPAGKTKSMQEVHIKTLEEIKLEKALRVQQSSESSTSSPSQHEATPGARRLLRITKRTGMKEEKNLQEGNEVDSQSSIRTEAKEASGETTGVDITKIQVKRCETMREKHMQKQQEREKSVLTPLRGDVASCNTQVAEKPVLTAVPGITRHLTKRLPTKSSQKVEVETSGIGDSLLNVKCAAQTLEKRGKAKPKVNVKPSVVKVVSSPKLAPKRKAVEMHAAVIAAVKPLSSSSVLQEPPAKKAAVAVVPLVSEDKSVTVPEAENPRDSLVLPPTQSSSDSSPPEVSGPSSSQMSMKTRRLSSASTGKPPLSVEDDFEKLIWEISGGKLEAEIDLDPGKDEDDLLLELSEMIDS

SEQ ID NO: 755773 - protein, 810 aa, Homo sapiens; identical to SEQ ID NO: 755749

SEQ ID NO: 755774 - protein, 810 aa, Homo sapiens; identical to SEQ ID NO: 755749

SEQ ID NO: 755775 - protein, 810 aa, Homo sapiens; identical to SEQ ID NO: 755749

SEQ ID NO: 755776 - protein, 80 aa, Homo sapiens; identical to SEQ ID NO: 755765

SEQ ID NO: 755777 - protein, 153 aa, Homo sapiens
MHYVHVHRVTTQPRNKPQTKCPSGGQSQGPRGQFLDTVLAAMCPIAMLLTADPGMPPTCLWHTPHAKHKEHLSIHLNMVPKCVHMHVTHTHTNSGSRYVGKYILLIKWSLAMYFVQGSTLSTVTKMSHGKALPDSDTYIQFPNQQGPHTPSIP

SEQ ID NO: 755778 - protein, 153 aa, Homo sapiens; identical to SEQ ID NO: 755777

SEQ ID NO: 755779 - protein, 153 aa, Homo sapiens; identical to SEQ ID NO: 755777

SEQ ID NO: 755780 - protein, 153 aa, Homo sapiens; identical to SEQ ID NO: 755777

SEQ ID NO: 755781 - protein, 143 aa, Homo sapiens
MHYVHVHRVTTQPRNKPQTKCPSGGQSQGPRGQFLDTVLAAMCPIAMLLTADPGMPPTCLWHTPHAKHKEHLSIHLNMVPKCVHMHVTHTHTNSGSRYVGKYILLIKWSLAMYFVQGSTLSTPPFQEKYKGSKLYSICQYFFL

SEQ ID NO: 755782 - protein, 76 aa, Homo sapiens
MASNLCNSQSARHPGLGLGLQGSLEWPLDLRTNRIKGSGKAKARLSSSSPVKELDYGERNQIGANRSAVDSKRKRE

SEQ ID NO: 755783 - protein, 257 aa, Homo sapiens
CKKCLSPPAMILRPPQPCGTGSQCRFRHCEEALGSDTVCSLWRERKCLDPLCRFRHMEMQQNCSISCFWETQPLGCVKISCIFYHSKPRNINGLFLPPSSNITLQKEIQEGIPLQSQSQEPLKPQENISRPIHHPLVLKTNFEEEEEVDEQNDASSLWTKTPEEIEEKRAIKEMCYKSGEYYRFHTPPDILSSKSMTPTAEKQLEKPLENGSELQEGDSLTVPTKLSQYERQGEIKTSLHGKPKTDIAAFENGGELI

SEQ ID NO: 755784 - protein, 257 aa, Homo sapiens
KFEFVCLLATTFSVSAKLEKGSQCRFRHCEEALGSDTVCSLWRERKCLDPLCRFRHMEMQQNCSISCFWETQPLGCVKISCIFYHSKPRNINGLFLPPSSNITLQKEIQEGIPLQSQSQEPLKPQENISRPIHHPLVLKTNFEEEEEVDEQNDASSLWTKTPEEIEEKRAIKEMCYKSGEYYRFHTPPDILSSKSMTPTAEKQLEKPLENGSELQEGDSLTVPTKLSQYERQGEIKTSLHGKPKTDIAAFENGGELI

SEQ ID NO: 755785 - protein, 1766 aa, Homo sapiens
MDKKFLSNPPAGFPSSRSDAERRQACDAILRACNQQLTAKLACPRHLGSLLELAELACDGYLVSTPQRPPLYLERILFVLLRNAAAQGSPEATLRLAQPLHACLVQCSREAAPQDYEAVARGSFSLLWKGAEALLERRAAFAARLKALSFLVLLEDESTPCEVPHFASPTACRAVAAHQLFDASGHGLNEADADFLDDLLSRHVIRALVGERGSSSGLLSPQRALCLLELTLEHCRRFCWSRHHDKAISAVEKAHSYLRNTNLAPSLQLCQLGVKLLQVGEEGPQAVAKLLIKASAVLSKSMEAPSPPLRALYESCQFFLSGLERGTKRRYRLDAILSLFAFLGGYCSLLQQLRDDGVYGGSSKQQQSFLQMYFQGLHLYTVVVYDFAQGCQIVDLADLTQLVDSCKSTVVWMLEALEGLSGQELTDHMGMTASYTSNLAYSFYSHKLYAEACAISEPLCQHLGLVKPGTYPEVPPEKLHRCFRLQVESLKKLGKQAQGCKMVILWLAALQPCSPEHMAEPVTFWVRVKMDAARAGDKELQLKTLRDSLSGWDPETLALLLREELQAYKAVRADTGQERFNIICDLLELSPEETPAGAWARATHLVELAQVLCYHDFTQQTNCSALDAIREALQLLDSVRPEAQARDQLLDDKAQALLWLYICTLEAKIQEGIERDRRAQAPGNLEEFEVNDLNYEDKLQEDRFLYSNIAFNLAADAAQSKCLDQALALWKELLTKGQAPAVRCLQQTAASLQILAALYQLVAKPMQALEVLLLLRIVSERLKDHSKAAGSSCHITQLLLTLGCPSYAQLHLEEAASSLKHLDQTTDTYLLLSLTCDLLRSQLYWTHQKVTKGVSLLLSVLRDPALQKSSKAWYLLRVQVLQLVAAYLSLPSNNLSHSLWEQLCAQGWQTPEIALIDSHKLLRSIILLLMGSDILSTQKAAVETSFLDYGENLVQKWQVLSEVLSCSEKLVCHLGRLGSVSEAKAFCLEALKLTTKLQIPRQCALFLVLKGELELARNDIDLCQSDLQQVLFCLSLAQVNFSDDSDLEDPVSAEAWLAEEPKRRGTASRGRGRARKGLSLMTDAVVAPGSAPGNPGLNGRSRRAKKVASRHCEERRPQRASDQARPGPEIMRTIPEEELTDNWRKMSFEILRGSDGEDSASGGKTPAPGPEAASGEWELLRLDSSKKKLPSPCPDKESDKDLGPRLRLPSAPVATGLSTLDSICDSLSVAFRGISHCPPSGLYAHLCRFLALCLGHRDPYATAFLVTESVSITCRHQLLTHLHRQLSKAQKHRGSLEIADQLQGLSLQEMPGDVPLARIQRLFSFRALESGHFPQPEKESFQERLALIPSGVTVCVLALATLQPGTVGNTLLLTRLEKDSPPVSVQIPTGQNKLHLRSVLNEFDAIQKAQKENSSCTDKREWWTGRLALDHRMEVLIASLEKSVLGCWKGLLLPSSEEPGPAQEASRLQELLQDCGWKYPDRTLLKIMLSGAGALTPQDIQALAYGLCPTQPERAQELLNEAVGRLQGLTVPSNSHLVLVLDKDLQKLPWESMPSLQALPVTRLPSFRFLLSYSIIKEYGASPVLSQGVDPRSTFYVLNPHNNLSSTEEQFRANFSSEAGWRGVVGEVPRPEQVQEALTKHDLYIYAGHGAGARFLDGQAVLRLSCRAVALLFGCSSAALAVHGNLEGAGIVLKYIMAGCPLFLGNLWDVTDRDIDRYTEALLQGWLGAGPGAPLLYYVNQARQAPRLKYLIGAAPIAYGLPVSLR

SEQ ID NO: 755786 - protein, 2096 aa, Homo sapiens
MDKKFLSNPPAGFPSSRSDAERRQACDAILRACNQQLTAKLACPRHLGSLLELAELACDGYLVSTPQRPPLYLERILFVLLRNAAAQGSPEATLRLAQPLHACLVQCSREAAPQDYEAVARGSFSLLWKGAEALLERRAAFAARLKALSFLVLLEDESTPCEVPHFASPTACRAVAAHQLFDASGHGLNEADADFLDDLLSRHVIRALVGERGSSSGLLSPQRALCLLELTLEHCRRFCWSRHHDKAISAVEKAHSYLRNTNLAPSLQLCQLGVKLLQVGEEGPQAVAKLLIKASAVLSKSMEAPSPPLRALYESCQFFLSGLERGTKRRYRLDAILSLFAFLGGYCSLLQQLRDDGVYGGSSKQQQSFLQMYFQGLHLYTVVVYDFAQGCQIVDLADLTQLVDSCKSTVVWMLEALEGLSGQELTDHMGMTASYTSNLAYSFYSHKLYAEACAISEPLCQHLGLVKPGTYPEVPPEKLHRCFRLQVESLKKLGKQAQGCKMVILWLAALQPCSPEHMAEPVTFWVRVKMDAARAGDKELQLKTLRDSLSGWDPETLALLLREELQAYKAVRADTGQERFNIICDLLELSPEETPAGAWARATHLVELAQVLCYHDFTQQTNCSALDAIREALQLLDSVRPEAQARDQLLDDKAQALLWLYICTLEAKIQEGIERDRRAQAPGNLEEFEVNDLNYEDKLQEDRFLYSNIAFNLAADAAQSKCLDQALALWKELLTKGQAPAVRCLQQTAASLQILAALYQLVAKPMQALEVLLLLRIVSERLKDHSKAAGSSCHITQLLLTLGCPSYAQLHLEEAASSLKHLDQTTDTYLLLSLTCDLLRSQLYWTHQKVTKGVSLLLSVLRDPALQKSSKAWYLLRVQVLQLVAAYLSLPSNNLSHSLWEQLCAQGWQTPEIALIDSHKLLRSIILLLMGSDILSTQKAAVETSFLDYGENLVQKWQVLSEVLSCSEKLVCHLGRLGSVSEAKAFCLEALKLTTKLQIPRQCALFLVLKGELELARNDIDLCQSDLQQVLFLLESCTEFGGVTQHLDSVKKVHLQKGKQQAQVPCPPQLPEEELFLRGPALELVATVAKEPGPIAPSTNSSPVLKTKPQPIPNFLSHSPTCDCSLCASPVLTAVCLRWVLVTAGVRLAMGHQAQGLDLLQVVLKGCPEAAERLTQALQASLNHKTPPSLVPSLLDEILAQAYTLLALEGLNQPSNESLQKVLQSGLKFVAARIPHLEPWRASLLLIWALTKLGGLSCCTTQLFASSWGWQPPLIKSVPGSEPSKTQGQKRSGRGRQKLASAPLRLNNTSQKGLEGRGLPCTPKPPDRIRQAGPHVPFTVFEEVCPTESKPEVPQAPRVQQRVQTRLKVNFSDDSDLEDPVSAEAWLAEEPKRRGTASRGRGRARKGLSLMTDAVVAPGSAPGNPGLNGRSRRAKKVASRHCEERRPQRASDQARPGPEIMRTIPEEELTDNWRKMSFEILRGSDGEDSASGGKTPAPGPEAASGEWELLRLDSSKKKLPSPCPDKESDKDLGPRLRLPSAPVATGLSTLDSICDSLSVAFRGISHCPPSGLYAHLCRFLALCLGHRDPYATAFLVTESVSITCRHQLLTHLHRQLSKAQKHRGSLEIADQLQGLSLQEMPGDVPLARIQRLFSFRALESGHFPQPEKESFQERLALIPSGVTVCVLALATLQPGTVGNTLLLTRLEKDSPPVSVQIPTGQNKLHLRSVLNEFDAIQKAQKENSSCTDKREWWTGRLALDHRMEVLIASLEKSVLGCWKGLLLPSSEEPGPAQEASRLQELLQDCGWKYPDRTLLKIMLSGAGALTPQDIQALAYGLCPTQPERAQELLNEAVGRLQGLTVPSNSHLVLVLDKDLQKLPWESMPSLQALPVTRLPSFRFLLSYSIIKEYGASPVLSQGVDPRSTFYVLNPHNNLSSTEEQFRANFSSEAGWRGVVGEVPRPEQVQEALTKHDLYIYAGHGAGARFLDGQAVLRLSCRAVALLFGCSSAALAVHGNLEGAGIVLKYIMAGCPLFLGNLWDVTDRDIDRYTEALLQGWLGAGPGAPLLYYVNQARQAPRLKYLIGAAPIAYGLPVSLR

SEQ ID NO: 755787 - protein, 1476 aa, Homo sapiens
MDKKFLSNPPAGFPSSRSDAERRQACDAILRACNQQLTAKLACPRHLGSLLELAELACDGYLVSTPQRPPLYLERILFVLLRNAAAQGSPEATLRLAQPLHACLVQCSREAAPQDYEAVARGSFSLLWKGAEALLERRAAFAARLKALSFLVLLEDESTPCEVPHFASPTACRAVAAHQLFDASGHGLNEADADFLDDLLSRHVIRALVGERGSSSGLLSPQRALCLLELTLEHCRRFCWSRHHDKAISAVEKAHSYLRNTNLAPSLQLCQLGVKLLQVGEEGPQAVAKLLIKASAVLSKSMEAPSPPLRALYESCQFFLSGLERGTKRRYRLDAILSLFAFLGGYCSLLQQLRDDGVYGGSSKQQQSFLQMYFQGLHLYTVVVYDFAQGCQIVDLADLTQLVDSCKSTVVWMLEALEGLSGQELTDHMGMTASYTSNLAYSFYSHKLYAEACAISEPLCQHLGLVKPGTYPEVPPEKLHRCFRLQVESLKKLGKQAQGCKMVILWLAALQPCSPEHMAEPVTFWVRVKMDAARAGDKELQLKTLRDSLSGWDPETLALLLREELQAYKAVRADTGQERFNIICDLLELSPEETPAGAWARATHLVELAQVLCYHDFTQQTNCSALDAIREALQLLDSVRPEAQARDQLLDDKAQALLWLYICTLEAKIQEGIERDRRAQAPGNLEEFEVNDLNYEDKLQEDRFLYSNIAFNLAADAAQSKCLDQALALWKELLTKGQAPAVRCLQQTAASLQILAALYQLVAKPMQALEVLLLLRIVSERLKDHSKAAGSSCHITQLLLTLGCPSYAQLHLEEAASSLKHLDQTTDTYLLLSLTCDLLRSQLYWTHQKVTKGVSLLLSVLRDPALQKSSKAWYLLRVQVLQLVAAYLSLPSNNLSHSLWEQLCAQGWQTPEIALIDSHKLLRSIILLLMGSDILSTQKAAVETSFLDYGENLVQKWQVLSEVLSCSEKLVCHLGRLGSVSEAKAFCLEALKLTTKLQIPRQCALFLVLKGELELARNDIDLCQSDLQQVLFLLESCTEFGGVTQHLDSVKKVHLQKGKQQAQVPCPPQLPEEELFLRGPALELVATVAKEPGPIAPSTNSSPVLKTKPQPIPNFLSHSPTCDCSLCASPVLTAVCLRWVLVTAGVRLAMGHQAQGLDLLQVVLKGCPEAAERLTQALQASLNHKTPPSLVPSLLDEILAQAYTLLALEGLNQPSNESLQKVLQSGLKFVAARIPHLEPWRASLLLIWALTKLGGLSCCTTQLFASSWGWQPPLIKSVPGSEPSKTQGQKRSGRGRQKLASAPLRLNNTSQKGLEGRGLPCTPKPPDRIRQAGPHVPFTVFEEVCPTESKPEVPQAPRVQQRVQTRLKVNFSDDSDLEDPVSAEAWLAEEPKRRGTASRGRGRARKGLSLMTDAVVAPGSAPGNPGLNGRSRRAKKVASRHCEERRPQRASDQARPGPEIMRTIPEEELTDNWRLQ

SEQ ID NO: 755788 - protein, 126 aa, Homo sapiens
GTEELGAGQQLKSGSGRGRRGPGPALRGRWGQERLRQGPPSVLFSHVLGPLSSFPAGNIHAVLGGAAFPRGTELPGRALLPSRGGLGAVACGGRQPLLRCVSRWSQKTAVQGKGPLPDTQGQIFFS

SEQ ID NO: 755789 - protein, 1390 aa, Homo sapiens
MLKPSGLKAPTKILKPGSTALKTPTAVVAPVEKTISSEKASSTPSSETQEEFVDDFRVGERVWVNGNKPGFIQFLGETQFAPGQWAGIVLDEPIGKNDGSVAGVRYFQCEPLKGIFTRPSKLTRKVQAEDEANGLQTTPASRATSPLCTSTASMVSSSPSTPSNIPQKPSQPAAKEPSATPPISNLTKTASESISNLSEAGSIKKGERELKIGDRVLVGGTKAGVVRFLGETDFAKGEWCGVELDEPLGKNDGAVAGTRYFQCQPKYGLFAPVHKVTKIGFPSTTPAKAKANAVRRVMATTSASLKRSPSASSLSSMSSVASSVSSRPSRTGLLTETSSRYARKISGTTALQEALKEKQQHIEQLLAERDLERAEVAKATSHVGEIEQELALARDGHDQHVLELEAKMDQLRTMVEAADREKVELLNQLEEEKRKVEDLQFRVEEESITKGDLEVATVSEKSRIMELEKDLALRVQEVAELRRRLESNKPAGDVDMSLSLLQEISSLQEKLEVTRTDHQREITSLKEHFGAREETHQKEIKALYTATEKLSKENESLKSKLEHANKENSDVIALWKSKLETAIASHQQAMEELKVSFSKGLGTETAEFAELKTQIEKMRLDYQHEIENLQNQQDSERAAHAKEMEALRAKLMKVIKEKENSLEAIRSKLDKAEDQHLVEMEDTLNKLQEAEIKVKELEVLQAKCNEQTKVIDNFTSQLKATEEKLLDLDALRKASSEGKSEMKKLRQQLEAAEKQIKHLEIEKNAESSKASSITRELQGRELKLTNLQENLSEVSQVKETLEKELQILKEKFAEASEEAVSVQRSMQETVNKLHQKEEQFNMLSSDLEKLRENLADMEAKFREKDEREEQLIKAKEKLENDIAEIMKMSGDNSSQLTKMNDELRLKERDVEELQLKLTKANENASFLQKSIEDMTVKAEQSQQEAAKKHEEEKKELERKLSDLEKKMETSHNQCQELKARYERATSETKTKHEEILQNLQKTLLDTEDKLKGAREENSGLLQELEELRKQADKAKAAQTAEDAMQIMEQMTKEKTETLASLEDTKQTNAKLQNELDTLKENNLKNVEELNKSKELLTVENQKMEEFRKEIETLKQAAAQKSQQLSALQEENVKLAEELGRSRDEVTSHQKLEEERSVLNNQLLEMKKRESKFIKDADEEKASLQKSISITSALLTEKDAELEKLRNEVTVLRGENASAKSLHSVVQTLESDKVKLELKVKNLELQLKENKRQLSSSSGNTDTQADEDERAQESQIDFLNSVIVDLQRKNQDLKMKVEMMSEAALNGNGDDLNNYDSDDQEKQSKKKPRLFCDICDCFDLHDTEDCPTQAQMSEDPPHSTHHGSRGEERPYCEICEMFGHWATNCNDDETF

SEQ ID NO: 755790 - protein, 1425 aa, Homo sapiens
MLKPSGLKAPTKILKPGSTALKTPTAVVAPVEKTISSEKASSTPSSETQEEFVDDFRVGERVWVNGNKPGFIQFLGETQFAPGQWAGIVLDEPIGKNDGSVAGVRYFQCEPLKGIFTRPSKLTRKVQAEDEANGLQTTPASRATSPLCTSTASMVSSSPSTPSNIPQKPSQPAAKEPSATPPISNLTKTASESISNLSEAGSIKKGERELKIGDRVLVGGTKAGVVRFLGETDFAKGEWCGVELDEPLGKNDGAVAGTRYFQCQPKYGLFAPVHKVTKIGFPSTTPAKAKANAVRRVMATTSASLKRSPSASSLSSMSSVASSVSSRPSRTGLLTETSSRYARKISGTTALQEALKEKQQHIEQLLAERDLERAEVAKATSHVGEIEQELALARDGHDQHVLELEAKMDQLRTMVEAADREKVELLNQLEEEKRKVEDLQFRVEEESITKGDLETQTKLEHARIKELEQSLLFEKTKADKLQRELEDTRVATVSEKSRIMELEKDLALRVQEVAELRRRLESNKPAGDVDMSLSLLQEISSLQEKLEVTRTDHQREITSLKEHFGAREETHQKEIKALYTATEKLSKENESLKSKLEHANKENSDVIALWKSKLETAIASHQQAMEELKVSFSKGLGTETAEFAELKTQIEKMRLDYQHEIENLQNQQDSERAAHAKEMEALRAKLMKVIKEKENSLEAIRSKLDKAEDQHLVEMEDTLNKLQEAEIKVKELEVLQAKCNEQTKVIDNFTSQLKATEEKLLDLDALRKASSEGKSEMKKLRQQLEAAEKQIKHLEIEKNAESSKASSITRELQGRELKLTNLQENLSEVSQVKETLEKELQILKEKFAEASEEAVSVQRSMQETVNKLHQKEEQFNMLSSDLEKLRENLADMEAKFREKDEREEQLIKAKEKLENDIAEIMKMSGDNSSQLTKMNDELRLKERDVEELQLKLTKANENASFLQKSIEDMTVKAEQSQQEAAKKHEEEKKELERKLSDLEKKMETSHNQCQELKARYERATSETKTKHEEILQNLQKTLLDTEDKLKGAREENSGLLQELEELRKQADKAKAAQTAEDAMQIMEQMTKEKTETLASLEDTKQTNAKLQNELDTLKENNLKNVEELNKSKELLTVENQKMEEFRKEIETLKQAAAQKSQQLSALQEENVKLAEELGRSRDEVTSHQKLEEERSVLNNQLLEMKKRESKFIKDADEEKASLQKSISITSALLTEKDAELEKLRNEVTVLRGENASAKSLHSVVQTLESDKVKLELKVKNLELQLKENKRQLSSSSGNTDTQADEDERAQESQIDFLNSVIVDLQRKNQDLKMKVEMMSEAALNGNGDDLNNYDSDDQEKQSKKKPRLFCDICDCFDLHDTEDCPTQAQMSEDPPHSTHHGSRGEERPYCEICEMFGHWATNCNDDETF

SEQ ID NO: 755791 - protein, 1425 aa, Homo sapiens; identical to SEQ ID NO: 755790

SEQ ID NO: 755792 - protein, 1425 aa, Homo sapiens; identical to SEQ ID NO: 755790

SEQ ID NO: 755793 - protein, 1128 aa, Homo sapiens
MATTSASLKRSPSASSLSSMSSVASSVSSRPSRTGLLTETSSRYARKISGTTALQEALKEKQQHIEQLLAERDLERAEVAKATSHVGEIEQELALARDGHDQHVLELEAKMDQLRTMVEAADREKVELLNQLEEEKRKVEDLQFRVEEESITKGDLETQTKLEHARIKELEQSLLFEKTKADKLQRELEDTRVATVSEKSRIMELEKDLALRVQEVAELRRRLESNKPAGDVDMSLSLLQEISSLQEKLEVTRTDHQREITSLKEHFGAREETHQKEIKALYTATEKLSKENESLKSKLEHANKENSDVIALWKSKLETAIASHQQAMEELKVSFSKGLGTETAEFAELKTQIEKMRLDYQHEIENLQNQQDSERAAHAKEMEALRAKLMKVIKEKENSLEAIRSKLDKAEDQHLVEMEDTLNKLQEAEIKVKELEVLQAKCNEQTKVIDNFTSQLKATEEKLLDLDALRKASSEGKSEMKKLRQQLEAAEKQIKHLEIEKNAESSKASSITRELQGRELKLTNLQENLSEVSQVKETLEKELQILKEKFAEASEEAVSVQRSMQETVNKLHQKEEQFNMLSSDLEKLRENLADMEAKFREKDEREEQLIKAKEKLENDIAEIMKMSGDNSSQLTKMNDELRLKERDVEELQLKLTKANENASFLQKSIEDMTVKAEQSQQEAAKKHEEEKKELERKLSDLEKKMETSHNQCQELKARYERATSETKTKHEEILQNLQKTLLDTEDKLKGAREENSGLLQELEELRKQADKAKAAQTAEDAMQIMEQMTKEKTETLASLEDTKQTNAKLQNELDTLKENNLKNVEELNKSKELLTVENQKMEEFRKEIETLKQAAAQKSQQLSALQEENVKLAEELGRSRDEVTSHQKLEEERSVLNNQLLEMKKRESKFIKDADEEKASLQKSISITSALLTEKDAELEKLRNEVTVLRGENASAKSLHSVVQTLESDKVKLELKVKNLELQLKENKRQLSSSSGNTDTQADEDERAQESQIDFLNSVIVDLQRKNQDLKMKVEMMSEAALNGNGDDLNNYDSDDQEKQSKKKPRLFCDICDCFDLHDTEDCPTQAQMSEDPPHSTHHGSRGEERPYCEICEMFGHWATNCNDDETF

SEQ ID NO: 755794 - protein, 565 aa, Homo sapiens
MQETVNKLHQKEEQFNMLSSDLEKLRENLADMEAKFREKDEREEQLIKAKEKLENDIAEIMKMSGDNSSQLTKMNDELRLKERDVEELQLKLTKANENASFLQKSIEDMTVKAEQSQQEAAKKHEEEKKELERKLSDLEKKMETSHNQCQELKARYERATSETKTKHEEILQNLQKTLLDTEDKLKGAREENSGLLQELEELRKQADKAKAAQTAEDAMQIMEQMTKEKTETLASLEDTKQTNAKLQNELDTLKENNLKNVEELNKSKELLTVENQKMEEFRKEIETLKQAAAQKSQQLSALQEENVKLAEELGRSRDEVTSHQKLEEERSVLNNQLLEMKKRESKFIKDADEEKASLQKSISITSALLTEKDAELEKLRNEVTVLRGENASAKSLHSVVQTLESDKVKLELKVKNLELQLKENKRQLSSSSGNTDTQADEDERAQESQIDFLNSVIVDLQRKNQDLKMKVEMMSEAALNGNGDDLNNYDSDDQEKQSKKKPRLFCDICDCFDLHDTEDCPTQAQMSEDPPHSTHHGSRGEERPYCEICEMFGHWATNCNDDETF

SEQ ID NO: 755795 - protein, 1410 aa, Homo sapiens
MLKPSGLKAPTKILKPGSTALKTPTAVVAPVEKTISSEKASSTPSSETQEEFVDDFRVGERVWVNGNKPGFIQFLGETQFAPGQWAGIVLDEPIGKNDGSVAGVRYFQCEPLKGIFTRPSKLTRKVQAEDEANGLQTTPASRATSPLCTSTASMVSSSPSTPSNIPQKPSQPAAKEPSATPPISNLTKTASESISNLSEAGSIKKGERELKIGDRVLVGGTKAGVVRFLGETDFAKGEWCGVELDEPLGKNDGAVAGTRYFQCQPKYGLFAPVHKVTKIGFPSTTPAKAKANAVRRVMATTSASLKRSPSASSLSSMSSVASSVSSRPSRTGLLTETSSRYARKISGTTALQEALKEKQQHIEQLLAERDLERAEVAKATSHVGEIEQELALARDGHDQHVLELEAKMDQLRTMVEAADREKVELLNQLEEEKRKVEDLQFRVEEESITKGDLETQTKLEHARIKELEQSLLFEKTKADKLQRELEDTRVATVSEKSRIMELEKDLALRVQEVAELRRRLESNKPAGDVDMSLSLLQEISSLQEKLEVTRTDHQREITSLKEHFGAREETHQKEIKALYTATEKLSKENESLKSKLEHANKENSDVIALWKSKLETAIASHQQAMEELKVSFSKGLGTETAEFAELKTQIEKMRLDYQHEIENLQNQQDSERAAHAKEMEALRAKLMKVIKEKENSLEAIRSKLDKAEDQHLVEMEDTLNKLQEAEIKVKELEVLQAKCNEQTKVIDNFTSQLKATEEKLLDLDALRKASSEGKSEMKKLRQQLEAAEKQIKHLEIEKNAESSKASSITRELQGRELKLTNLQENLSEVSQVKETLEKELQILKEKFAEASEEAVSVQRSMQETVNKLHQKEEQFNMLSSDLEKLRENLADMEAKFREKDEREEQLIKAKEKLENDIAEIMKMSGDNSSQLTKMNDELRLKERDVEELQLKLTKANENASFLQKSIEDMTVKAEQSQQEAAKKHEEEKKELERKLSDLEKKMETSHNQCQELKARYERATSETKTKHEEILQNLQKTLLDTEDKLKGAREENSGLLQELEELRKQADKAKAAQTAEDAMQIMEQMTKEKTETLASLEDTKQTNAKLQNELDTLKENNLKNVEELNKSKELLTVENQKMEEFRKEIETLKQAAAQKSQQLSALQEENVKLAEELGRSRDEVTSHQKLEEERSVLNNQLLEMKKRESKFIKDADEEKASLQKSISITSALLTEKDAELEKLRNEVTVLRGENASAKSLHSVVQTLESDKVKLELKVKNLELQLKENKRQLSSSSVQTLRRRDELRTEPEAKKSKTAAKKNDKGAAGEGPALYEDPPDQKTSPSGKPAKLKICSWTVDGLRALDYEERIRWGKEKKPQIYCASLKTLISEGQLFMQNEASCTPWRRELYIPNV

SEQ ID NO: 755796 - protein, 1199 aa, Homo sapiens
MLKPSGLKAPTKILKPGSTALKTPTAVVAPVEKTISSEKASSTPSSETQEEFVDDFRVGERVWVNGNKPGFIQFLGETQFAPGQWAGIVLDEPIGKNDGSVAGVRYFQCEPLKGIFTRPSKLTRKVQAEDEANGLQTTPASRATSPLCTSTASMVSSSPSTPSNIPQKPSQPAAKEPSATPPISNLTKTASESISNLSEAGSIKKGERELKIGDRVLVGGTKAGVVRFLGETDFAKGEWCGVELDEPLGKNDGAVAGTRYFQCQPKYGLFAPVHKVTKIGFPSTTPAKAKANAVRRVMATTSASLKRSPSASSLSSMSSVASSVSSRPSRTGLLTETSSRYARKISGTTALQEALKEKQQHIEQLLAERDLERAEVAKATSHVGEIEQELALARDGHDQHVLELEAKMDQLRTMVEAADREKVELLNQLEEEKRKVEDLQFRVEEESITKGDLETQTKLEHARIKELEQSLLFEKTKADKLQRELEDTRVATVSEKSRIMELEKDLALRVQEVAELRRRLESNKPAGDVDMSLSLLQEISSLQEKLEVTRTDHQREITSLKEHFGAREETHQKEIKALYTATEKLSKENESLKSKLEHANKENSDVIALWKSKLETAIASHQQAMEELKVSFSKGLGTETAEFAELKTQIEKMRLDYQHEIENLQNQQDSERAAHAKEMEALRAKLMKVIKEKENSLEAIRSKLDKAEDQHLVEMEDTLNKLQEAEIKVKELEVLQAKCNEQTKVIDNFTSQLKATEEKLLDLDALRKASSEGKSEMKKLRQQLEAAEKQIKHLEIEKNAESSKASSITRELQGRELKLTNLQENLSEVSQVKETLEKELQILKEKFAEASEEAVSVQRSMQETVNKLHQKEEQFNMLSSDLEKLRENLADMEAKFREKDEREEQLIKAKEKLENDIAEIMKMSGDNSSQLTKMNDELRLKERDVEELQLKLTKANENASFLQKSIEDMTVKAEQSQQEAAKKHEEEKKELERKLSDLEKKMETSHNQCQELKARYERATSETKTKHEEILQNLQKTLLDTEDKLKGAREENSGLLQELEELRKQADKAKAAQTAEDAMQIMEQMTKEKTETLASLEDTKQTNAKLQNELDTLKENNLKNVEELNKSKELLTVENQKMEEFRKEIETLKQAAAQKSQQLSALQEENVKLAEELGRSRGPKVPKVIQKGLGKKRKGILGA

SEQ ID NO: 755797 - protein, 348 aa, Homo sapiens [sequence omitted]

SEQ ID NO: 755798 - protein, 74 aa, Homo sapiens
GQVAATGGVRGETESHSVTRLECSGTIITHYSLGLLDSSRPPASASQVAEEVCTTTHIYIRVRSLEIGVLVLDC

SEQ ID NO: 755799 - protein, 1425 aa, Homo sapiens; identical to SEQ ID NO: 755790

SEQ ID NO: 755800 - protein, 1390 aa, Homo sapiens; identical to SEQ ID NO: 755789

SEQ ID NO: 755801 - protein, 1425 aa, Homo sapiens; identical to SEQ ID NO: 755790

SEQ ID NO: 755802 - protein, 1293 aa, Homo sapiens
MLKPSGLKAPTKILKPGSTALKTPTAVVAPVEKTISSEKASSTPSSETQEEFVDDFRVGERVWVNGNKPGFIQFLGETQFAPGQWAGIVLDEPIGKNDGSVAGVRYFQCEPLKGIFTRPSKLTRKVQAEDEANGLQTTPASRATSPLCTSTASMVSSSPSTPSNIPQKPSQPAAKEPSATPPISNLTKTASESISNLSEAGSIKKGERELKIGDRVLVGGTKAGVVRFLGETDFAKGEWCGVELDEPLGKNDGAVAGTRYFQCQPKYGLFAPVHKVTKIGFPSTTPAKAKANAVRRVMATTSASLKRSPSASSLSSMSSVASSVSSRPSRTGLLTETSSRYARKISGTTALQEALKEKQQHIEQLLAERDLERAEVAKATSHVGEIEQELALARDGHDQHVLELEAKMDQLRTMVEAADREKVELLNQLEEEKRKVEDLQFRVEEESITKGDLETQTKLEHARIKELEQSLLFEKTKADKLQRELEDTRVATVSEKSRIMELEKDLALRVQEVAELRRRLESNKPAGDVDMSLSLLQEISSLQEKLEVTRTDHQREITSLKEHFGAREETHQKEIKALYTATEKLSKENESLKSKLEHANKENSDVIALWKSKLETAIASHQQAMEELKVSFSKGLGTETAEFAELKTQIEKMRLDYQHEIENLQNQQDSERAAHAKEMEALRAKLMKVIKEKENSLEAIRSKLDKAEDQHLVEMEDTLNKLQEAEIKVKELEVLQAKCNEQTKVIDNFTSQLKATEEKLLDLDALRKASSEGKSEMKKLRQQLEAAEKQIKHLEIEKNAESSKASSITRELQGRELKLTNLQENLSEVSQVKETLEKELQILKEKFAEASEEAVSVQRSMQETVNKLHQKEEQFNMLSSDLEKLRENLADMEAKFREKDEREEQLIKAKEKLENDIAEIMKMSGDNSSQLTKMNDELRLKERDVEELQLKLTKANENASFLQKSIEDMTVKAEQSQQEAAKKHEEEKKELERKLSDLEKKMETSHNQCQELKARYERATSETKTKHEEILQNLQKTLLDTEDKLKGAREENSGLLQELEELRKQADKAKAAQTAEDAMQIMEQMTKEKTETLASLEDTKQTNAKLQNELDTLKENNLKNVEELNKSKELLTVENQKMEEFRKEIETLKQAAAQKSQQLSALQEENVKLAEELGRSRDEVTSHQKLEEERSVLNNQLLEMKKRESKFIKDADEEKASLQKSISITSALLTEKDAELEKLRNEVTVLRGENASAKSLHSVVQTLESDKVKLELKVKNLELQLKENKRQLSSSSD

SEQ ID NO: 755803 - protein, 745 aa, Homo sapiens
GDVMIVRVSRLQNKNTKEKKETKRNMRPWGLSDYKTIRARMSMTRVWNRNIRVISVGGGAHQSVQHWLDSLIPGSSEEKLLDLDALRKASSEGKSEMKKLRQQLEAAEKQIKHLEIEKNAESSKASSITRELQGRELKLTNLQENLSEVSQVKETLEKELQILKEKFAEASEEAVSVQRSMQETVNKLHQKEEQFNMLSSDLEKLRENLADMEAKFREKDEREEQLIKAKEKLENDIAEIMKMSGDNSSQLTKMNDELRLKERDVEELQLKLTKANENASFLQKSIEDMTVKAEQSQQEAAKKHEEEKKELERKLSDLEKKMETSHNQCQELKARYERATSETKTKHEEILQNLQKTLLDTEDKLKGAREENSGLLQELEELRKQADKAKAAQTAEDAMQIMEQMTKEKTETLASLEDTKQTNAKLQNELDTLKENNLKNVEELNKSKELLTVENQKMEEFRKEIETLKQAAAQKSQQLSALQEENVKLAEELGRSRDEVTSHQKLEEERSVLNNQLLEMKKRESKFIKDADEEKASLQKSISITSALLTEKDAELEKLRNEVTVLRGENASAKSLHSVVQTLESDKVKLELKVKNLELQLKENKRQLSSSSGNTDTQADEDERAQESQIDFLNSVIVDLQRKNQDLKMKVEMMSEAALNGNGDDLNNYDSDDQEKQSKKKPRLFCDICDCFDLHDTEDCPTQAQMSEDPPHSTHHGSRGEERPYCEICEMFGHWATNCNDDETF

SEQ ID NO: 755804 - protein, 655 aa, Homo sapiens
ALKKELQERKKENQELVASKCDLSLMLKEAQNTKKNLEKEHTHILQAKESLDAQLNTCCSEKNILLRDGLNLQEECHKLSKEIQEMQQSLILEQEARAKESESSLYENNQLHGRMVLLEQEVEELRVCIEELQSEKFVLLQEKSKSEQELAEIIEEKELLTAEAAQLAAHIKTLKSDFAALSKSKAELQELHSCLTKILDDLQRNHEVTLAEKAQVMQDNQNLLAEKSEMMLEKDELLKEKETLAESYFILQKEISQLAKTNSHISANLLESQNENRTLRKDKNKLTLKIRELETLQSFTAAQTAEDAMQIMEQMTKEKTETLASLEDTKQTNAKLQNELDTLKENNLKNVEELNKSKELLTVENQKMEEFRKEIETLKQAAAQKSQQLSALQEENVKLAEELGRSRDEVTSHQKLEEERSVLNNQLLEMKKRESKFIKDADEEKASLQKSISITSALLTEKDAELEKLRNEVTVLRGENASAKSLHSVVQTLESDKVKLELKVKNLELQLKENKRQLSSSSGNTDTQADEDERAQESQIDFLNSVIVDLQRKNQDLKMKVEMMSEAALNGNGDDLNNYDSDDQEKQSKKKPRLFCDICDCFDLHDTEDCPTQAQMSEDPPHSTHHGSRGEERPYCEICEMFGHWATNCNDDETF

SEQ ID NO: 755805 - protein, 1101 aa, Homo sapiens
MLKPSGLKAPTKILKPGSTALKTPTAVVAPVEKTISSEKASSTPSSETQEEFVDDFRVGERVWVNGNKPGFIQFLGETQFAPGQWAGIVLDEPIGKNDGSVAGVRYFQCEPLKGIFTRPSKLTRKVQAEDEANGLQTTPASRATSPLCTSTASMVSSSPSTPSNIPQKPSQPAAKEPSATPPISNLTKTASESISNLSEAGSIKKGERELKIGDRVLVGGTKAGVVRFLGETDFAKGEWCGVELDEPLGKNDGAVAGTRYFQCQPKYGLFAPVHKVTKIGFPSTTPAKAKANAVRRVMATTSASLKRSPSASSLSSMSSVASSVSSRPSRTGLLTETSSRYARKISGTTALQEALKEKQQHIEQLLAERDLERAEVAKATSHVGEIEQELALARDGHDQHVLELEAKMDQLRTMVEAADREKVELLNQLEEEKRKVEDLQFRVEEESITKGDLETQTKLEHARIKELEQSLLFEKTKADKLQRELEDTRVATVSEKSRIMELEKDLALRVQEVAELRRRLESNKPAGDVDMSLSLLQEISSLQEKLEVTRTDHQREITSLKEHFGAREETHQKEIKALYTATEKLSKENESLKSKLEHANKENSDVIALWKSKLETAIASHQQAMEELKVSFSKGLGTETAEFAELKTQIEKMRLDYQHEIENLQNQQDSERAAHAKEMEALRAKLMKVIKEKENSLEAIRSKLDKAEDQHLVEMEDTLNKLQEAEIKVKELEVLQAKCNEQTKVIDNFTSQLKATEEKLLDLDALRKASSEGKSEMKKLRQQLEAAEKQIKHLEIEKNAESSKASSITRELQGRELKLTNLQENLSEVSQVKETLEKELQILKEKFAEASEEAVSVQRSMQETVNKLHQKEEQFNMLSSDLEKLRENLADMEAKFREKDEREEQLIKAKEKLENDIAEIMKMSGDNSSQLTKMNDELRLKERDVEELQLKLTKANENASFLQKSIEDMTVKAEQSQQEAAKKHEEEKKELERKLSDLEKKMETSHNQCQELKARYERATSETKTKHEEILQNLQKTLLDTEDKLKGAREENSGLLQELEELRKQADKAKVRDAREFPCVVACLSSVSRQEGCLESSSQWE

SEQ ID NO: 755806 - protein, 882 aa, Homo sapiens
MLKPSGLKAPTKILKPGSTALKTPTAVVAPVEKTISSEKASSTPSSETQEEFVDDFRVGERVWVNGNKPGFIQFLGETQFAPGQWAGIVLDEPIGKNDGSVAGVRYFQCEPLKGIFTRPSKLTRKVQAEDEANGLQTTPASRATSPLCTSTASMVSSSPSTPSNIPQKPSQPAAKEPSATPPISNLTKTASESISNLSEAGSIKKGERELKIGDRVLVGGTKAGVVRFLGETDFAKGEWCGVELDEPLGKNDGAVAGTRYFQCQPKYGLFAPVHKVTKIGFPSTTPAKAKANAVRRVMATTSASLKRSPSASSLSSMSSVASSVSSRPSRTGLLTETSSRYARKISGTTALQEALKEKQQHIEQLLAERDLERAEVAKATSHVGEIEQELALARDGHDQHVLELEAKMDQLRTMVEAADREKVELLNQLEEEKRKVEDLQFRVEEESITKGDLETQTKLEHARIKELEQSLLFEKTKADKLQRELEDTRVATVSEKSRIMELEKDLALRVQEVAELRRRLESNKPAGDVDMSLSLLQEISSLQEKLEVTRTDHQREITSLKEHFGAREETHQKEIKALYTATEKLSKENESLKSKLEHANKENSDVIALWKSKLETAIASHQQAMEELKVSFSKGLGTETAEFAELKTQIEKMRLDYQHEIENLQNQQDSERAAHAKEMEALRAKLMKVIKEKENSLEAIRSKLDKAEDQHLVEMEDTLNKLQEAEIKVKELEVLQAKCNEQTKVIDNFTSQLKATEEKLLDLDALRKASSEGKSEMKKLRQQLEAAEKQIKHLEIEKNAESSKASSITRELQGRELKLTNLQENLSEVSQVKETLEKELQILVSTCWESESQGFWPFPVLKNPPVRNIVAVSFLFLSVDST

SEQ ID NO: 755807 - protein, 121 aa, Homo sapiens
LTKVQANVCGLQKAQAIERQLVSLSQTLCLYNLVPSVSLHFGAADLAGCTEGYKLTGLPTEHSRQGSCLAEVPSHIKWGWPCQHLCHPLPNRLPRKTQAMVPLMGFVGNSTAPLKSQSAAN

SEQ ID NO: 755808 - protein, 193 aa, Homo sapiens
MLGVLELLLLGAAWLAGPARGQNETEPIVLEGKCLVVCDSNPTSDPTGTALGISVRSGSAKVAFSAIRSTNHEPSEMSNRTMIIYFDQVLVNIGNNFDSERSTFIAPRKGIYSFNFHVVKVYNRQTIQVSLMLNGWPVISAFAGDQDVTREAASNGVLIQMEKGDRAYLKLERGNLMGGWKYSTFSGFLVFPL

SEQ ID NO: 755809 - protein, 193 aa, Homo sapiens; identical to SEQ ID NO: 755808

SEQ ID NO: 755810 - protein, 921 aa, Homo sapiens
MEVQLGLGRVYPRPPSKTYRGAFQNLFQSVREVIQNPGPRHPEAASAAPPGASLLLLQQQQQQQQQQQQQQQQQQQQQQQETSPRQQQQQQGEDGSPQAHRRGPTGYLVLDEEQQPSQPQSALECHPERGCVPEPGAAVAASKGLPQQLPAPPDEDDSAAPSTLSLLGPTFPGLSSCSADLKDILSEASTMQLLQQQQQEAVSEGSSSGRAREASGAPTSSKDNYLGGTSTISDNAKELCKAVSVSMGLGVEALEHLSPGEQLRGDCMYAPLLGVPPAVRPTPCAPLAECKGSLLDDSAGKSTEDTAEYSPFKGGYTKGLEGESLGCSGSAAAGSSGTLELPSTLSLYKSGALDEAAAYQSRDYYNFPLALAGPPPPPPPPHPHARIKLENPLDYGSAWAAAAAQCRYGDLASLHGAGAAGPGSGSPSAAASSSWHTLFTAEEGQLYGPCGGGGGGGGGGGGGGGGGGGGGGGGEAGAVAPYGYTRPPQGLAGQESDFTAPDVWYPGGMVSRVPYPSPTCVKSEMGPWMDSYSGPYGDMRLETARDHVLPIDYYFPPQKTCLICGDEASGCHYGALTCGSCKVFFKRAAEGKQKYLCASRNDCTIDKFRRKNCPSCRLRKCYEAGMTLGARKLKKLGNLKLQEEGEASSTTSPTEETTQKLTVSHIEGYECQPIFLNVLEAIEPGVVCAGHDNNQPDSFAALLSSLNELGERQLVHVVKWAKALPGFRNLHVDDQMAVIQYSWMGLMVFAMGWRSFTNVNSRMLYFAPDLVFNEYRMHKSRMYSQCVRMRHLSQEFGWLQITPQEFLCMKALLLFSIIPVDGLKNQKFFDELRMNYIKELDRIIACKRKNPTSCSRRFYQLTKLLDSVQPIARELHQFTFDLLIKSHMVSVDFPEMMAEIISVQVPKILSGKVKPIYFHTQ

SEQ ID NO: 755811 - protein, 723 aa, Homo sapiens
MQLLQQQQQEAVSEGSSSGRAREASGAPTSSKDNYLGGTSTISDNAKELCKAVSVSMGLGVEALEHLSPGEQLRGDCMYAPLLGVPPAVRPTPCAPLAECKGSLLDDSAGKSTEDTAEYSPFKGGYTKGLEGESLGCSGSAAAGSSGTLELPSTLSLYKSGALDEAAAYQSRDYYNFPLALAGPPPPPPPPHPHARIKLENPLDYGSAWAAAAAQCRYGDLASLHGAGAAGPGSGSPSAAASSSWHTLFTAEEGQLYGPCGGGGGGGGGGGGGGGGEAGAVAPYGYTRPPQGLAGQESDFTAPDVWYPGGMVSRVPYPSPTCVKSEMGPWMDSYSGPYGDMRLETARDHVLPIDYYFPPQKTCLICGDEASGCHYGALTCGSCKVFFKRAAEGKQKYLCASRNDCTIDKFRRKNCPSCRLRKCYEAGMTLGARKLKKLGNLKLQEEGEASSTTSPTEETTQKLTVSHIEGYECQPIFLNVLEAIEPGVVCAGHDNNQPDSFAALLSSLNELGERQLVHVVKWAKALPGFRNLHVDDQMAVIQYSWMGLMVFAMGWRSFTNVNSRMLYFAPDLVFNEYRMHKSRMYSQCVRMRHLSQEFGWLQITPQEFLCMKALLLFSIIPVDGLKNQKFFDELRMNYIKELDRIIACKRKNPTSCSRRFYQLTKLLDSVQPIARELHQFTFDLLIKSHMVSVDFPEMMAEIISVQVPKILSGKVKPIYFHTQ

SEQ ID NO: 755812 - protein, 920 aa, Homo sapiens
MEVQLGLGRVYPRPPSKTYRGAFQNLFQSVREVIQNPGPRHPEAASAAPPGASLLLLQQQQQQQQQQQQQQQQQQQQQQQETSPRQQQQQQGEDGSPQAHRRGPTGYLVLDEEQQPSQPQSALECHPERGCVPEPGAAVAASKGLPQQLPAPPDEDDSAAPSTLSLLGPTFPGLSSCSADLKDILSEASTMQLLQQQQQEAVSEGSSSGRAREASGAPTSSKDNYLGGTSTISDNAKELCKAVSVSMGLGVEALEHLSPGEQLRGDCMYAPLLGVPPAVRPTPCAPLAECKGSLLDDSAGKSTEDTAEYSPFKGGYTKGLEGESLGCSGSAAAGSSGTLELPSTLSLYKSGALDEAAAYQSRDYYNFPLALAGPPPPPPPPHPHARIKLENPLDYGSAWAAAAAQCRYGDLASLHGAGAAGPGSGSPSAAASSSWHTLFTAEEGQLYGPCGGGGGGGGGGGGGGGGEAGAVAPYGYTRPPQGLAGQESDFTAPDVWYPGGMVSRVPYPSPTCVKSEMGPWMDSYSGPYGDMRLETARDHVLPIDYYFPPQKTCLICGDEASGCHYGALTCGSCKVFFKRAAEGKQKYLCASRNDCTIDKFRRKNCPSCRLRKCYEAGMTLGARKLKKLGNLKLQEEGEASSTTSPTEETTQKLTVSHIEGYECQPIFLNVLEAIEPGVVCAGHDNNQPDSFAALLSSLNELGERQLVHVVKWAKALPGFRNLHVDDQMAVIQYSWMGLMVFAMGWRSFTNVNSRMLYFAPDLVFNEYRMHKSRMYSQCVRMRHLSQEFGWLQITPQEFLCMKALLIFFFFLLLFSIIPVDGLKNQKFFDELRMNYIKELDRIIACKRKNPTSCSRRFYQLTKLLDSVQPIARELHQFTFDLLIKSHMVSVDFPEMMAEIISVQVPKILSGKVKPIYFHTQ

SEQ ID NO: 755813 - protein, 731 aa, Homo sapiens
MQLLQQQQQEAVSEGSSSGRAREASGAPTSSKDNYLGGTSTISDNAKELCKAVSVSMGLGVEALEHLSPGEQLRGDCMYAPLLGVPPAVRPTPCAPLAECKGSLLDDSAGKSTEDTAEYSPFKGGYTKGLEGESLGCSGSAAAGSSGTLELPSTLSLYKSGALDEAAAYQSRDYYNFPLALAGPPPPPPPPHPHARIKLENPLDYGSAWAAAAAQCRYGDLASLHGAGAAGPGSGSPSAAASSSWHTLFTAEEGQLYGPCGGGGGGGGGGGGGGGGGGGGGGGGEAGAVAPYGYTRPPQGLAGQESDFTAPDVWYPGGMVSRVPYPSPTCVKSEMGPWMDSYSGPYGDMRLETARDHVLPIDYYFPPQKTCLICGDEASGCHYGALTCGSCKVFFKRAAEGKQKYLCASRNDCTIDKFRRKNCPSCRLRKCYEAGMTLGARKLKKLGNLKLQEEGEASSTTSPTEETTQKLTVSHIEGYECQPIFLNVLEAIEPGVVCAGHDNNQPDSFAALLSSLNELGERQLVHVVKWAKALPGFRNLHVDDQMAVIQYSWMGLMVFAMGWRSFTNVNSRMLYFAPDLVFNEYRMHKSRMYSQCVRMRHLSQEFGWLQITPQEFLCMKALLLFSIIPVDGLKNQKFFDELRMNYIKELDRIIACKRKNPTSCSRRFYQLTKLLDSVQPIARELHQFTFDLLIKSHMVSVDFPEMMAEIISVQVPKILSGKVKPIYFHTQ

SEQ ID NO: 755814 - protein, 111 aa, Homo sapiens
IAAEAPQHRGSSHSPLPTSAPSSRAGLPPLAMTLDLTSGWRLWTPIQPFRLPPGSCREGTILLCSVMDGCTAPLLPNSACVPCGSGHELNPCKAYTTSHSPGPQSSTWMRQ

SEQ ID NO: 755815 - protein, 188 aa, Homo sapiens [sequence omitted]

SEQ ID NO: 755816 - protein, 211 aa, Homo sapiens
AGARRRRGRAPACARSRHRMVGGGQPCGPNMSEVSCKKRDDYLEWPEYFMAVAFLSAQRSKDPNSQVGACIVNSENKIVGIGYNGMPNGCSDDVLPWRRTAENKLDTKYPYVCHAELNAIMNKNSTDVKGCSMYVALFPCNECAKLIIQAGIKEVIFMSDKYHDSDEATAARLLFNMAGVTFRKFIPKCSKIVIDFDSINSRPSQKLHTCR

SEQ ID NO: 755817 - protein, 178 aa, Homo sapiens
MSEVSCKKRDDYLEWPEYFMAVAFLSAQRSKDPNSQVGACIVNSENKIVGIGYNGMPNGCSDDVLPWRRTAENKLDTKYPYVCHAELNAIMNKNSTDVKGCSMYVALFPCNECAKLIIQAGIKEVIFMSDKYHDSDEATAARLLFNMAGVTFRKFIPKCSKIVIDFDSINSRPSQKLQ

SEQ ID NO: 755818 - protein, 178 aa, Homo sapiens; identical to SEQ ID NO: 755817

SEQ ID NO: 755819 - protein, 178 aa, Homo sapiens; identical to SEQ ID NO: 755817

SEQ ID NO: 755820 - protein, 178 aa, Homo sapiens; identical to SEQ ID NO: 755817

SEQ ID NO: 755821 - protein, 188 aa, Homo sapiens [sequence omitted]

SEQ ID NO: 755822 - protein, 178 aa, Homo sapiens; identical to SEQ ID NO: 755817

SEQ ID NO: 755823 - protein, 189 aa, Homo sapiens
MVGGGQPCGPNMSEVSCKKRDDYLEWPEYFMAVAFLSAQRSKDPNSQVGACIVNSENKIVGIGYNGMPNGCSDDVLPWRRTAENKLDTKYPYVCHAELNAIMNKNSTDVKGCSMYVALFPCNECAKLIIQAGIKEVIFMSDKYHDSDEATAARLLFNMAGVTFRKFIPKCSKIVIDFDSINSRPSQKLQ

SEQ ID NO: 755824 - protein, 189 aa, Homo sapiens; identical to SEQ ID NO: 755823

SEQ ID NO: 755825 - protein, 189 aa, Homo sapiens; identical to SEQ ID NO: 755823

SEQ ID NO: 755826 - protein, 90 aa, Homo sapiens
GDLEDLQDDVKGCSMYVALFPCNECAKLIIQAGIKEVIFMSDKYHDSDEATAARLLFNMAGVTFRKFIPKCSKIVIDFDSINSRPSQKLQ

SEQ ID NO: 755827 - protein, 189 aa, Homo sapiens; identical to SEQ ID NO: 755823

SEQ ID NO: 755828 - protein, 178 aa, Homo sapiens; identical to SEQ ID NO: 755817

SEQ ID NO: 755829 - protein, 196 aa, Homo sapiens
SGHRRVAPSRARGAGRWLPGGGLGPRTLGAPRPRSAFRSENAGGVGALGVPAVTPGSISRRAPRPVRGRAPWSAPGGGAGRLNTTSLPAPVCGLGMPGVGPGSELTGLRAAWGVPGTVTGCVFLNRCIRAPVLSVSTAGPQSSQGSSGRSATPGEGAQGINRTLPSPALPSPPMAPPPSYLVGTSPAPHSDDGCWP

SEQ ID NO: 755830 - protein, 189 aa, Homo sapiens; identical to SEQ ID NO: 755823

SEQ ID NO: 755831 - protein, 189 aa, Homo sapiens; identical to SEQ ID NO: 755823

SEQ ID NO: 755832 - protein, 178 aa, Homo sapiens; identical to SEQ ID NO: 755817

SEQ ID NO: 755833 - protein, 178 aa, Homo sapiens; identical to SEQ ID NO: 755817

SEQ ID NO: 755834 - protein, 189 aa, Homo sapiens; identical to SEQ ID NO: 755823

SEQ ID NO: 755835 - protein, 119 aa, Homo sapiens
MARVFYGCGLLISTEKQRSKFPVCHAELNAIMNKNSTDVKGCSMYVALFPCNECAKLIIQAGIKEVIFMSDKYHDSDEATAARLLFNMAGVTFRKFIPKCSKIVIDFDSINSRPSQKLQ

SEQ ID NO: 755836 - protein, 189 aa, Homo sapiens; identical to SEQ ID NO: 755823

SEQ ID NO: 755837 - protein, 130 aa, Homo sapiens
MARVFYGCGLLISTEKQRSKFPAENKLDTKYPYVCHAELNAIMNKNSTDVKGCSMYVALFPCNECAKLIIQAGIKEVIFMSDKYHDSDEATAARLLFNMAGVTFRKFIPKCSKIVIDFDSINSRPSQKLQ

SEQ ID NO: 755838 - protein, 206 aa, Homo sapiens
MSEVSCKKRDDYLEWPEYFMAVAFLSAQRSKDPNSQVGACIVNSENKIVGIGYNGMPNGCSDDVLPWRRTAENKLDTKYPYVCHAELNAIMNKNSTDVKGCSMYVALFPCNECAKLIIQAGIKEVIFMSDKYHDSDEATAARLLFNMAGVTFRKFIPKCSKIVIDFDSINSRPSQKLQRSTLMLRAALFTAARRGRRPGVPRWMNG

SEQ ID NO: 755839 - protein, 196 aa, Homo sapiens; identical to SEQ ID NO: 755829

SEQ ID NO: 755840 - protein, 317 aa, Homo sapiens
QPQTHHLAVDTCVSMWDLVLSIALSVGCTGAVPLIQSRIVGGWECEKHSQPWQVAVYSHGWAHCGGVLVHPQWVLTAAHCLKKNSQVWLGRHNLFEPEDTGQRVPVSHSFPHPLYNMSLLKHQSLRPDEDSSHDLMLLRLSEPAKITDVVKVLGLPTQEPALGTTCYASGWGSIEPEEFLRPRSLQCVSLHLLSNDMCARAYSEKVTEFMLCAGLWTGGKDTCGVSHPYSQHLEGKGVILGVHLSVMVCFKVSHHGALSHVPCLKSLLCTPRWCITGSGSRTPSQPTPECPCPTPTSSKFKSTSRSGITWPFWMLDT

SEQ ID NO: 755841 - protein, 275 aa, Homo sapiens
QPQTHHLAVDTCVSMWDLVLSIALSVGCTGAVPLIQSRIVGGWECEKHSQPWQVAVYSHGWAHCGGVLVHPQWVLTAAHCLKKNSQVWLGRHNLFEPEDTGQRVPVSHSFPHPLYNMSLLKHQSLRPDEDSSHDLMLLRLSEPAKITDVVKVLGLPTQEPALGTTCYASGWGSIEPEEFLRPRSLQCVSLHLLSNDMCARAYSEKVTEFMLCAGLWTGGKDTCGGDSGGPLVCNGVLQGITSWGPEPCALPEKPAVYTKVVHYRKWIKDTIAANP

SEQ ID NO: 755842 - protein, 111 aa, Homo sapiens
REKGGRGPELWAGPPATTEPSLQPQLQVSHPHASPPPPATPHSSDAPVASLLFLSHTVSPLASSLLFLLLSLTSRILFSFVYFSLPSWFCSFSLPLPHVYFLLSLSLLCSS

SEQ ID NO: 755843 - protein, 145 aa, Homo sapiens
GREEERGGCMAGVRDQGQGARWPHTGKRGPLLQGLTWATGGHCFSSEESGAVDGAGQKKDRAWLRVILGVHLSVMVCFKVSHHGALSHVPCLKSLLCTPRWCITGSGSRTPSQPTPECPCPTPTSSKFKSTSRSGITWPFWMLDT

SEQ ID NO: 755844 - protein, 201 aa, Homo sapiens
MSLLKHQSLRPDEDSSHDLMLLRLSEPAKITDVVKVLGLPTQEPALGTTCYASGWGSIEPEEFLRPRSLQCVSLHLLSNDMCARAYSEKVTEFMLCAGLWTGGKDTCGVSHPYSQHLEGKGVILGVHLSVMVCFKVSHHGALSHVPCLKSLLCTPRWCITGSGSRTPSQPTPECPCPTPTSSKFKSTSRSGITWPFWMLDT

SEQ ID NO: 755845 - protein, 253 aa, Homo sapiens
QPQTHHLAVDTCVSMWDLVLSIALSVGCTGAVPLIQSRIVGGWECEKHSQPWQVAVYSHGWAHCGGVLVHPQWVLTAAHCLKKNSQVWLGRHNLFEPEDTGQRVPVSHSFPHPLYNMSLLKHQSLRPDEDSSHDLMLLRLSEPAKITDVVKVLGLPTQEPALGTTCYASGWGSIEPEEFLRPRSLQCVSLHLLSNDMCARAYSEKVTEFMLCAGLWTGGKDTCGHNSPIPVLSTCLLGTCYVTSIAVDPGKQQ

SEQ ID NO: 755846 - protein, 128 aa, Homo sapiens
GCGGSDDEDDLGVAPGLAPAWALTQPPSQSPGPQSLPSTPSSIWPQWVILITELTIPSPAHGPPWLPNALERGHLAQRVVLKRWPLRCACGGSILQMVPALILLTCLQGLSSWTLPLVQELDPEVPSP

SEQ ID NO: 755847 - protein, 201 aa, Homo sapiens; identical to SEQ ID NO: 755844

SEQ ID NO: 755848 - protein, 102 aa, Homo sapiens
MSLLKHQSLRPDEDSSHDLMLLRLSEPAKITDVVKVLGLPTQEPALGTTCYASGWGSIEPEEFLRPRSLQCVSLHPCPTPTSSKFKSTSRSGITWPFWMLDT

SEQ ID NO: 755849 - protein, 275 aa, Homo sapiens; identical to SEQ ID NO: 755841

SEQ ID NO: 755850 - protein, 275 aa, Homo sapiens; identical to SEQ ID NO: 755841

SEQ ID NO: 755851 - protein, 275 aa, Homo sapiens; identical to SEQ ID NO: 755841

SEQ ID NO: 755852 - protein, 275 aa, Homo sapiens; identical to SEQ ID NO: 755841

SEQ ID NO: 755853 - protein, 111 aa, Homo sapiens; identical to SEQ ID NO: 755842

SEQ ID NO: 755854 - protein, 275 aa, Homo sapiens; identical to SEQ ID NO: 755841

SEQ ID NO: 755855 - protein, 83 aa, Homo sapiens
QPQTHHLAVDTCVSMWDLVLSIALSVGCTGAVPLIQSRIVGGWECEKHSQPWQVAVYSHGWAHCGGVLVHPQWVLTAAHCLKK

SEQ ID NO: 755856 - protein, 80 aa, Homo sapiens
IRGRIDAASRAARKRNGQTQVYANVSEMGIISSSPSEHWLSLKTSRSVSVRTHTKTWVTMLFVGCRDGRGVSTFLKGSFH

SEQ ID NO: 755857 - protein, 111 aa, Homo sapiens; identical to SEQ ID NO: 755842

SEQ ID NO: 755858 - protein, 263 aa, Homo sapiens
APNSPPGRGHLCQHVGPGSLHRLVCGVHWNSQVWLGRHNLFEPEDTGQRVPVSHSFPHPLYNMSLLKHQSLRPDEDSSHDLMLLRLSEPAKITDVVKVLGLPTQEPALGTTCYASGWGSIEPEEFLRPRSLQCVSLHLLSNDMCARAYSEKVTEFMLCAGLWTGGKDTCGVSHPYSQHLEGKGVILGVHLSVMVCFKVSHHGALSHVPCLKSLLCTPRWCITGSGSRTPSQPTPECPCPTPTSSKFKSTSRSGITWPFWMLDT

SEQ ID NO: 755859 - protein, 275 aa, Homo sapiens; identical to SEQ ID NO: 755841

SEQ ID NO: 755860 - protein, 275 aa, Homo sapiens; identical to SEQ ID NO: 755841

SEQ ID NO: 755861 - protein, 275 aa, Homo sapiens; identical to SEQ ID NO: 755841

SEQ ID NO: 755862 - protein, 127 aa, Homo sapiens
MSLLKHQSLRPDEDSSHDLMLLRLSEPAKITDVVKVLGLPTQEPALGTTCYASGWGSIEPEEFLRPRSLQCVSLHLLSNDMCARAYSEKVTEFMLCAGLWTGGKDTCGVSHPYSQHLEGKGMDRGIL

SEQ ID NO: 755863 - protein, 275 aa, Homo sapiens; identical to SEQ ID NO: 755841

SEQ ID NO: 755864 - protein, 253 aa, Homo sapiens; identical to SEQ ID NO: 755845

SEQ ID NO: 755865 - protein, 205 aa, Homo sapiens
  misc_feature (196)..(196): Xaa can be any naturally occurring amino acid
  misc_feature (198)..(198): Xaa can be any naturally occurring amino acid
MVMFKKIKSFEVVFNDPEKVYGSGEKVAGRVIVEVCEVTRVKAVRILACGVAKVLWMQGSQQCKQTSEYLRYEDTLLLEDQPTGENEMVIMRPGNKYEYKFGFELPQGPLGTSFKGKYGCVDYWVKAFLDRPSQPTQETKKNFEVVDLVDVNTPDLMAPVSAKKEKKVSCMFIPDGRVSVSARIDRKGFCEGERGXKXFHPMADF

SEQ ID NO: 755866 - protein, 138 aa, Homo sapiens
MPPKHSLSHRCILSVTASLMATRFSFPSGENEMVIMRPGNKYEYKFGFELPQGPLGTSFKGKYGCVDYWVKAFLDRPSQPTQETKKNFEVVDLVDVNTPDLMAPVSAKKEKKVSCMFIPDGRVSVSARIDRKGFCEGR

SEQ ID NO: 755867 - protein, 277 aa, Homo sapiens
MLNIHRTKFGKVNCVGLYAGLRCSYDLCIAIFSSLAKRLKRFYHLQACGEHEQEADKQGGKFLLYLVERIDRKGFCEGDEISIHADFENTCSRIVVPKAAIVARHTYLANGQTKVLTQKLSSVRGNHIISGTCASWRGKSLRVQKIRPSILGCNILRVEYSLLIYVSVPGSKKVILDLPLVIGSRSGLSSRTSSMASRTSSEMSWVDLNIPDTPEAPPCYMDVIPEDHRLESPTTPLLDDMDGSQDSPIFMYAPEFKFMPPPTYTEVDPCILNNNVQ

SEQ ID NO: 755868 - protein, 138 aa, Homo sapiens; identical to SEQ ID NO: 755866

SEQ ID NO: 755869 - protein, 138 aa, Homo sapiens; identical to SEQ ID NO: 755866

SEQ ID NO: 755870 - protein, 130 aa, Homo sapiens
  misc_feature (15)..(15): Xaa can be any naturally occurring amino acid
GTSALLVSFEVEYSXEIYVSVPGSKKVILDLPLVIGSRSGLSSRTSSMASRTSSEMSWVDLNIPDTPEAPPCYMDVIPEDHRLESPTTPLLDDMDGSQDSPIFMYAPEFKFMPPPTYTEVDPCILNNNVQ

SEQ ID NO: 755871 - protein, 263 aa, Homo sapiens
MFIPDGRVSVSARIDRKGFCEGDEISIHADFENTCSRIVVPKAAIVARHTYLANGQTKVLTQKLSSVRGNHIISGTCASWRGKSLRVQKIRPSILGCNILRVEYSLLIYVSVPGSKKVILDLPLVIGSRSGLSSRTSSMASRTSSEMSWVDLNIPDTPEAPPCYMDVIPEDHRLESPTTPLLDDMDGSQDSPIFMYAPEFKFMPPPTYTELILRWIPASSTTMCSEHVEEKKQLYLLVSFCLSSWTLTFSETQQSLQWSVGPP

SEQ ID NO: 755872 - protein, 214 aa, Homo sapiens
MFIPDGRVSVSARIDRKGFCEGDEISIHADFENTCSRIVVPKAAIVARHTYLANGQTKVLTQKLSSVRGNHIISGTCASWRGKSLRVQKIRPSILGCNILRVEYSLLIYVSVPGSKKVILDLPLVIGSRSGLSSRTSSMASRTSSEMSWVDLNIPDTPEAPPCYMDVIPEDHRLESPTTPLLDDMDGSQDSPIFMYAPEFKFMPPPTYTELILR

SEQ ID NO: 755873 - protein, 241 aa, Homo sapiens
MATRFSFPSGENEMVIMRPGNKYEYKFGFELPQGPLGTSFKGKYGCVDYWVKAFLDRPSQPTQETKKNFEVVDLVDVNTPDLMAPVSAKKEKKVSCMFIPDGRVSVSARIDRKGFCEGDEISIHADFENTCSRIVVPKAAIVARHTYLANGQTKVLTQKLSSVRGNHIISGTCASWRGKSLRVQKIRPSILGCNILRVEYSLLVGRCRVASAEKLFICYHSCLVSPDLWCNKLPSSFLDLC

SEQ ID NO: 755874 - protein, 89 aa, Homo sapiens
KLRLGTRLGVNSARMSWVDLNIPDTPEAPPCYMDVIPEDHRLESPTTPLLDDMDGSQDSPIFMYAPEFKFMPPPTYTEVDPCILNNNVQ

SEQ ID NO: 755875 - protein, 77 aa, Homo sapiens
RVGLVAYWNIPDTPEAPPCYMDVIPEDHRLESPTTPLLDDMDGSQDSPIFMYAPEFKFMPPPTYTEVDPCILNNNVQ

SEQ ID NO: 755876 - protein, 245 aa, Homo sapiens
MFIPDGRVSVSARIDRKGFCEGDEISIHADFENTCSRIVVPKAAIVARHTYLANGQTKVLTQKLSSVRGNHIISGTCASWRGKSLRVQKIRPSILGCNILRVEYSLLIYVSVPGSKKVILDLPLVIGSRSGLSSRTSSMASRTSSEMSWVDLNIPDTPEAPPCYMDVIPEDHRLESPTTPLLDDMDGSQDSPIFMYAPEFKFMPPPTYTELILRWIPASSTTMCSEHVEDFSETQQSLQWSVGPP

SEQ ID NO: 755877 - protein, 221 aa, Homo sapiens [sequence omitted]

SEQ ID NO: 755878 - protein, 221 aa, Homo sapiens [sequence omitted]

SEQ ID NO: 755879 - protein, 221 aa, Homo sapiens [sequence omitted]

SEQ ID NO: 755880 - protein, 221 aa, Homo sapiens [sequence omitted]

SEQ ID NO: 755881 - protein, 214 aa, Homo sapiens; identical to SEQ ID NO: 755872

SEQ ID NO: 755882 - protein, 221 aa, Homo sapiens [sequence omitted]

SEQ ID NO: 755883 - protein, 221 aa, Homo sapiens [sequence omitted]

SEQ ID NO: 755884 - protein, 221 aa, Homo sapiens [sequence omitted]

SEQ ID NO: 755885 - protein, 221 aa, Homo sapiens [sequence omitted]

SEQ ID NO: 755886 - protein, 221 aa, Homo sapiens [sequence omitted]

SEQ ID NO: 755887 - protein, 221 aa, Homo sapiens [sequence omitted]

SEQ ID NO: 755888 - protein, 221 aa, Homo sapiens [sequence omitted]

SEQ ID NO: 755889 - protein, 336 aa, Homo sapiens
MFIPDGRVSVSARIDRKGFCEGDEISIHADFENTCSRIVVPKAAIVARHTYLANGQTKVLTQKLSSVRGNHIISGTCASWRGKSLRVQKIRPSILGCNILRVEYSLLIYVSVPGSKKVILDLPLVIGSRSGLSSRTSSMASRTSSEMSWVDLNIPDTPEVQRKYGCVDYWVKAFLDRPSQPIQETKKNFEVVDLVDVNTPDLMAPVSAKKERKVSCMFIPDGRVSVSARIDRKGFCEGDEISIHADFENTCSRIVSPKLPLCPPHLPCNGQTKVLTQKLSSVRGNHIISGTCASWRGKSLRVQKIRPSILGCNILRVEYSLLIYVSVPGSIFIKAL

SEQ ID NO: 755890 - protein, 263 aa, Homo sapiens; identical to SEQ ID NO: 755871

SEQ ID NO: 755891 - protein, 234 aa, Homo sapiens
MFIPDGRVSVSARIDRKGFCEGDEISIHADFENTCSRIVVPKAAIVARHTYLANGQTKVLTQKLSSVRGNHIISGTCASWRGKSLRVQKIRPSILGCNILRVEYSLLIYVSVPGSKKVILDLPLVIGSRSGLSSRTSSMASRTSSEMSWVDLNIPDTPEAPPCYMDVIPEDHRLESPTTPLLDDMDGSQDSPIFMYAPEFKFMPPPTYTESYIRKSEAKLDPHSIAETVESLKK

SEQ ID NO: 755892 - protein, 107 aa, Homo sapiens [sequence omitted]

SEQ ID NO: 755893 - protein, 138 aa, Homo sapiens; identical to SEQ ID NO: 755866

SEQ ID NO: 755894 - protein, 102 aa, Homo sapiens
MVMFKKIKSFEVVFNDPEKVYGSGEKVAGRVIVEVCEVTRVKAVRILACGVAKVLWMQGSQQCKQTSEYLRYEDTLLLEDQPTAAIALCSLSCVRALSSTLF

SEQ ID NO: 755895 - protein, 221 aa, Homo sapiens [sequence omitted]

SEQ ID NO: 755896 - protein, 107 aa, Homo sapiens [sequence omitted]

SEQ ID NO: 755897 - protein, 241 aa, Homo sapiens; identical to SEQ ID NO: 755873

SEQ ID NO: 755898 - protein, 194 aa, Homo sapiens
MHKWILTWILPTLLYRSCFHIICLVGTISLACNDMTPEQMATNVNCSSPERHTRSYDYMEGGDIRVRRLFCRTQWYLRIDKRGKVKGTQEMKNNYNIMEIRTVAVGIVAIKGVESEFYLAMNKEGKLYAKKECNEDCNFKELILENHYNTYASAKWTHNGGEMFVALNQKGIPVRGKKTKKEQKTAHFLPMAIT

SEQ ID NO: 755899 - protein, 196 aa, Homo sapiens
RAQWWPPRLVLKCRRVPGAPLGPGLLALSLSFLICTVGTSTVTLARQDGPGCGEGPRLRAGTYLVQGPETGSDSVPAGNFTSDPVSALQLKTTKEHTYIMEIRTVAVGIVAIKGVESEFYLAMNKEGKLYAKKECNEDCNFKELILENHYNTYASAKWTHNGGEMFVALNQKGIPVRGKKTKKEQKTAHFLPMAIT

SEQ ID NO: 755900 - protein, 97 aa, Homo sapiens
MHKWILTWILPTLLYRSCFHIICLVGTISLACNDMTPEQMATNVNCSSPERHTRSYDYMEGEDIRVRRLFCRTQWYLRIDKRGKVKGTQEMKNNYSK

SEQ ID NO: 755901 - protein, 102 aa, Homo sapiens
  misc_feature (10)..(10): Xaa can be any naturally occurring amino acid
GGDLDHGELXSPWFNTHSPLGLFSQQSSREICLFLFIYLRQSFALGCPGFLYSPSEKEQPIEQQDGSIVHWTMRDTIHISFAQFFLNQVFESLQMKKTFSKY

SEQ ID NO: 755902 - protein, 1173 aa, Homo sapiens
MSRGSIEIPLRDTDEVIELDFDQLPEGDEVISILKQEHTQLHIWIALALEYYKQGKTEEFVKLLEAARIDGNLDYRDHEKDQMTCLDTLAAYYVQQARKEKNKDNKKDLITQATLLYTMADKIIMYDQNHLLGRACFCLLEGDKMDQADAQFHFVLNQSPNNIPALLGKACISFNKKDYRGALAYYKKALRTNPGCPAEVRLGMGHCFVKLNKLEKARLAFSRALELNSKCVGALVGLAVLELNNKEADSIKNGVQLLSRAYTIDPSNPMVLNHLANHFFFKKDYSKVQHLALHAFHNTEVEAMQAESCYQLARSFHVQEDYDQAFQYYYQATQFASSSFVLPFFGLGQMYIYRGDKENASQCFEKVLKAYPNNYETMKILGSLYAASEDQEKRDIAKGHLKKVTEQYPDDVEAWIELAQILEQTDIQGALSAYGTATRILQEKVQADVPPEILNNVGALHFRLGNLGEAKKYFLASLDRAKAEAEHDEHYYNAISVTTSYNLARLYEAMCEFHEAEKLYKNILREHPNYVDCYLRLGAMARDKGNFYEASDWFKEALQINQDHPDAWSLIGNLHLAKQEWGPGQKKFERILKQPSTQSDTYSMLALGNVWLQTLHQPTRDREKEKRHQDRALAIYKQVLRNDAKNLYAANGIGAVLAHKGYFREARDVFAQVREATADISDVWLNLAHIYVEQKQYISAVQMYENCLRKFYKHQNTEVVLYLARALFKCGKLQECKQTLLKARHVAPSDTVLMFNVALVLQRLATSVLKDEKSNLKEVLNAVKELELAHRYFSYLSKVGDKMRFDLALAATEARQCSDLLSQAQYHVARARKQDEEERELRAKQEQEKELLRQKLLKEQEEKRLREKEEQKKLLEQRAQYVEKTKNILMFTGETEATKEKKRGGGGGRRSKKGGEFDEFVNDDTDDDLPISKKKKRRKGSGSEQEGEDEEGGERKKKKRRRHPKGEEGSDDDETENGPKPKKRRPPKAEKKKAPKPERLPPSMKGKIKSKAIISSSDDSSDEDKLKIADEGHPRNSNSNSDSDEDEQRKKCASSESDSDENQNKSGSEAGSPRRPRRQRSDQDSDSDQPSRKRRPSGSEQSDNESVQSGRSHSGVSENDSRPASPSAESDHESERGSDNEGSGQGSGNESEPEGSNNEASDRGSEHGSDDSD

SEQ ID NO: 755903 - protein, 146 aa, Homo sapiens
MSRGSIEIPLRDTDEVIELDFDQLPEGDEVISILKQEHTQLHIWIALALEYYKQGKTEEFVKLLEAARIDGNLDYRDHEKDQMTCLDTLAAYYVQQARKEKNKDNKKDLITQATLLYTMADKIIMYDQVKIKSNFFPFMKGEKHMK

SEQ ID NO: 755904 - protein, 137 aa, Homo sapiens
  misc_feature (120)..(120): Xaa can be any naturally occurring amino acid
  misc_feature (125)..(125): Xaa can be any naturally occurring amino acid
  misc_feature (133)..(133): Xaa can be any naturally occurring amino acid
MSRGSIEIPLRDTDEVIELDFDQLPEGDEVISILKQEHTQLHIWIALALEYYKQGKTEEFVKLLEAARIDGNLDYRDHEKDQMTCLDTLAAYYVQQARKEKEIKGTNLKKGIFYLPPGPXPFGLXITKWGPDXKNLI

SEQ ID NO: 755905 - protein, 1176 aa, Homo sapiens
MSRGSIEIPLRDTDEVIELDFDQLPEGDEVISILKQEHTQLHIWIALALEYYKQGKTEEFVKLLEAARIDGNLDYRDHEKDQMTCLDTLAAYYVQQARKEKNKDNKKDLITQATLLYTMADKIIMYDQNHLLGRACFCLLEGDKMDQADAQFHFVLNQSPNNIPALLGKACISFNKKDYRGALAYYKKALRTNPGCPAEVRLGMGHCFVKLNKLEKARLAFSRALELNSKCVGALVGLAVLELNNKEADSIKNGVQLLSRAYTIDPSNPMVLNHLANHFFFKKDYSKVQHLALHAFHNTEVEAMQAESCYQLARSFHVQEDYDQAFQYYYQATQFASSSFVLPFFGLGQMYIYRGDKENASQCFEKVLKAYPNNYETMKILGSLYAASEDQEKRDIAKGHLKKVTEQYPDDVEAWIELAQILEQTDIQGALSAYGTATRILQEKVQADVPPEILNNVGALHFRLGNLGEAKKYFLASLDRAKAEAEHDEHYYNAISVTTSYNLARLYEAMCEFHEAEKLYKNILREHPNYVDCYLRLGAMARDKGNFYEASDWFKEALQINQDHPDAWSLIGNLHLAKQEWGPGQKKFERILKQPSTQSDTYSMLALGNVWLQTLHQPTRDREKEKRHQDRALAIYKQVLRNDAKNLYAANGIGAVLAHKGYFREARDVFAQVREATADISDVWLNLAHIYVEQKQYISAVQMYENCLRKFYKHQNTEVVLYLARALFKCGKLQECKQTLLKARHVAPSDTVLMFNVALVLQRLATSVLKDEKSNLKEVLNAVKELELAHRYFSYLSKVGDKMRFDLALAATEARQCSDLLSQAQYHVARARKQDEEERELRAKQEQEKELLRQKLLKEQEEKRLREKEEQKKLLEQRAQYVEKTKNILMFTGETEATKEKKRGGGGGRRSKKGGEFDEFVNDDTDDDLPISKKKKRRKGSGSEQEGEDEEGGERKKKKRRRHPKGEEGSDDDETENGPKPKKRRPPKAEKKKAPKPERLPPSMKGKIKSKAIISSSDDSSDEDKLKIADEGRTNNERNVPHQRVIPMRTRTSLAARPAVPGGHEDSGQIRTQTVTSHPEREGPPVLSSLTMNLCSQGEATQEFLRTTLAQLLQVPNQITNRREDLIMRVLAKALEMNRNQRDPTMRPQIEAQNMGQMIVTRFYFINKLHLWRKLF

SEQ ID NO: 755906 - protein, 959 aa, Homo sapiens
MSRGSIEIPLRDTDEVIELDFDQLPEGDEVISILKQEHTQLHIWIALALEYYKQGKTEEFVKLLEAARIDGNLDYRDHEKDQMTCLDTLAAYYVQQARKEKNKDNKKDLITQATLLYTMADKIIMYDQNHLLGRACFCLLEGDKMDQADAQFHFVLNQSPNNIPALLGKACISFNKKDYRGALAYYKKALRTNPGCPAEVRLGMGHCFVKLNKLEKARLAFSRALELNSKCVGALVGLAVLELNNKEADSIKNGVQLLSRAYTIDPSNPMVLNHLANHFFFKKDYSKVQHLALHAFHNTEVEAMQAESCYQLARSFHVQEDYDQAFQYYYQATQFASSSFVLPFFGLGQMYIYRGDKENASQCFEKVLKAYPNNYETMKILGSLYAASEDQEKRDIAKGHLKKVTEQYPDDVEAWIELAQILEQTDIQGALSAYGTATRILQEKVQADVPPEILNNVGALHFRLGNLGEAKKYFLASLDRAKAEAEHDEHYYNAISVTTSYNLARLYEAMCEFHEAEKLYKNILREHPNYVDCYLRLGAMARDKGNFYEASDWFKEALQINQDHPDAWSLIGNLHLAKQEWGPGQKKFERILKQPSTQSDTYSMLALGNVWLQTLHQPTRDREKEKRHQDRALAIYKQVLRNDAKNEEKRLREKEEQKKLLEQRAQYVEKTKNILMFTGETEATKEKKRGGGGGRRSKKGGEFDEFVNDDTDDDLPISKKKKRRKGSGSEQEGEDEEGGERKKKKRRRHPKGEEGSDDDETENGPKPKKRRPPKAEKKKAPKPERLPPSMKGKIKSKAIISSSDDSSDEDKLKIADEGHPRNSNSNSDSDEDEQRKKCASSESDSDENQNKSGSEAGSPRRPRRQRSDQDSDSDQPSRKRRPSGSEQSDNESVQSGRSHSGVSENDSRPASPSAESDHESERGSDNEGSGQGSGNESEPEGSNNEASDRGSEHGSDDSD

SEQ ID NO: 755907 - protein, 566 aa, Homo sapiens
LTRLPLAEAGSTRDREKEKRHQDRALAIYKQVLRNDAKNLYAANGIGAVLAHKGYFREARDVFAQVREATADISDVWLNLAHIYVEQKQYISAVQMYENCLRKFYKHQNTEVVLYLARALFKCGKLQECKQTLLKARHVAPSDTVLMFNVALVLQRLATSVLKDEKSNLKEVLNAVKELELAHRYFSYLSKVGDKMRFDLALAATEARQCSDLLSQAQYHVARARKQDEEERELRAKQEQEKELLRQKLLKEQEEKRLREKEEQKKLLEQRAQYVEKTKNILMFTGETEATKEKKRGGGGGRRSKKGGEFDEFVNDDTDDDLPISKKKKRRKGSGSEQEGEDEEGGERKKKKRRRHPKGEEGSDDDETENGPKPKKRRPPKAEKKKAPKPERLPPSMKGKIKSKAIISSSDDSSDEDKLKIADEGHPRNSNSNSDSDEDEQRKKCASSESDSDENQNKSGSEAGSPRRPRRQRSDQDSDSDQPSRKRRPSGSEQSDNESVQSGRSHSGVSENDSRPASPSAESDHESERGSDNEGSGQGSGNESEPEGSNNEASDRGSEHGSDDSD

SEQ ID NO: 755908 - protein, 1173 aa, Homo sapiens; identical to SEQ ID NO: 755902

SEQ ID NO: 755909 - protein, 1173 aa, Homo sapiens; identical to SEQ ID NO: 755902

SEQ ID NO: 755910 - protein, 1173 aa, Homo sapiens; identical to SEQ ID NO: 755902

SEQ ID NO: 755911 - protein, 299 aa, Homo sapiens
KKAQGAFGGEPRGGRNSGIETEATKEKKRGGGGGRRSKKGGEFDEFVNDDTDDDLPISKKKKRRKGSGSEQEGEDEEGGERKKKKRRRHPKGEEGSDDDETENGPKPKKRRPPKAEKKKAPKPERLPPSMKGKIKSKAIISSSDDSSDEDKLKIADEGHPRNSNSNSDSDEDEQRKKCASSESDSDENQNKSGSEAGSPRRPRRQRSDQDSDSDQPSRKRRPSGSEQSDNESVQSGRSHSGVSENDSRPASPSAESDHESERGSDNEGSGQGSGNESEPEGSNNEASDRGSEHGSDDSD

SEQ ID NO: 755912 - protein, 1039 aa, Homo sapiens
MSRGSIEIPLRDTDEVIELDFDQLPEGDEVISILKQEHTQLHIWIALALEYYKQGKTEEFVKLLEAARIDGNLDYRDHEKDQMTCLDTLAAYYVQQARKEKNKDNKKDLITQATLLYTMADKIIMYDQNHLLGRACFCLLEGDKMDQADAQFHFVLNQSPNNIPALLGKACISFNKKDYRGALAYYKKALRTNPGCPAEVRLGMGHCFVKLNKLEKARLAFSRALELNSKCVGALVGLAVLELNNKEADSIKNGVQLLSRAYTIDPSNPMVLNHLANHFFFKKDYSKVQHLALHAFHNTEVEAMQAESCYQLARSFHVQEDYDQAFQYYYQATQFASSSFVLPFFGLGQMYIYRGDKENASQCFEKVLKAYPNNYETMKILGSLYAASEDQEKRDIAKGHLKKVTEQYPDDVEAWIELAQILEQTDIQGALSAYGTATRILQEKVQADVPPEILNNVGALHFRLGNLGEAKKYFLASLDRAKAEAEHDEHYYNAISVTTSYNLARLYEAMCEFHEAEKLYKNILREHPNYVDCYLRLGAMARDKGNFYEASDWFKEALQINQDHPDAWSLIGNLHLAKQEWGPGQKKFERILKQPSTQSDTYSMLALGNVWLQTLHQPTRDREKEKRHQDRALAIYKQVLRNDAKNLYAANGIGAVLAHKGYFREARDVFAQVREATADISDVWLNLAHIYVEQKQYISAVQMYENCLRKFYKHQNTEVVLYLARALFKCGKLQECKQTLLKARHVAPSDTVLMFNVALVLQRLATSVLKDEKSNLKEVLNAVKELELAHRYFSYLSKVGDKMRFDLALAATEARQCSDLLSQAQYHVARARKQDEEERELRAKQEQEKELLRQKLLKEQEEKRLREKEEQKKLLEQRAQYVEKTKNILMFTGETEATKEKKRGGGGGRRSKKGGEFDEFVNDDTDDDLPISKKKKRRKGSGSEQEGEDEEGGERKKKKRRRHSKGEERSLFVEKQKWGPKPKKRRAPQKRENKKGFQTENVVSLYVRGNKKSKTHIFFKGRLFRVEVFDGGRTNGWRS

SEQ ID NO: 755913 - protein, 138 aa, Homo sapiens
TTGWYGPGSKGTRTSLAARPAVPGGHEDSGQIRTQTVTSHPEREGPPVLSSLTMNLCSQGEATQEFLRTTLAQLLQVPNQITNRREDLIMRVLAKALEMNRNQRDPTMRPQIEAQNMGQMIVTRFYFINKLHLWRKLF

SEQ ID NO: 755914 - protein, 1017 aa, Homo sapiens
MSRGSIEIPLRDTDEVIELDFDQLPEGDEVISILKQEHTQLHIWIALALEYYKQGKTEEFVKLLEAARIDGNLDYRDHEKDQMTCLDTLAAYYVQQARKEKNKDNKKDLITQATLLYTMADKIIMYDQNHLLGRACFCLLEGDKMDQADAQFHFVLNQSPNNIPALLGKACISFNKKDYRGALAYYKKALRTNPGCPAEVRLGMGHCFVKLNKLEKARLAFSRALELNSKCVGALVGLAVLELNNKEADSIKNGVQLLSRAYTIDPSNPMVLNHLANHFFFKKDYSKVQHLALHAFHNTEVEAMQAESCYQLARSFHVQEDYDQAFQYYYQATQFASSSFVLPFFGLGQMYIYRGDKENASQCFEKVLKAYPNNYETMKILGSLYAASEDQEKRDIAKGHLKKVTEQYPDDVEAWIELAQILEQTDIQGALSAYGTATRILQEKVQADVPPEILNNVGALHFRLGNLGEAKKYFLASLDRAKAEAEHDEHYYNAISVTTSYNLARLYEAMCEFHEAEKLYKNILREHPNYVDCYLRLGAMARDKGNFYEASDWFKEALQINQDHPDAWSLIGNLHLAKQEWGPGQKKFERILKQPSTQSDTYSMLALGNVWLQTLHQPTRDREKEKRHQDRALAIYKQVLRNDAKNLYAANGIGAVLAHKGYFREARDVFAQVREATADISDVWLNLAHIYVEQKQYISAVQMYENCLRKFYKHQNTEVVLYLARALFKCGKLQECKQTLLKARHVAPSDTVLMFNVALVLQRLATSVLKDEKSNLKEVLNAVKELELAHRYFSYLSKVGDKMRFDLALAATEARQCSDLLSQAQYHVARARKQDEEERELRAKQEQEKELLRQKLLKEQEEKRLREKEEQKKLLEQRAQYVEKTKNILMFTGETEATKEKKKRGGGGPRSKKGREVDEFGHGDTGDDPPLFQKKKRKKGVTKKAKKREVAGGKKKKSESLPKGENGLFVSKMKKARAIKNLSPKGTNKKGAKGQKVAPSPEGIIPRAISMWGPLGG

SEQ ID NO: 755915 - protein, 815 aa, Homo sapiens
MSRGSIEIPLRDTDEVIELDFDQLPEGDEVISILKQEHTQLHIWIALALEYYKQGKTEEFVKLLEAARIDGNLDYRDHEKDQMTCLDTLAAYYVQQARKEKNKDNKKDLITQATLLYTMADKIIMYDQNHLLGRACFCLLEGDKMDQADAQFHFVLNQSPNNIPALLGKACISFNKKDYRGALAYYKKALRTNPGCPAEVRLGMGHCFVKLNKLEKARLAFSRALELNSKCVGALVGLAVLELNNKEADSIKNGVQLLSRAYTIDPSNPMVLNHLANHFFFKKDYSKVQHLALHAFHNTEVEAMQAESCYQLARSFHVQEDYDQAFQYYYQATQFASSSFVLPFFGLGQMYIYRGDKENASQCFEKVLKAYPNNYETMKILGSLYAASEDQEKRDIAKGHLKKVTEQYPDDVEAWIELAQILEQTDIQGALSAYGTATRILQEKVQADVPPEILNNVGALHFRLGNLGEAKKYFLASLDRAKAEAEHDEHYYNAISVTTSYNLARLYEAMCEFHEAEKLYKNILREHPNYVDCYLRLGAMARDKGNFYEASDWFKEALQINQDHPDAWSLIGNLHLAKQEWGPGQKKFERILKQPSTQSDTYSMLALGNVWLQTLHQPTRDREKEKRHQDRALAIYKQVLRNDAKNLYAANGIGAVLAHKGYFREARDVFAQVREATADISDVWLNLAHIYVEQKQYISAVQMYENCLRKFYKHQNTEVVLYLARALFKCGKLQECKQTLLKARHVAPSDTVLMFNVALVLQRLATSVLKDEKSNLKEVLNAVKELELAHRYFSYLSKVGDKMRFDLALAATEAR

SEQ ID NO: 755916 - protein, 997 aa, Homo sapiens [sequence omitted]

SEQ ID NO: 755917 - protein, 990 aa, Homo sapiens
MSRGSIEIPLRDTDEVIELDFDQLPEGDEVISILKQEHTQLHIWIALALEYYKQGKTEEFVKLLEAARIDGNLDYRDHEKDQMTCLDTLAAYYVQQARKEKNKDNKKDLITQATLLYTMADKIIMYDQNHLLGRACFCLLEGDKMDQADAQFHFVLNQSPNNIPALLGKACISFNKKDYRGALAYYKKALRTNPGCPAEVRLGMGHCFVKLNKLEKARLAFSRALELNSKCVGALVGLAVLELNNKEADSIKNGVQLLSRAYTIDPSNPMVLNHLANHFFFKKDYSKVQHLALHAFHNTEVEAMQAESCYQLARSFHVQEDYDQAFQYYYQATQFASSSFVLPFFGLGQMYIYRGDKENASQCFEKVLKAYPNNYETMKILGSLYAASEDQEKRDIAKGHLKKVTEQYPDDVEAWIELAQILEQTDIQGALSAYGTATRILQEKVQADVPPEILNNVGALHFRLGNLGEAKKYFLASLDRAKAEAEHDEHYYNAISVTTSYNLARLYEAMCEFHEAEKLYKNILREHPNYVDCYLRLGAMARDKGNFYEASDWFKEALQINQDHPDAWSLIGNLHLAKQEWGPGQKKFERILKQPSTQSDTYSMLALGNVWLQTLHQPTRDREKEKRHQDRALAIYKQVLRNDAKNLYAANGIGAVLAHKGYFREARDVFAQVREATADISDVWLNLAHIYVEQKQYISAVQMYENCLRKFYKHQNTEVVLYLARALFKCGKLQECKQTLLKARHVAPSDTVLMFNVALVLQRLATSVLKDEKSNLKEVLNAVKELELAHRYFSYLSKVGDKMRFDLALAATEARQCSDLLSQAQYHVARARKQDEEERELRAKQEQEKELLRQKLLKEQEEKRLREKEEQKKLLEQRAQYVEKTKNILMFTGETEATKEKKRGGGGGRRSKKGGEFDEFVNDDTDDDLPISKKKKRRKGSGSEQEGEDEEGGERKKKKRRRPSKGKKFGFFEYPNGSKPKKPRRPINKG

SEQ ID NO: 755918 - protein, 1038 aa, Homo sapiens
MSRGSIEIPLRDTDEVIELDFDQLPEGDEVISILKQEHTQLHIWIALALEYYKQGKTEEFVKLLEAARIDGNLDYRDHEKDQMTCLDTLAAYYVQQARKEKNKDNKKDLITQATLLYTMADKIIMYDQNHLLGRACFCLLEGDKMDQADAQFHFVLNQSPNNIPALLGKACISFNKKDYRGALAYYKKALRTNPGCPAEVRLGMGHCFVKLNKLEKARLAFSRALELNSKCVGALVGLAVLELNNKEADSIKNGVQLLSRAYTIDPSNPMVLNHLANHFFFKKDYSKVQHLALHAFHNTEVEAMQAESCYQLARSFHVQEDYDQAFQYYYQATQFASSSFVLPFFGLGQMYIYRGDKENASQCFEKVLKAYPNNYETMKILGSLYAASEDQEKRDIAKGHLKKVTEQYPDDVEAWIELAQILEQTDIQGALSAYGTATRILQEKVQADVPPEILNNVGALHFRLGNLGEAKKYFLASLDRAKAEAEHDEHYYNAISVTTSYNLARLYEAMCEFHEAEKLYKNILREHPNYVDCYLRLGAMARDKGNFYEASDWFKEALQINQDHPDAWSLIGNLHLAKQEWGPGQKKFERILKQPSTQSDTYSMLALGNVWLQTLHQPTRDREKEKRHQDRALAIYKQVLRNDAKNLYAANGIGAVLAHKGYFREARDVFAQVREATADISDVWLNLAHIYVEQKQYISAVQMYENCLRKFYKHQNTEVVLYLARALFKCGKLQECKQTLLKARHVAPSDTVLMFNVALVLQRLATSVLKDEKSNLKEVLNAVKELELAHRYFSYLSKVGDKMRFDLALAATEARQCSDLLSQAQYHVARARKQDEEERELRAKQEQEKELLRQKLLKEQEEKRLREKEEQKKLLEQRAQYVEKTKNILMFTGETEATKEKKRGGGGGRRSKKGREVDEFGHGDTGDDPPLFQKKKRKKGVTKKAKKREVAGGKKKKSESLPKGENGLFVSKMKKARAIKNLSPKGTNKKGAKGQKVAPFGQGKIKNQALIPRRDGFWESDKFKFVLRAPGTGPGGPG

SEQ ID NO: 755919 - protein, 799 aa, Homo sapiens
MSRGSIEIPLRDTDEVIELDFDQLPEGDEVISILKQEHTQLHIWIALALEYYKQGKTEEFVKLLEAARIDGNLDYRDHEKDQMTCLDTLAAYYVQQARKEKNKDNKKDLITQATLLYTMADKIIMYDQNHLLGRACFCLLEGDKMDQADAQFHFVLNQSPNNIPALLGKACISFNKKDYRGALAYYKKALRTNPGCPAEVRLGMGHCFVKLNKLEKARLAFSRALELNSKCVGALVGLAVLELNNKEADSIKNGVQLLSRAYTIDPSNPMVLNHLANHFFFKKDYSKVQHLALHAFHNTEVEAMQAESCYQLARSFHVQEDYDQAFQYYYQATQFASSSFVLPFFGLGQMYIYRGDKENASQCFEKVLKAYPNNYETMKILGSLYAASEDQEKRDIAKGHLKKVTEQYPDDVEAWIELAQILEQTDIQGALSAYGTATRILQEKVQADVPPEILNNVGALHFRLGNLGEAKKYFLASLDRAKAEAEHDEHYYNAISVTTSYNLARLYEAMCEFHEAEKLYKNILREHPNYVDCYLRLGAMARDKGNFYEASDWFKEALQINQDHPDAWSLIGNLHLAKQEWGPGQKKFERILKQPSTQSDTYSMLALGNVWLQTLHQPTRDREKEKRHQDRALAIYKQVLRNDAKNLYAANGIGAVLAHKGYFREARDVFAQVREATADISDVWLNLAHIYVEQKQYISAVQMYENCLRKFYKHQNTEVVLYLARALFKCGKLQECKQTLLKARHVAPSDTVLMFNVALVLQRLATSVLKDEKSNLKEVLNAIETSKTRPSFRSFNSTY

SEQ ID NO: 755920 - protein, 139 aa, Homo sapiens
NSSGGRPILQVVSAWEGRCSRQRCRRLPLRELVRGSNFFPRLQCHIFSHGHPEGPDWKGEPAISRLGAPARLLVPMWPHPGCGSGGASGEGAGTRGRGPPRLGNGWLSESSGGPACPLLAGRPRWCRTRETLNLGPRNA

SEQ ID NO: 755921 - protein, 67 aa, Homo sapiens
NSSGGRPILQVVSAWEGRCSRQRCRRLPLRELVRGSNFFPRLQCHIFSHGHPEGPDWKGSQETMPAL

SEQ ID NO: 755922 - protein, 445 aa, Homo sapiens
MLLFVEQVASKGTGLNPNAKVWQEIAPGNTDATPVTHGTESSWHEIAATSGAHPEGNAELSEDICKEYEVMYSSSCETTRNTTGIEESTDGMILGPEDLSYQIYDVSGESNSAVSTEDLKECLKKQLEFCFSRENLSKDLYLISQMDSDQFIPIWTVANMEEIKKLTTDPDLILEVLRSSPMVQVDEKGEKVRPSHKRCIVILREIPETTPIEEVKGLFKSENCPKVISCEFAHNSNWYITFQSDTDAQQAFKYLREEVKTFQGKPIMARIKAINTFFAKNGYRLMDSSIYSHPIQTQAQYASPVFMQPVYNPHQQYSVYSIVPQSWSPNPTPYFETPLAPFPNGSFVNGFNSPGSYKTNAAAMNMGRPFQKNRVKPQFRSSGGSEHSTEGSVSLGDGQLNRYSSRNFPAERHNPTVTGHQEQTYLQKETSTLQVEQNGDYGRGR

SEQ ID NO: 755923 - protein, 375 aa, Homo sapiens
MYSSSCETTRNTTGIEESTDGMILGPEDLSYQIYDVSGESNSAVSTEDLKECLKKQLEFCFSRENLSKDLYLISQMDSDQFIPIWTVANMEEIKKLTTDPDLILEVLRSSPMVQVDEKGEKVRPSHKRCIVILREIPETTPIEEVKGLFKSENCPKVISCEFAHNSNWYITFQSDTDAQQAFKYLREEVKTFQGKPIMARIKAINTFFAKNGYRLMDSSIYSHPIQTQAQYASPVFMQPVYNPHQQYSVYSIVPQSWSPNPTPYFETPLAPFPNGSFVNGFNSPGSYKTNAAAMNMGRPFQKNRVKPQFRSSGGSEHSTEGSVSLGDGQLNRYSSRNFPAERHNPTVTGHQEQTYLQKETSTLQVEQNGDYGRGR

SEQ ID NO: 755924 - protein, 375 aa, Homo sapiens; identical to SEQ ID NO: 755923

SEQ ID NO: 755925 - protein, 280 aa, Homo sapiens
MLLFVEQVASKGTGLNPNAKVWQEIAPGNTDATPVTHGTESSWHEIAATSGAHPEGNAELSEDICKEYEVMYSSSCETTRNTTGIEESTDGMILGPEDLSYQIYDVSGESNSAVSTEDLKECLKKQLEFCFSRENLSKDLYLISQMDSDQFIPIWTVANMEEIKKLTTDPDLILEVLRSSPMVQVDEKGEKVRPSHKRCIVILREIPETTPIEEVKGLFKSENCPKVISCEFAHNSNWYITFQSDTDAQQAFKYLREEVKTFQGKPIMRRSFAVSSRLVS

SEQ ID NO: 755926 - protein, 375 aa, Homo sapiens; identical to SEQ ID NO: 755923

SEQ ID NO: 755927 - protein, 452 aa, Homo sapiens
LVANSARGLLFVEQVASKGTGLNPNAKVWQEIAPGNTDATPVTHGTESSWHEIAATSGAHPEGNAELSEDICKEYEVMYSSSCETTRNTTGIEESTDGMILGPEDLSYQIYDVSGESNSAVSTEDLKECLKKQLEFCFSRENLSKDLYLISQMDSDQFIPIWTVANMEEIKKLTTDPDLILEVLRSSPMVQVDEKGEKVRPSHKRCIVILREIPETTPIEEVKGLFKSENCPKVISCEFAHNSNWYITFQSDTDAQQAFKYLREEVKTFQGKPIMARIKAINTFFAKNGYRLMDSSIYSHPIQTQAQYASPVFMQPVYNPHQQYSVYSIVPQSWSPNPTPYFETPLAPFPNGSFVNGFNSPGSYKTNAAAMNMGRPFQKNRVKPQFRSSGGSEHSTEGSVSLGDGQLNRYSSRNFPAERHNPTVTGHQEQTYLQKETSTLQVEQNGDYGRGR

SEQ ID NO: 755928 - protein, 444 aa, Homo sapiens
MLLFVEQVASKGTGLNPNAKVWQEIAPGNTDATPVTHGTESSWHEIAATSGAHPEGNAELSEDICKEYEVMYSSSCETTRNTTGIEESTDGMILGPEDLSYQIYDVSGESNSAVSTEDLKECLKKQLEFCFSRENLSKDLYLISQMDSDQFIPIWTVANMEEIKKLTTDPDLILEVLRSSPMVQVDEKGEKVRPSHKRCIVILREIPETTPIEEVKGLFKSENCPKVISCEFAHNSNWYITFQSDTDAQQAFKYLREEVKTFQGKPIMARIKAINTFFAKNGYRLMDSSIYSHPIQTQAQYASPVFMQPVYNPHQQYSVYSIVPQSWSPNPTPYFETPLAPFPNGSFVNGFNSPGSYKTNAAAMNMGRPFQKNRVKPQFRSSGGSEHSTEGSVSLGDGQLNRYSSRNFPAERHNPTVTGHQELTPQGFSNYTRPHGRYRTFYKQ

SEQ ID NO: 755929 - protein, 133 aa, Homo sapiens
MRTKSSEKAANDDHSVRVAREDVRESCPPLGLETLKITDFQLHASTVKRYGLGAHRGRLNIQAGINENDFYDGAWCAGRNDLQQWIEVDARRLTRFTGVITQGRNSLWLSDWVTSYKVMVSNDSHTWVTVKNG

SEQ ID NO: 755930 - protein, 189 aa, Homo sapiens
MQAAAFREEEASGCRPCLLPALMAGLRPPRDEETEAEAVQQLAQGHAAGKHSNKKVMRTKSSEKAANDDHSVRVAREDVRESCPPLGLETLKITDFQLHASTVKRYGLGAHRGRLNIQAGINENDFYDGAWCAGRNDLQQWIEVDARRLTRFTGVITQGRNSLWLSDWVTSYKVMVSNDSHTWVTVKNG

SEQ ID NO: 755931 - protein, 178 aa, Homo sapiens
MDRAARCSGASSLPLLLALALGLVILHCVVADGNSTRSPETNGLLCGDPEENCAATTTQSKRKGHFSRCPKQYKHYCIKGRCRFVVAEQTPSCVCDEGYIGARCERVDLFYLRGDRGQILVICLIAVMVVFIILVIGVCTCCHPLRKRRKRKKKEEEMETLGKDITPINEDIEETNIA

SEQ ID NO: 755932 - protein, 129 aa, Homo sapiens
MDRAARCSGASSLPLLLALALGLVILHCVVADGNSTRSPETNGLLCGDPEENCAATTTQSKRKGHFSRCPKQYKHYCIKGRCRFVVAEQTPSCVPLRKRRKRKKKEEEMETLGKDITPINEDIEETNIA

SEQ ID NO: 755933 - protein, 110 aa, Homo sapiens
MDRAARCSGASSLPLLLALALGLVILHCVVADGNSTRSPETNGLLCGDPEENCAATSRISDAHLADTMIGKAVEHMFETEDGSKDEWRGMVLARAPVMNTWFYITYEKDP

SEQ ID NO: 755934 - protein, 176 aa, Homo sapiens
MLTSDEAAIGYEVWREFPDRLVGYPGRLHLWDHEMNKWKYESEWTNEVSMVLTGAAFYHKYFNYLYTYKMPGDIKNWVDAHMNCEDIAMNFLVANVTGKAVIKVTPRKKFKCPECTAIDGLSLDQTHMVERSECINKFASVFGTMPLKVVEHRADPVLYKDDFPEKLKSFPNIGSL

SEQ ID NO: 755935 - protein, 142 aa, Homo sapiens
MNKWKYESEWTNEVSMVLTGAAFYHKYFNYLYTYKMPGDIKNWVDAHMNCEDIAMNFLVANVTGKAVIKVTPRKKFKCPECTAIDGLSLDQTHMVERSECINKFASVFGTMPLKVVEHRADPVLYKDDFPEKLKSFPNIGSL

SEQ ID NO: 755936 - protein, 176 aa, Homo sapiens; identical to SEQ ID NO: 755934

SEQ ID NO: 755937 - protein, 400 aa, Homo sapiens
MASLSQLSSHLNYTCGAENSTGASQARPHAYYALSYCALILAIVFGNGLVCMAVLKERALQTTTNYLVVSLAVADLLVATLVMPWVVYLEVTGGVWNFSRICCDVFVTLDVMMCTASILNLCAISIDRYTAVVMPVHYQHGTGQSSCRRVALMITAVWVLAFAVSCPLLFGFNTTGDPTVCSISNPDFVIYSSVVSFYLPFGVTVLVYARIYVVLKQRRRKRILTRQNSQCNSVRPGFPQQTLSPDPAHLELKRYYSICQDTALGGPGFQERGGELKREEKTRNSLSPTIAPKLSLEVRKLSNGRLSTSLKLGPLQPRGVPLREKKATQMVAIVLGAFIVCWLPFFLTHVLNTHCQTCHVSPELYSATTWLGYVNSALNPVIYTTFNIEFRKAFLKILSC

SEQ ID NO: 755938 - protein, 342 aa, Homo sapiens
MASLSQLSSHLNYTCGAENSTGASQARPHAYYALSYCALILAIVFGNGLVCMAVLKERALQTTTNYLVVSLAVADLLVATLVMPWVVYLEVTGGVWNFSRICCDVFVTLDVMMCTASILNLCAISIDRYTAVVMPVHYQHGTGQSSCRRVALMITAVWVLAFAVSCPLLFGFNTTGDPTVCSISNPDFVIYSSVVSFYLPFGVTVLVYARIYVVLKQRRRKRILTRQNSQCNSVRPGFPQQTLSPDPAHLELKRYYSICQDTALGGPGFQERGGELKREEKTRNSLSATSGEEGNPNGGHCAWGLHCLLAALLLDPCSQYPLPDMPRVPRALQCHDMAGLRE

SEQ ID NO: 755939 - protein, 553 aa, Homo sapiens
HPEGDSSLEPSLILVIPGSKSPPFPAQLSTSAATSKIPTLIMLFPISMSATEFLLASVIFCLVFWVIRASRPQVPKGLKNPPGPWGWPLIGHMLTLGKNPHLALSRMSQQYGDVLQIRIGSTPVVVLSGLDTIRQALVRQGDDFKGRPDLYTFTLISNGQSMSFSPDSGPVWAARRRLAQNGLKSFSIASDPASSTSCYLEEHVSKEAEVLISTLQELMAGPGHFNPYRYVVVSVTNVICAICFGRRYDHNHQELLSLVNLNNNFGEVVGSGNPADFIPILRYLPNPSLNAFKDLNEKFYSFMQKMVKEHYKTFEKGHIRDITDSLIEHCQEKQLDENANVQLSDEKIINIVLDLFGAGFDTVTTAISWSLMYLVMNPRVQRKIQEELDTVIGRSRRPRLSDRSHLPYMEAFILETFRHSSFVPFTIPHSTTRDTSLKGFYIPKGRCVFVNQWQINHDQKLWVNPSEFLPERFLTPDGAIDKVLSEKVIIFGMGKRKCIGETIARWEVFLFLAILLQRVEFSVPLGVKVDMTPIYGLTMKHACCEHFQMQLRS

SEQ ID NO: 755940 - protein, 553 aa, Homo sapiens; identical to SEQ ID NO: 755939

SEQ ID NO: 755941 - protein, 261 aa, Homo sapiens
EAKKGMLSGLPILEDTSLKFTNTSSNNQVSIDSLIEHCQEKQLDENANVQLSDEKIINIVLDLFGAGFDTVTTAISWSLMYLVMNPRVQRKIQEELDTVIGRSRRPRLSDRSHLPYMEAFILETFRHSSFVPFTIPHSTTRDTSLKGFYIPKGRCVFVNQWQINHDQKLWVNPSEFLPERFLTPDGAIDKVLSEKVIIFGMGKRKCIGETIARWEVFLFLAILLQRVEFSVPLGVKVDMTPIYGLTMKHACCEHFQMQLRS

SEQ ID NO: 755942 - protein, 198 aa, Homo sapiens
MALRHLALLAGLLVGVASKSMENTAQLPECCVDVVGVNASCPGASLCGPGCYRRWNADGSASCVRCGNGTLPAYNGSECRSFAGPGAPFPMNRSSGTPGRPHPGAPRVAASLFLGTFFISSGLILSVAGFFYLKRSSKLPRACYRRNKAPALQPGEAAAMIPPPQSSVRKPRYVRRERPLDRATDPAAFPGEARISNV

SEQ ID NO: 755943 - protein, 185 aa, Homo sapiens
MALRHLALLAGLLVGVASKSMENTAQLPECCVDVVGVNASCPGASLCGPGCYRRWNADGSASCVRCGNGTLPAYNGSECRSFAGPGAPFPMNRSSGTPGRPHPGAPRVAASLFLGTFFISSGLILSVAGFFYLKRSSKLPRACYRRNKGPAPAGSLPGRWSSQQFGPQAPALQPGEAVSNPHHPG

SEQ ID NO: 755944 - protein, 255 aa, Homo sapiens
MALRHLALLAGLLVGVASKSMENTAQLPECCVDVVGVNASCPGASLCGPGCYRRWNADGSASCVRCGNGTLPAYNGSECRSFAGPGAPFPMNRSSGTPGRPHPGAPRVAASLFLGTFFISSGLILSVAGFFYLKRSSKLPRACYRRNKAPALQPGEAAAMIPPPQSSDVGSAGKEDPHDRADPQYLLLLEVQLHPRTDAAGLRQALLSSHRFSGAGSGGPKSQPVRKPRYVRRERPLDRATDPAAFPGEARISNV

SEQ ID NO: 755945 - protein, 185 aa, Homo sapiens; identical to SEQ ID NO: 755943

SEQ ID NO: 755946 - protein, 198 aa, Homo sapiens; identical to SEQ ID NO: 755942

SEQ ID NO: 755947 - protein, 130 aa, Homo sapiens [sequence omitted]

SEQ ID NO: 755948 - protein, 197 aa, Homo sapiens
MSVVPILEGQPHSISLAPHAPPCGRLCASAPGMALRHLALLAGLLVGVASKSMENTAQLPECCVDVVGVNASCPGASLCGPGCYRRWNADGSASCVRCGNGTLPAYNGSECRSFAGPGAPFPMNRSSGTPGRPHPGAPRVAASLFLGTFFISSGLILSVAGFFYLKRSSKLPRACYRRNKAPALQPGEAVSNPHHPG

SEQ ID NO: 755949 - protein, 165 aa, Homo sapiens
MALRHLALLAGLLVGVASKSMENTAQLPECCVDVVGVNASCPGASLCGPGCYRRWNADGSASCVRCGNGTLPAYNGSECRSFAGPGAPFPMNRSSGTPGRPHPGAPRVAASLFLGTFFISSGLILSVAGFFYLKRSSKLPRACYRRNKAPALQPGEAVSNPHHPG

SEQ ID NO: 755950 - protein, 61 aa, Homo sapiens
MSVVPILEGQVRPCLHLAPPVPPKAPSLHSFTPPPFGSTFPVVALHPCHGPAPSPFNSVIC

SEQ ID NO: 755951 - protein, 87 aa, Homo sapiens
MVAVVDGAAETWWPWWMVLRHGGCGERCCRDMVAVVDGAAETWWLWWTVPRHGGRGGWCRDMVAVVNNAAADMVAVVNGAAETWWLW

SEQ ID NO: 755952 - protein, 124 aa, Homo sapiens
MRPQSFRSRPWGVRAPPGNTVRPQRLQPKLARSMGQVPLCLEKPGALLPCPPEPTAGRTPPAPPHPVARDPSENSEAGPRAVPAGARPVGRTQPRNQLPETRVPLGCPPAWRRPQARSHPFPEL

SEQ ID NO: 755953 - protein, 225 aa, Homo sapiens
KPASCDKAQDPSLPQLLAVLSFLGSKDPGVWVHSLLLSEIQESDQQPLPPPGPRSPELIPMELCRSLALLGGSLGLMFCLIALSTDFWFEAVGPTHSAHSGLWPTGHGDIISGYIHVTQTFSIMAVLWALVSVSFLVLSCFPSLFPPGHGPLVSTTAAFAAAISMVVAMAVYTSERWDQPPHPQIQTFFSWSFYLGWVSAILLLCTGALSLGAHCGGPRPGYETL

SEQ ID NO: 755954 - protein, 202 aa, Homo sapiens
KPASCDKAQDPSLPQLLAVLSFLGSKDPGVWVHSLLLSEIQESDQQPLPPPGPRSPELIPMELCRSLALLGGSLGLMFCLIALSTDFWFEAVGPTHSAHSGLWPTGHGDIISGHGPLVSTTAAFAAGKDSGLDWGIASQRIPAEELSHLSCPCPQPSPWWWPWRCTPASGGTSLHTPRSRPSSPGPSTWAGSQLSSCSVQVP

SEQ ID NO: 755955 - protein, 190 aa, Homo sapiens
KPASCDKAQDPSLPQLLAVLSFLGSKDPGVWVHSLLLSEIQESDQQPLPPPGPRSPELIPMELCRSLALLGGSLGLMFCLIALSTDFWFEAVGPTHSAHSGLWPTGHGDIISGHGPLVSTTAAFAAAISMVVAMAVYTSERWDQPPHPQIQTFFSWSFYLGWVSAILLLCTGALSLGAHCGGPRPGYETL

SEQ ID NO: 755956 - protein, 176 aa, Homo sapiens
KPASCDKAQDPSLPQLLAVLSFLGSKDPGVWVHSLLLSEIQESDQQPLPPPGPRSPELIPMELCRSLALLGGSLGLMFCLIALSTDFWFEAVGPTHSAHSGLWPTGHGDIISAISMVVAMAVYTSERWDQPPHPQIQTFFSWSFYLGWVSAILLLCTGALSLGAHCGGPRPGYETL

SEQ ID NO: 755957 - protein, 148 aa, Homo sapiens
KPASCDKAQDPSLPQLLAVLSFLGSKDPGVWVHSLLLSEIQESDQQPLPPPGPRSPELIPMELCRSLALLGGSLGLMFCLIALSTDFWFEAVGPTHSAHSGLWPTGHGDIISDLLLLVLLPGLGLSYPLALYRCPEPGCSLWRSPSWL

SEQ ID NO: 755958 - protein, 190 aa, Homo sapiens
RGPARSLWPLILRAPECAAGSSLQPRRVLAPRDRPGRPTNGVPAPRLLLHAFGSHGSGGLCMGQWATRCKANRVLPRRARELHASDSSWCTFPLFLSGGGALWVPGRSSRANRKALRAEWGGTEARKGRPNWSVRKVLGRGGEAASGGLAPPAVAMVTERAQLSVGASTGVLCCPSMGDQLRWEPVVSHT

SEQ ID NO: 755959 - protein, 190 aa, Homo sapiens; identical to SEQ ID NO: 755958

SEQ ID NO: 755960 - protein, 63 aa, Homo sapiens
PELCGAPETSRNAWKTSIMSVLSFPVFKQAILETPHFAGNKNPSSGRDVRDVSFLCGFALVVY

SEQ ID NO: 755961 - protein, 410 aa, Homo sapiens
MGTCWGDISENVRVEVPNTDCSLPTKVFWIAGIVKLAGYNALLRYEGFENDSGLDFWCNICGSDIHPVGWCAASGKPLVPPRTIQHKYTNWKAFLVKRLTGAKTLPPDFSQKVSESMQYPFKPCMRVEVVDKRHLCRTRVAVVESVIGGRLRLVYEESEDRTDDFWCHMHSPLIHHIGWSRSIGHRFKRSDITKKQDGHFDTPPHLFAKVKEVDQSGEWFKEGMKLEAIDPLNLSTICVATIRKVLADGFLMIGIDGSEAADGSDWFCYHATSPSIFPVGFCEINMIELTPPRGYTKLPFKWFDYLRETGSIAAPVKLFNKDVPNHGFRVGMKLEAVDLMEPRLICVATVTRIIHRLLRIHFDGWEEEYDQWVDCESPDLYPVGWCQLTGYQLQPPASQCKLVYRKGVLL

SEQ ID NO: 755962 - protein, 132 aa, Homo sapiens
CLSHSTADSEEHQEPAWGRTQGQSSIGGVMTTTASAKAVITTPIQTKRVSPRPVEMAGADTFQLSVGSWAECFTCIISFRPPTPARGVISITILQMKRLRLGEVREHIQGHPVNNVHLIHFTLISQLVSAGH

SEQ ID NO: 755963 - protein, 76 aa, Homo sapiens
AVGAGSGMYSLVAPALALHPMHSRCLASASGGSFDGPAGLSGSGGRHWESRSVPHTISSAACVFLPFAVALPMASD

SEQ ID NO: 755964 - protein, 134 aa, Homo sapiens
MRMLLHLSLLALGAAYVYAIPTEIPTSALVKETLALLSTHRTLLIANETLRIPVPVHKNHQLCTEEIFQGIGTLESQTVQGGTVERLFKNLSLIKKYIDGQKKKCGEERRRVNQFLDYLQEFLGVMNTEWIIES

SEQ ID NO: 755965 - protein, 326 aa, Homo sapiens
MNTMYVMMAQILRSHLIKATVIPNRVKMLPYFGIIRNRMMSTHKSKKKIREYYRLLNVEEGCSADEVRESFHKLAKQYHPDSGSNTADSATFIRIEKAYRKVLSHVIEQTNASQSKGEEEEDVEKFKYKTPQHRHYLSFEGIGFGTPTQREKHYRQFRADRAAEQVMEYQKQKLQSQYFPDSVIVKNIRQSKQQKITQAIERLVEDLIQESMAKGDFDNLSGKGKPLKKFSDCSYIDPMTHNLNRILIDNGYQPEWILKQKEISDTIEQLREAILVSRKKLGNPMTPTEKKQWNHVCEQFQENIRKLNKRINDFNCSHPDQAKSPF

SEQ ID NO: 755966 - protein, 326 aa, Homo sapiens; identical to SEQ ID NO: 755965

SEQ ID NO: 755967 - protein, 326 aa, Homo sapiens; identical to SEQ ID NO: 755965

SEQ ID NO: 755968 - protein, 810 aa, Homo sapiens
MIPVTELRYFADTQPAYRILKPWWDVFTDYISIVMLMIAVFGGTLQVTQDKMICLPCKWVTKDSCNDSFRGWAAPGPEPTYPNSTILPTPDTGPTGIKYDLDRHQYNYVDAVCYENRLHWFAKYFPYLVLLHTLIFLACSNFWFKFPRTSSKLEHFVSILLKCFDSPWTTRALSETVVEESDPKPAFSKMNGSMDKKSSTVSEDVEATVPMLQRTKSRIEQGIVDRSETGVLDKKEGEQAKALFEKVKKFRTHVEEGDIVYRLYMRQTIIKVIKFILIICYTVYYVHNIKFDVDCTVDIESLTGYRTYRCAHPLATLFKILASFYISLVIFYGLICMYTLWWMLRRSLKKYSFESIREESSYSDIPDVKNDFAFMLHLIDQYDPLYSKRFAVFLSEVSENKLRQLNLNNEWTLDKLRQRLTKNAQDKLELHLFMLSGIPDTVFDLVELEVLKLELIPDVTIPPSIAQLTGLKELWLYHTAAKIEAPALAFLRENLRALHIKFTDIKEIPLWIYSLKTLEELHLTGNLSAENNRYIVIDGLRELKRLKVLRLKSNLSKLPQVVTDVGVHLQKLSINNEGTKLIVLNSLKKMANLTELELIRCDLERIPHSIFSLHNLQEIDLKDNNLKTIEEIISFQHLHRLTCLKLWYNHIAYIPIQIGNLTNLERLYLNRNKIEKIPTQLFYCRKLRYLDLSHNNLTFLPADIGLLQNLQNLAITANRIETLPPELFQCRKLRALHLGNNVLQSLPSRVGELTNLTQIELRGNRLECLPVELGECPLLKRSGLVVEEDLFNTLPPEVKERLWRADKEQA

SEQ ID NO: 755969 - protein, 297 aa, Homo sapiens
MACLSPSQLQKFQQDGFLVLEGFLSAEECVAMQQRIGEIVAEMDVPLHCRTEFSTQEEEQLRAQGSTDYFLSSGDKIRFFFEKGVFDEKGNFLVPPEKSINKIGHALHAHDPVFKSITHSFKVQTLARSLGLQMPVVVQSMYIFKSPLIRTPPSCTRSPWAGCWACGSQWRMPRWRTAVSGSSLAPTPVVCQEGWSGPLLAQRLVPASLGQSQPGITASLCPPQCREGPWSSSMEKWYTRASRTSLTARARPTLSTSWRPLAPPGARRTGSSQQLNCPFPNCTPKGSRRAGALAPPG

SEQ ID NO: 755970 - protein, 810 aa, Homo sapiens; identical to SEQ ID NO: 755968

SEQ ID NO: 755971 - protein, 810 aa, Homo sapiens; identical to SEQ ID NO: 755968

SEQ ID NO: 755972 - protein, 810 aa, Homo sapiens; identical to SEQ ID NO: 755968

SEQ ID NO: 755973 - protein, 810 aa, Homo sapiens; identical to SEQ ID NO: 755968

SEQ ID NO: 755974 - protein, 810 aa, Homo sapiens; identical to SEQ ID NO: 755968

SEQ ID NO: 755975 - protein, 810 aa, Homo sapiens; identical to SEQ ID NO: 755968

SEQ ID NO: 755976 - protein, 325 aa, Homo sapiens
  misc_feature (8)..(8): Xaa can be any naturally occurring amino acid
TDELNPRXRNSGTEQSFTDIKEIPLWIYSLKTLEELHLTGNLSAENNRYIVIDGLRELKRLKVLRLKSNLSKLPQVVTDVGVHLQKLSINNEGTKLIVLNSLKKMANLTELELIRCDLERIPHSIFSLHNLQEIDLKDNNLKTIEEIISFQHLHRLTCLKLWYNHIAYIPIQIGNLTNLERLYLNRNKIEKIPTQLFYCRKLRYLDLSHNNLTFLPADIGLLQNLQNLAITANRIETLPPELFQCRKLRALHLGNNVLQSLPSRVGELTNLTQIELRGNRLECLPVELGECPLLKRSGLVVEEDLFNTLPPEVKERLWRADKEQA

SEQ ID NO: 755977 - protein, 810 aa, Homo sapiens; identical to SEQ ID NO: 755968

SEQ ID NO: 755978 - protein, 733 aa, Homo sapiens
MIPVTELRYFADTQPAYRILKPWWDVFTDYISIVMLMIAVFGGTLQVTQDKMICLPCKWVTKDSCNDSFRGWAAPGPEPTYPNSTILPTPDTGPTGIKYDLDRHQYNYVDAVCYENRLHWFAKYFPYLVLLHTLIFLACSNFWFKFPRTSSKLEHFVSILLKCFDSPWTTRALSETVVEESDPKPAFSKMNGSMDKKSSTVSEDVEATVPMLQRTKSRIEQGIVDRSETGVLDKKEGEQAKALFEKVKKFRTHVEEGDIVYRLYMRQTIIKVIKFILIICYTVYYVHNIKFDVDCTVDIESLTGYRTYRCAHPLATLFKILASFYISLVIFYGLICMYTLWWMLRRSLKKYSFESIREESSYSDIPDVKNDFAFMLHLIDQYDPLYSKRFAVFLSEVSENKLRQLNLNNEWTLDKLRQRLTKNAQDKLELHLFMLSGIPDTVFDLVELEVLKLELIPDVTIPPSIAQLTGLKELWLYHTAAKIEAPALAFLRENLRALHIKFTDIKEIPLWIYSLKTLEELHLTGNLSAENNRYIVIDGLRELKRLKVLRLKSNLSKLPQVVTDVGVHLQKLSINNEGTKLIVLNSLKKMANLTELELIRCDLERIPHSIFSLHNLQEIDLKDNNLKTIEEIISFQHLHRLTCLKLWYNHIAYIPIQIGNLTNLERLYLNRNKIEKIPTQLFYCRKLRYLDLSHNNLTFLPADIGLLQNLQNLAITANRHLHRLTCLSCVRLR

SEQ ID NO: 755979 - protein, 702 aa, Homo sapiens
MIPVTELRYFADTQPAYRILKPWWDVFTDYISIVMLMIAVFGGTLQVTQDKMICLPCKWVTKDSCNDSFRGWAAPGPEPTYPNSTILPTPDTGPTGIKYDLDRHQYNYVDAVCYENRLHWFAKYFPYLVLLHTLIFLACSNFWFKFPRTSSKLEHFVSILLKCFDSPWTTRALSETVVEESDPKPAFSKMNGSMDKKSSTVSEDVEATVPMLQRTKSRIEQGIVDRSETGVLDKKEGEQAKALFEKVKKFRTHVEEGDIVYRLYMRQTIIKVIKFILIICYTVYYVHNIKFDVDCTVDIESLTGYRTYRCAHPLATLFKILASFYISLVIFYGLICMYTLWWMLRRSLKKYSFESIREESSYSDIPDVKNDFAFMLHLIDQYDPLYSKRFAVFLSEVSENKLRQLNLNNEWTLDKLRQRLTKNAQDKLELHLFMLSGIPDTVFDLVELEVLKLELIPDVTIPPSIAQLTGLKELWLYHTAAKIEAPALAFLRENLRALHIKFTDIKEIPLWIYSLKTLEELHLTGNLSAENNRYIVIDGLRELKRLKVLRLKSNLSKLPQVVTDVGVHLQKLSINNEGTKLIVLNSLKKMANLTELELIRCDLERIPHSIFSLHNLQEIDLKDNNLKTIEEIISFQHLHRLTCLKLWYNHIAYIPIQIGNLTNLERLYLNRNKIEKIPTQLFYCRKLRYLDLSLVSMGSSKS

SEQ ID NO: 755980 - protein, 291 aa, Homo sapiens
MACLSPSQLQKFQQDGFLVLEGFLSAEECVAMQQRIGEIVAEMDVPLHCRTEFSTQEEEQLRAQGSTDYFLSSGDKIRFFFEKGVFDEKGNFLVPPEKSINKIGHALHAHDPVFKSITHSFKVQTLARSLGLQMPVVVQSMYIFKQPHFGGEVSPHQDASFLYTEPLGRVLGVWIAVEDATLENGCLWFIPGSHTSGVSRRMVRAPVGSAPGTSFLGSEPARDNSLFVPTPVQRGALVLIHGEVVHKSKQNLSDRSRQAYTFHLMEASGTTWSPENWLQPTAELPFPQLYT

SEQ ID NO: 755981 - protein, 114 aa, Homo sapiens
ELGTQRLNGEIGTLLHCWWECKLVQPLWKTVWQFLKDLEPEIPFDPAIPLLGSQRNINHPSASVRGWSGMGRSPLGGQALVPSRFPSLAPGVHTAQSAPGGWKPPCFRSLGSPP

SEQ ID NO: 755982 - protein, 291 aa, Homo sapiens; identical to SEQ ID NO: 755980

SEQ ID NO: 755983 - protein, 270 aa, Homo sapiens
MACLSPSQLQKFQQDGFLVLEGFLSAEECVAMQQRIGEIVAEMDVPLHCRTEFSTQEEEQLRAQGSTDYFLSSGDKIRFFFEKGVFDEKGNFLVPPEKSINKIGHALHAHDPVFKSITHSFKVQQPHFGGEVSPHQDASFLYTEPLGRVLGVWIAVEDATLENGCLWFIPGSHTSGVSRRMVRAPVGSAPGTSFLGSEPARDNSLFVPTPVQRGALVLIHGEVVHKSKQNLSDRSRQAYTFHLMEASGTTWSPENWLQPTAELPFPQLYT

SEQ ID NO: 755984 - protein, 112 aa, Homo sapiens
MGSSLGAAGSRSLGKRPSPGDGRARVAWGTQRNVLSIWSPAVILGFSYCVLLQGLSNPQNSLSFLPPVSFSASEIRTICVTPTLNFRKTCIMWCNQTRGFSDDLLTSSMWIR

SEQ ID NO: 755985 - protein, 1738 aa, Homo sapiens
MKSRPTKQKLKQRGILKERVFGCDLGEHLLNSGFEVPQVLQSCTAFIERYGIVDGIYRLSGVASNIQRLRHEFDSEHVPDLTKEPYVQDIHSVGSLCKLYFRELPNPLLTYQLYEKFSDAVSAATDEERLIKIHDVIQQLPPPHYRTLEFLMRHLSLLADYCSITNMHAKNLAIVWAPNLLRSKQIESACFSGTAAFMEVRIQSVVVEFILNHVDVLFSGRISMAMQEGAASLSRPKSLLVSSPSTKLLTLEEAQARTQAQVNSPIVTENKYIEVGEGPAALQGKFHTIIEFPLERKRPQNKMKKSPVGSWRSFFNLGKSSSVSKRKLQRNESEPSEMKAMALKGGRAEGTLRSAKSEESLTSLHAVDGDSKLFRPRRPRSSSDALSASFNGEMLGNRCNSYDNLPHDNESEEEGGLLHIPALMSPHSAEDVDLSPPDIGVASLDFDPMSFQCSPPKAESECLESGASFLDSPGYSKDKPSANKKDAETGSSQCQTPGSTASSEPVSPLQEKLSPFFTLDLSPTEDKSSKPSSFTEKVVYAFSPKIGRKLSKSPSMSISEPISVTLPPRVSEVIGTVSNTTAQNASSSTWDKCVEERDATNRSPTQIVKMKTNETVAQEAYESEVQPLDQVAAEEVELPGKEDQSVSSSQSKAVASGQTQTGAVTHDPPQDSVPVSSVSLIPPPPPPKNVARMLALALAESAQQASTQSLKRPGTSQAGYTNYGDIAVATTEDNLSSSYSAVALDKAYFQTDRPAEQFHLQNNAPGNCDHPLPETTATGDPTHSNTTESGEQHHQVDLTGNQPHQAYLSGDPEKARITSVPLDSEKSDDHVSFPEDQSGKNSMPTVSFLDQDQSPPRFYSGDQPPSYLGASVDKLHHPLEFADKSPTPPNLPSDKIYPPSGSPEENTSTATMTYMTTTPATAQMSTKEASWDVAEQPTTADFAAATLQRTHRTNRPLPPPPSQRSAEQPPVVGQVQAATNIGLNNSHKVQGVVPVPERPPEPRAMDDPASAFISDSGAAAAQCPMATAVQPGLPEKVRDGARVPLLHLRAESVPAHPCGFPAPLPPTRMMESKMIAAIHSSSADATSSSNYHSFVTASSTSVDDALPLPLPVPQPKHASQKTVYSSFARPDVTTEPFGPDNCLHFNMTPNCQYRPQSVPPHHNKLEQHQVYGARSEPPASMGLRYNTYVAPGRNASGHHSKPCSRVEYVSSLSSSVRNTCYPEDIPPYPTIRRVQSLHAPPSSMIRSVPISRTEVPPDDEPAYCPRPLYQYKPYQSSQARSDYHVTQLQPYFENGRVHYRYSPYSSSSSSYYSPDGALCDVDAYGTVQLRPLHRLPNRDFAFYNPRLQGKSLYSYAGLAPRPRANVTGYFSPNDHNVVSMPPAADVKHTYTSWDLEDMEKYRMQSIRRESRARQKVKGPVMSQYDNMTPAVQDDLGGIYVIHLRSKSDPGKTGLLSVAEGKESRHAAKAISPEGEDRFYRRHPEAEMDRAHHHGGHGSTQPEKPSLPQKQSSLRSRKLPDMGCSLPEHRAHQEASHRQFCESKNGPPYPQGAGQLDYGSKGIPDTSEPVSYHNSGVKYAASGQESLRLNHKEVRLSKEMERPWVRQPSAPEKHSRDCYKEEEHLTQSIVPPPKPERSHSLKLHHTQNVERDPSVLYQYQPHGKRQSSVTVVSQYDNLEDYHSLPQHQRGVFGGGGMGTYVPPGFPHPQSRTYATALGQGAFLPAELSLQHPETQIHAE

SEQ ID NO: 755986 - protein, 1829 aa, Homo sapiens
PAVGAAHVIKRYTARAPDELTLEVGDIVSVIDMPPKVLSTWWRGKHGFQVGLFPGHCVELINQKVPQSVTNSVPKPVSKKHGKLITFLRTFMKSRPTKQKLKQRGILKERVFGCDLGEHLLNSGFEVPQVLQSCTAFIERYGIVDGIYRLSGVASNIQRLRHEFDSEHVPDLTKEPYVQDIHSVGSLCKLYFRELPNPLLTYQLYEKFSDAVSAATDEERLIKIHDVIQQLPPPHYRTLEFLMRHLSLLADYCSITNMHAKNLAIVWAPNLLRSKQIESACFSGTAAFMEVRIQSVVVEFILNHVDVLFSGRISMAMQEGAASLSRPKSLLVSSPSTKLLTLEEAQARTQAQVNSPIVTENKYIEVGEGPAALQGKFHTIIEFPLERKRPQNKMKKSPVGSWRSFFNLGKSSSVSKRKLQRNESEPSEMKAMALKGGRAEGTLRSAKSEESLTSLHAVDGDSKLFRPRRPRSSSDALSASFNGEMLGNRCNSYDNLPHDNESEEEGGLLHIPALMSPHSAEDVDLSPPDIGVASLDFDPMSFQCSPPKAESECLESGASFLDSPGYSKDKPSANKKDAETGSSQCQTPGSTASSEPVSPLQEKLSPFFTLDLSPTEDKSSKPSSFTEKVVYAFSPKIGRKLSKSPSMSISEPISVTLPPRVSEVIGTVSNTTAQNASSSTWDKCVEERDATNRSPTQIVKMKTNETVAQEAYESEVQPLDQVAAEEVELPGKEDQSVSSSQSKAVASGQTQTGAVTHDPPQDSVPVSSVSLIPPPPPPKNVARMLALALAESAQQASTQSLKRPGTSQAGYTNYGDIAVATTEDNLSSSYSAVALDKAYFQTDRPAEQFHLQNNAPGNCDHPLPETTATGDPTHSNTTESGEQHHQVDLTGNQPHQAYLSGDPEKARITSVPLDSEKSDDHVSFPEDQSGKNSMPTVSFLDQDQSPPRFYSGDQPPSYLGASVDKLHHPLEFADKSPTPPNLPSDKIYPPSGSPEENTSTATMTYMTTTPATAQMSTKEASWDVAEQPTTADFAAATLQRTHRTNRPLPPPPSQRSAEQPPVVGQVQAATNIGLNNSHKVQGVVPVPERPPEPRAMDDPASAFISDSGAAAAQCPMATAVQPGLPEKVRDGARVPLLHLRAESVPAHPCGFPAPLPPTRMMESKMIAAIHSSSADATSSSNYHSFVTASSTSVDDALPLPLPVPQPKHASQKTVYSSFARPDVTTEPFGPDNCLHFNMTPNCQYRPQSVPPHHNKLEQHQVYGARSEPPASMGLRYNTYVAPGRNASGHHSKPCSRVEYVSSLSSSVRNTCYPEDIPPYPTIRRVQSLHAPPSSMIRSVPISRTEVPPDDEPAYCPRPLYQYKPYQSSQARSDYHVTQLQPYFENGRVHYRYSPYSSSSSSYYSPDGALCDVDAYGTVQLRPLHRLPNRDFAFYNPRLQGKSLYSYAGLAPRPRANVTGYFSPNDHNVVSMPPAADVKHTYTSWDLEDMEKYRMQSIRRESRARQKVKGPVMSQYDNMTPAVQDDLGGIYVIHLRSKSDPGKTGLLSVAEGKESRHAAKAISPEGEDRFYRRHPEAEMDRAHHHGGHGSTQPEKPSLPQKQSSLRSRKLPDMGCSLPEHRAHQEASHRQFCESKNGPPYPQGAGQLDYGSKGIPDTSEPVSYHNSGVKYAASGQESLRLNHKEVRLSKEMERPWVRQPSAPEKHSRDCYKEEEHLTQSIVPPPKPERSHSLKLHHTQNVERDPSVLYQYQPHGKRQSSVTVVSQYDNLEDYHSLPQHQRGVFGGGGMGTYVPPGFPHPQSRTYATALGQGAFLPAELSLQHPETQIHAE

SEQ ID NO: 755987 - protein, 1046 aa, Homo sapiens
MLALALAESAQQASTQSLKRPGTSQAGYTNYGDIAVATTEDNLSSSYSAVALDKAYFQTDRPAEQFHLQNNAPGNCDHPLPETTATGDPTHSNTTESGEQHHQVDLTGNQPHQAYLSGDPEKARITSVPLDSEKSDDHVSFPEDQSGKNSMPTVSFLDQDQSPPRFYSGDQPPSYLGASVDKLHHPLEFADKSPTPPNLPSDKIYPPSGSPEENTSTATMTYMTTTPATAQMSTKEASWDVAEQPTTADFAAATLQRTHRTNRPLPPPPSQRSAEQPPVVGQVQAATNIGLNNSHKVQGVVPVPERPPEPRAMDDPASAFISDSGAAAAQCPMATAVQPGLPEKVRDGARVPLLHLRAESVPAHPCGFPAPLPPTRMMESKMIAAIHSSSADATSSSNYHSFVTASSTSVDDALPLPLPVPQPKHASQKTVYSSFARPDVTTEPFGPDNCLHFNMTPNCQYRPQSVPPHHNKLEQHQVYGARSEPPASMGLRYNTYVAPGRNASGHHSKPCSRVEYVSSLSSSVRNTCYPEDIPPYPTIRRVQSLHAPPSSMIRSVPISRTEVPPDDEPAYCPRPLYQYKPYQSSQARSDYHVTQLQPYFENGRVHYRYSPYSSSSSSYYSPDGALCDVDAYGTVQLRPLHRLPNRDFAFYNPRLQGKSLYSYAGLAPRPRANVTGYFSPNDHNVVSMPPAADVKHTYTSWDLEDMEKYRMQSIRRESRARQKVKGPVMSQYDNMTPAVQDDLGGIYVIHLRSKSDPGKTGLLSVAEGKESRHAAKAISPEGEDRFYRRHPEAEMDRAHHHGGHGSTQPEKPSLPQKQSSLRSRKLPDMGCSLPEHRAHQEASHRQFCESKNGPPYPQGAGQLDYGSKGIPDTSEPVSYHNSGVKYAASGQESLRLNHKEVRLSKEMERPWVRQPSAPEKHSRDCYKEEEHLTQSIVPPPKPERSHSLKLHHTQNVERDPSVLYQYQPHGKRQSSVTVVSQYDNLEDYHSLPQHQRGVFGGGGMGTYVPPGFPHPQSRTYATALGQGAFLPAELSLQHPETQIHAE

SEQ ID NO: 755988 - protein, 734 aa, Homo sapiens [sequence omitted]

SEQ ID NO: 755989 - protein, 760 aa, Homo sapiens
MKSGLNNSHKVQGVVPVPERPPEPRAMDDPASAFISDSGAAAAQCPMATAVQPGLPEKVRDGARVPLLHLRAESVPAHPCGFPAPLPPTRMMESKMIAAIHSSSADATSSSNYHSFVTASSTSVDDALPLPLPVPQPKHASQKTVYSSFARPDVTTEPFGPDNCLHFNMTPNCQYRPQSVPPHHNKLEQHQVYGARSEPPASMGLRYNTYVAPGRNASGHHSKPCSRVEYVSSLSSSVRNTCYPEDIPPYPTIRRVQSLHAPPSSMIRSVPISRTEVPPDDEPAYCPRPLYQYKPYQSSQARSDYHVTQLQPYFENGRVHYRYSPYSSSSSSYYSPDGALCDVDAYGTVQLRPLHRLPNRDFAFYNPRLQGKSLYSYAGLAPRPRANVTGYFSPNDHNVVSMPPAADVKHTYTSWDLEDMEKYRMQSIRRESRARQKVKGPVMSQYDNMTPAVQDDLGGIYVIHLRSKSDPGKTGLLSVAEGKESRHAAKAISPEGEDRFYRRHPEAEMDRAHHHGGHGSTQPEKPSLPQKQSSLRSRKLPDMGCSLPEHRAHQEASHRQFCESKNGPPYPQGAGQLDYGSKGIPDTSEPVSYHNSGVKYAASGQESLRLNHKEVRLSKEMERPWVRQPSAPEKHSRDCYKEEEHLTQSIVPPPKPERSHSLKLHHTQNVERDPSVLYQYQPHGKRQSSVTVVSQYDNLEDYHSLPQHQRGVFGGGGMGTYVPPGFPHPQSRTYATALGQGAFLPAELSLQHPETQIHAE

SEQ ID NO: 755990 - protein, 1811 aa, Homo sapiens
PAVGAAHVIKRYTARAPDELTLEVGDIVSVIDMPPKVLSTWWRGKHGFQVGLFPGHCVELINQKVPQSVTNSVPKPVSKKHGKLITFLRTFMKSRPTKQKLKQRGILKERVFGCDLGEHLLNSGFEVPQVLQSCTAFIERYGIVDGIYRLSGVASNIQRLRHEFDSEHVPDLTKEPYVQDIHSVGSLCKLYFRELPNPLLTYQLYEKFSDAVSAATDEERLIKIHDVIQQLPPPHYRTLEFLMRHLSLLADYCSITNMHAKNLAIVWAPNLLRSKQIESACFSGTAAFMEVRIQSVVVEFILNHVDVLFSGRISMAMQEGAASLSRPKSLLVSSPSTKLLTLEEAQARTQAQVNSPIVTENKYIEVGEGPAALQGKFHTIIEFPLERKRPQNKMKKSPVGSWRSFFNLGKSSSVSKRKLQRNESEPSEMKAMALKGGRAEGTLRSAKSEESLTSLHAVDGDSKLFRPRRPRSSSDALSASFNGEMLGNRCNSYDNLPHDNESEEEGGLLHIPALMSPHSAEDVDLSPPDIGVASLDFDPMSFQCSPPKAESECLESGASFLDSPGYSKDKPSANKKDAETGSSQCQTPGSTASSEPVSPLQEKLSPFFTLDLSPTEDKSSKPSSFTEKVVYAFSPKIGRKLSKSPSMSISEPISVTLPPRVSEVIGTVSNTTAQNASSSTWDKCVEERDATNRSPTQIVKMKTNETVAQEAYESEVQPLDQVAAEEVELPGKEDQSVSSSQSKAVASGQTQTGAVTHDPPQDSVPVSSVSLIPPPPPPKNVARMLALALAESAQQASTQSLKRPGTSQAGYTNYGDIAVATTEDNLSSSYSAVALDKAYFQTDRPAEQFHLQNNAPGNCDHPLPETTATGDPTHSNTTESGEQHHQVDLTGNQPHQAYLSGDPEKARITSVPLDSEKSDDHVSFPEDQSGKNSMPTVSFLDQDQSPPRFYSGDQPPSYLGASVDKLHHPLEFADKSPTPPNLPSDKIYPPSGSPEENTSTATMTYMTTTPATAQMSTKEASWDVAEQPTTADFAAATLQRTHRTNRPLPPPPSQRSAEQPPVVGQVQAATNIGLNNSHKVQGVVPVPERPPEPRAMDDPASAFISDSGAAAAQCPMATAVQPGLPEKVRDGARVPLLHLRAESVPAHPCGFPAPLPPTRMMESKMIAAIHSSSADATSSSNYHSFVTASSTSVDDALPLPLPVPQPKHASQKTVYSSFARPDVTTEPFGPDNCLHFNMTPNCQYRPQSVPPHHNKLEQHQVYGARSEPPASMGLRYNTYVAPGRNASGHHSKPCSRVEYVSSLSSSVRNTCYPEDIPPYPTIRRVQSLHAPPSSMIRSVPISRTEVPPDDEPAYCPRPLYQYKPYQSSQARSDYHVTQLQPYFENGRVHYRYSPYSSSSSSYYSPDGALCDVDAYGTVQLRPLHRLPNRDFAFYNPRLQGKSLYSYAGLAPRPRANVTGYFSPNDHNVVSMPPAADVKHTYTSWDLEDMEKYRMQSIRRESRARQKVKGPVMSQYDNMTPAVQDDLGGIYVIHLRSKSDPGKTGLLSVAEGKESRHAAKAISPEGEDRFYRRHPEAEMDRAHHHGGHGSTQPEKPSLPQKQSSLRSRKLPDMGCSLPEHRAHQEASHRQFCESKNGPPYPQGAGQLDYGSKGIPDTSEPVSYHNSGVLSKEMERPWVRQPSAPEKHSRDCYKEEEHLTQSIVPPPKPERSHSLKLHHTQNVERDPSVLYQYQPHGKRQSSVTVVSQYDNLEDYHSLPQHQRGVFGGGGMGTYVPPGFPHPQSRTYATALGQGAFLPAELSLQHPETQIHAE

SEQ ID NO: 755991 - protein, 1555 aa, Homo sapiens
PAVGAAHVIKRYTARAPDELTLEVGDIVSVIDMPPKVLSTWWRGKHGFQVGLFPGHCVELINQKVPQSVTNSVPKPVSKKHGKLITFLRTFMKSRPTKQKLKQRGILKERVFGCDLGEHLLNSGFEVPQVLQSCTAFIERYGIVDGIYRLSGVASNIQRLRHEFDSEHVPDLTKEPYVQDIHSVGSLCKLYFRELPNPLLTYQLYEKFSDAVSAATDEERLIKIHDVIQQLPPPHYRTLEFLMRHLSLLADYCSITNMHAKNLAIVWAPNLLRSKQIESACFSGTAAFMEVRIQSVVVEFILNHVDVLFSGRISMAMQEGAASLSRPKSLLVSSPSTKLLTLEEAQARTQAQVNSPIVTENKYIEVGEGPAALQGKFHTIIEFPLERKRPQNKMKKSPVGSWRSFFNLGKSSSVSKRKLQRNESEPSEMKAMALKGGRAEGTLRSAKSEESLTSLHAVDGDSKLFRPRRPRSSSDALSASFNGEMLGNRCNSYDNLPHDNESEEEGGLLHIPALMSPHSAEDVDLSPPDIGVASLDFDPMSFQCSPPKAESECLESGASFLDSPGYSKDKPSANKKDAETGSSQCQTPGSTASSEPVSPLQEKLSPFFTLDLSPTEDKSSKPSSFTEKVVYAFSPKIGRKLSKSPSMSISEPISVTLPPRVSEVIGTVSNTTAQNASSSTWDKCVEERDATNRSPTQIVKMKTNETVAQEAYESEVQPLDQVAAEEVELPGKEDQSVSSSQSKAVASGQTQTGAVTHDPPQDSVPVSSVSLIPPPPPPKNVARMLALALAESAQQASTQSLKRPGTSQAGYTNYGDIAVATTEDNLSSSYSAVALDKAYFQTDRPAEQFHLQNNAPGNCDHPLPETTATGDPTHSNTTESGEQHHQVDLTGNQPHQAYLSGDPEKARITSVPLDSEKSDDHVSFPEDQSGKNSMPTVSFLDQDQSPPRFYSGDQPPSYLGASVDKLHHPLEFADKSPTPPNLPSDKIYPPSGSPEENTSTATMTYMTTTPATAQMSTKEASWDVAEQPTTADFAAATLQRTHRTNRPLPPPPSQRSAEQPPVVGQVQAATNIGLNNSHKVQGVVPVPERPPEPRAMDDPASAFISDSGAAAAQCPMATAVQPGLPEKVRDGARVPLLHLRAESVPAHPCGFPAPLPPTRMMESKMIAAIHSSSADATSSSNYHSFVTASSTSVDDALPLPLPVPQPKHASQKTVYSSFARPDVTTEPFGPDNCLHFNMTPNCQYRPQSVPPHHNKLEQHQVYGARSEPPASMGLRYNTYVAPGRNASGHHSKPCSRVEYVSSLSSSVRNTCYPEDIPPYPTIRRVQSLHAPPSSMIRSVPISRTEVPPDDEPAYCPRPLYQYKPYQSSQARSDYHVTQLQPYFENGRVHYRYSPYSSSSSSYYSPDGALCDVDAYGTVQLRPLHRLPNRDFAFYNPRLQGKSLYSYAGLAPRPRANVTGYFSPNDHNVVSMPPAADVKHTYTSWDLEDMEKYRMQSIRRESRARQKVKGPVMSQYDNMTPAVQDDLGGIYVIHLRSKHIDHDLQFRARIQSTCSM

SEQ ID NO: 755992 - protein, 1525 aa, Homo sapiens
  misc_feature (1525)..(1525): Xaa can be any naturally occurring amino acid
PAVGAAHVIKRYTARAPDELTLEVGDIVSVIDMPPKVLSTWWRGKHGFQVGLFPGHCVELINQKVPQSVTNSVPKPVSKKHGKLITFLRTFMKSRPTKQKLKQRGILKERVFGCDLGEHLLNSGFEVPQVLQSCTAFIERYGIVDGIYRLSGVASNIQRLRHEFDSEHVPDLTKEPYVQDIHSVGSLCKLYFRELPNPLLTYQLYEKFSDAVSAATDEERLIKIHDVIQQLPPPHYRTLEFLMRHLSLLADYCSITNMHAKNLAIVWAPNLLRSKQIESACFSGTAAFMEVRIQSVVVEFILNHVDVLFSGRISMAMQEGAASLSRPKSLLVSSPSTKLLTLEEAQARTQAQVNSPIVTENKYIEVGEGPAALQGKFHTIIEFPLERKRPQNKMKKSPVGSWRSFFNLGKSSSVSKRKLQRNESEPSEMKAMALKGGRAEGTLRSAKSEESLTSLHAVDGDSKLFRPRRPRSSSDALSASFNGEMLGNRCNSYDNLPHDNESEEEGGLLHIPALMSPHSAEDVDLSPPDIGVASLDFDPMSFQCSPPKAESECLESGASFLDSPGYSKDKPSANKKDAETGSSQCQTPGSTASSEPVSPLQEKLSPFFTLDLSPTEDKSSKPSSFTEKVVYAFSPKIGRKLSKSPSMSISEPISVTLPPRVSEVIGTVSNTTAQNASSSTWDKCVEERDATNRSPTQIVKMKTNETVAQEAYESEVQPLDQVAAEEVELPGKEDQSVSSSQSKAVASGQTQTGAVTHDPPQDSVPVSSVSLIPPPPPPKNVARMLALALAESAQQASTQSLKRPGTSQAGYTNYGDIAVATTEDNLSSSYSAVALDKAYFQTDRPAEQFHLQNNAPGNCDHPLPETTATGDPTHSNTTESGEQHHQVDLTGNQPHQAYLSGDPEKARITSVPLDSEKSDDHVSFPEDQSGKNSMPTVSFLDQDQSPPRFYSGDQPPSYLGASVDKLHHPLEFADKSPTPPNLPSDKIYPPSGSPEENTSTATMTYMTTTPATAQMSTKEASWDVAEQPTTADFAAATLQRTHRTNRPLPPPPSQRSAEQPPVVGQVQAATNIGLNNSHKVQGVVPVPERPPEPRAMDDPASAFISDSGAAAAQCPMATAVQPGLPEKVRDGARVPLLHLRAESVPAHPCGFPAPLPPTRMMESKMIAAIHSSSADATSSSNYHSFVTASSTSVDDALPLPLPVPQPKHASQKTVYSSFARPDVTTEPFGPDNCLHFNMTPNCQYRPQSVPPHHNKLEQHQVYGARSEPPASMGLRYNTYVAPGRNASGHHSKPCSRVEYVSSLSSSVRNTCYPEDIPPYPTIRRVQSLHAPPSSMIRSVPISRTEVPPDDEPAYCPRPLYQYKPYQSSQARSDYHVTQLQPYFENGRVHYRYSPYSSSSSSYYSPDGALCDVDAYGTVQLRPLHRLPNRDFAFYNPRLQGKSLYSYAGLAPRPRANVTGYFSPNDHNVVSMPPAADVKHTYTSWDLEDMEKYRMQSIRRESRARQKQEAAILQKQAEAGRGILWX

SEQ ID NO: 755993 - protein, 115 aa, Homo sapiens
CPAAVCIPIADTRGFTNVVHHTQNVERDPSVLYQYQPHGKRQSSVTVVSQYDNLEDYHSLPQHQRGVFGGGGMGTYVPPGFPHPQSRTYATALGQGAFLPAELSLQHPETQIHAE

SEQ ID NO: 755994 - protein, 762 aa, Homo sapiens
PAVGAAHVIKRYTARAPDELTLEVGDIVSVIDMPPKVLSTWWRGKHGFQVGLFPGHCVELINQKVPQSVTNSVPKPVSKKHGKLITFLRTFMKSRPTKQKLKQRGILKERVFGCDLGEHLLNSGFEVPQVLQSCTAFIERYGIVDGIYRLSGVASNIQRLRHEFDSEHVPDLTKEPYVQDIHSVGSLCKLYFRELPNPLLTYQLYEKFSDAVSAATDEERLIKIHDVIQQLPPPHYRTLEFLMRHLSLLADYCSITNMHAKNLAIVWAPNLLRSKQIESACFSGTAAFMEVRIQSVVVEFILNHVDVLFSGRISMAMQEGAASLSRPKSLLVSSPSTKLLTLEEAQARTQAQVNSPIVTENKYIEVGEGPAALQGKFHTIIEFPLERKRPQNKMKKSPVGSWRSFFNLGKSSSVSKRKLQRNESEPSEMKAMALKGGRAEGTLRSAKSEESLTSLHAVDGDSKLFRPRRPRSSSDALSASFNGEMLGNRCNSYDNLPHDNESEEEGGLLHIPALMSPHSAEDVDLSPPDIGVASLDFDPMSFQCSPPKAESECLESGASFLDSPGYSKDKPSANKKDAETGSSQCQTPGSTASSEPVSPLQEKLSPFFTLDLSPTEDKSSKPSSFTEKVVYAFSPKIGRKLSKSPSMSISEPISVTLPPRVSEVIGTVSNTTAQNASSSTWDKCVEERDATNRSPTQIVKMKTNETVAQEAYESEVQPLDQVAAEEVELPGKEDQSVSSSQSKAVASGQTQTGTVCFPPFFL

SEQ ID NO: 755995 - protein, 387 aa, Homo sapiens
PAVGAAHVIKRYTARAPDELTLEVGDIVSVIDMPPKVLSTWWRGKHGFQVGLFPGHCVELINQKVPQSVTNSVPKPVSKKHGKLITFLRTFMKSRPTKQKLKQRGILKERVFGCDLGEHLLNSGFEVPQVLQSCTAFIERYGIVDGIYRLSGVASNIQRLRHEFDSEHVPDLTKEPYVQDIHSVGSLCKLYFRELPNPLLTYQLYEKFSDAVSAATDEERLIKIHDVIQQLPPPHYRTLEFLMRHLSLLADYCSITNMHAKNLAIVWAPNLLRSKQIESACFSGTAAFMEVRIQSVVVEFILNHVDVLFSGRISMAMQEGAASLSRPKSLLVSSPSTKLLTLEEAQARTQAQVNSPIVTENKYIEVGEGPAALQGKFHTIIEFPLER

SEQ ID NO: 755996 - protein, 70 aa, Homo sapiens
RRGALGDRGNMAEYTRLHNALALIRLRNPPVNAISTTLLRDIKEGLQKAVIDHTNSSLTLSHHLWNPATD

SEQ ID NO: 755997 - protein, 733 aa, Homo sapiens
RRGALGDRGNMAEYTRLHNALALIRLRNPPVNAISTTLLRDIKEGLQKAVIDHTIKAIVICGAEGKFSAGADIRGFSAPRTFGLTLGHVVDEIQRNEKPVVAAIQGMAFGGGLELALGCHYRIAHAEAQVGLPEVTLGLLPGARGTQLLPRLTGVPAALDLITSGRRILADEALKLGILDKVVNSDPVEEAIRFAQRVSDQPLESRRLCNKPIQSLPNMDSIFSEALLKMRRQHPGCLAQEACVRAVQAAVQYPYEVGIKKEEELFLYLLQSGQARALQYAFFAERKANKWSTPSGASWKTASARPVSSVGVVGLGTMGRGIVISFARARIPVIAVDSDKNQLATANKMITSVLEKEASKMQQSGHPWSGPKPRLTSSVKELGGVDLVIEAVFEEMSLKKQVFAELSAVCKPEAFLCTNTSALDVDEIASSTDRPHLVIGTHFFSPAHVMKLLEVIPSQYSSPTTIATVMNLSKKIKKIGVVVGNCFGFVGNRMLNPYYNQAYFLLEEGSKPEEVDQVLEEFGFKMGPFRVSDLAGLDVGWKSRKGQGLTGPTLLPGTPARKRGNRRYCPIPDVLCELGRFGQKTGKGWYQYDKPLGRIHKPDPWLSTFLSRYRKTHHIEPRTISQDEILERCLYSLINEAFRILGEGIAASPEHIDVVYLHGYGWPRHKGGPMFYASTVGLPTVLEKLQKYYRQNPDIPQLEPSDYLKKLASQGNPPLKEWQSLAGSPSSKL

SEQ ID NO: 755998 - protein, 729 aa, Homo sapiens
RRGALGDRGNMAEYTRLHNALALIRLRNPPVNAISTTLLRDIKEGLQKAVIDHTSADIRGFSAPRTFGLTLGHVVDEIQRNEKPVVAAIQGMAFGGGLELALGCHYRIAHAEAQVGLPEVTLGLLPGARGTQLLPRLTGVPAALDLITSAFKVEMTLQIHGRRILADEALKLGILDKVVNSDPVEEAIRFAQRVSDQPLESRRLCNKPIQSLPNMDSIFSEALLKMRRQHPGCLAQEACVRAVQAAVQYPYEVGIKKEEELFLYLLQSGQARALQYAFFAERKANKWSTPSGASWKTASARPVSSVGVVGLGTMGRGIVISFARARIPVIAVDSDKNQLATANKMITSVLEKEASKMQQSGHPWSGPKPRLTSSVKELGGVDLVIEAVFEEMSLKKQVFAELSAVCKPEAFLCTNTSALDVDEIASSTDRPHLVIGTHFFSPAHVMKLLEVIPSQYSSPTTIATVMNLSKKIKKIGVVVGNCFGFVGNRMLNPYYNQAYFLLEEGSKPEEVDQVLEEFGFKMGPFRVSDLAGLDVGWKSRKGQGLTGPTLLPGTPARKRGNRRYCPIPDVLCELGRFGQKTGKGWYQYDKPLGRIHKPDPWLSTFLSRYRKTHHIEPRTISQDEILERCLYSLINEAFRILGEGIAASPEHIDVVYLHGYGWPRHKGGPMFYASTVGLPTVLEKLQKYYRQNPDIPQLEPSDYLKKLASQGNPPLKEWQSLAGSPSSKL

SEQ ID NO: 755999 - protein, 715 aa, Homo sapiens
RRGALGDRGNMAEYTRLHNALALIRLRNPPVNAISTTLLRDIKEGLQKAVIDHTIKAIVICGAEGKFSAGADIRGFSAPRTFGLTLGHVVDEIQRNEKPVVAAIQGMAFGGGLELALGCHYRIAHAEAQVGLPEVTLGLLPGARGTQLLPRLTGVPAALDLITSGRRILADEALKLGILDKVVNSDPVEEAIRFAQRVSDQPLESRRLCNKPIQSLPNMDSIFSEALLKMRRQHPGCLAQEACVRAVQAAVQYPYEVGIKKEEELFLYLLQSGQARALQYAFFAERKANKWSTPSGASWKTASARPVSSVGVVGLGTMGRGIVISFARARIPVIAVDSDKNQLATANKMITSVLEKEASKMQQSGHPWSGPEAVFEEMSLKKQVFAELSAVCKPEAFLCTNTSALDVDEIASSTDRPHLVIGTHFFSPAHVMKLLEVIPSQYSSPTTIATVMNLSKKIKKIGVVVGNCFGFVGNRMLNPYYNQAYFLLEEGSKPEEVDQVLEEFGFKMGPFRVSDLAGLDVGWKSRKGQGLTGPTLLPGTPARKRGNRRYCPIPDVLCELGRFGQKTGKGWYQYDKPLGRIHKPDPWLSTFLSRYRKTHHIEPRTISQDEILERCLYSLINEAFRILGEGIAASPEHIDVVYLHGYGWPRHKGGPMFYASTVGLPTVLEKLQKYYRQNPDIPQLEPSDYLKKLASQGNPPLKEWQSLAGSPSSKL

SEQ ID NO: 756000 - protein, 177 aa, Homo sapiens
RRGALGDRGNMAEYTRLHNALALIRLRNPPVNAISTTLLRDIKEGLQKAVIDHTIKAIVICGAEGKFSAGADIRGFSAPRTFGLTLGHVVDEIQRNEKPVVAAIQGMAFGGGLELALGCHYRIAHAEAQVGLPEVTLGLLPGARGTQLLPRLTGVPAALDLITSGQYRPWQQLSRLV

SEQ ID NO: 756001 - protein, 733 aa, Homo sapiens; identical to SEQ ID NO: 755997

SEQ ID NO: 756002 - protein, 733 aa, Homo sapiens; identical to SEQ ID NO: 755997

SEQ ID NO: 756003 - protein, 733 aa, Homo sapiens; identical to SEQ ID NO: 755997

SEQ ID NO: 756004 - protein, 367 aa, Homo sapiens
RRGALGDRGNMAEYTRLHNALALIRLRNPPVNAISTTLLRDIKEGLQKAVIDHTIKAIVICGAEGKFSAGADIRGFSAPRTFGLTLGHVVDEIQRNEKPVVAAIQGMAFGGGLELALGCHYRIAHAEAQVGLPEVTLGLLPGARGTQLLPRLTGVPAALDLITSGRRILADEALKLGILDKVVNSDPVEEAIRFAQRVSDQPLESRRLCNKPIQSLPNMDSIFSEALLKMRRQHPGCLAQEACVRAVQAAVQYPYEVGIKKEEELFLYLLQSGQARALQYAFFAERKANKWSTPSGASWKTASARPVSSVGVVDSMTLLCLLTETRLTLRTCICCPLQGMLPLLPHSMDSWVTSQTIALYGTLSFVV

SEQ ID NO: 756005 - protein, 142 aa, Homo sapiens
MATKIDKEACRAAYNLVRDDGSAVIWVTFKYDGSTIVPGEQGAEYQHFIQQCTDDVRLFAFVRFTTGDAMSKRSKFALITWIGENVSGLQRAKTGTDKTLVKEVVQNFAKEFVISDRKELEEDFIKSELKKAGGANYDAQTE

SEQ ID NO: 756006 - protein, 200 aa, Homo sapiens
SRKCYRSCSVYVLLEACIPSPPPPARAPSARTRRAPIPAAGQGRARPPRTVSRCGSAAMATKIDKEACRAAYNLVRDDGSAVIWVTFKYDGSTIVPGEQGAEYQHFIQQCTDDVRLFAFVRFTTGDAMSKRSKFALITWIGENVSGLQRAKTGTDKTLVKEVVQNFAKEFVISDRKELEEDFIKSELKKAGGANYDAQTE

SEQ ID NO: 756007 - protein, 142 aa, Homo sapiens; identical to SEQ ID NO: 756005

SEQ ID NO: 756008 - protein, 85 aa, Homo sapiens
LPAVIRRPKPLPVVLCFHGHAPCPLSCSSRTPGSSLKFLEDSGRRNSENLKVFDRISDKCTEENADVCCLPSLLQLPKRKGTPVL

SEQ ID NO: 756009 - protein, 685 aa, Homo sapiens
MAAASRSASGWALLLLVALWQQRAAGSGVFQLQLQEFINERGVLASGRPCEPGCRTFFRVCLKHFQAVVSPGPCTFGTVSTPVLGTNSFAVRDDSSGGGRNPLQLPFNFTWPGTFSLIIEAWHAPGDDLRPEALPPDALISKIAIQGSLAVGQNWLLDEQTSTLTRLRYSYRVICSDNYYGDNCSRLCKKRNDHFGHYVCQPDGNLSCLPGWTGEYCQQPICLSGCHEQNGYCSKPAECLCRPGWQGRLCNECIPHNGCRHGTCSTPWQCTCDEGWGGLFCDQDLNYCTHHSPCKNGATCSNSGQRSYTCTCRPGYTGVDCELELSECDSNPCRNGGSCKDQEDGYHCLCPPGYYGLHCEHSTLSCADSPCFNGGSCRERNQGANYACECPPNFTGSNCEKKVDRCTSNPCANGGQCLNRGPSRMCRCRPGFTGTYCELHVSDCARNPCAHGGTCHDLENGLMCTCPAGFSGRRCEVRTSIDACASSPCFNRATCYTDLSTDTFVCNCPYGFVGSRCEFPVGLPPSFPWVAVSLGVGLAVLLVLLGMVAVAVRQLRLRRPDDGSREAMNNLSDFQKDNLIPAAQLKNTNQKKELEVDCGLDKSNCGKQQNHTLDYNLAPGPLGRGTMPGKFPHSDKSLGEKAPLRLHSEKPECRISAICSPRDSMYQSVCLISEERNECVIATEV

SEQ ID NO: 756010 - protein, 142 aa, Homo sapiens
MNVSLPRRYKAGAYLDIPAQPRGWTFLLHCLHCILDGTFFICNVLLSGGGGNGRNRTDCELAKRCNTLPHLWVSVWHQIGSCTNQRNRREESVLEIPLRGKSGAAAAWALSSLKPISTTSSLGSGPLLPQTTLKAGLQKSII

SEQ ID NO: 756011 - protein, 685 aa, Homo sapiens; identical to SEQ ID NO: 756009

SEQ ID NO: 756012 - protein, 181 aa, Homo sapiens [sequence omitted]

SEQ ID NO: 756013 - protein, 102 aa, Homo sapiens
NWAQFGPLGPPPFCPKVKWALFKGGAPSGAPACFPERVAVAPWGPELLWPPLASVFPKVPLAQAPRRQLGPNQKGERGPMRAGPPVGWKTTGCVSCWGLPWR

SEQ ID NO: 756014 - protein, 600 aa, Homo sapiens
MAGVIWITGLIGWLITIITAKKDIGQPSLAPLGTGDPSLTRPSAPSEALPPDALISKIAIQGSLAVGQNWLLDEQTSTLTRLRYSYRVICSDNYYGDNCSRLCKKRNDHFGHYVCQPDGNLSCLPGWTGEYCQQPICLSGCHEQNGYCSKPAECLCRPGWQGRLCNECIPHNGCRHGTCSTPWQCTCDEGWGGLFCDQDLNYCTHHSPCKNGATCSNSGQRSYTCTCRPGYTGVDCELELSECDSNPCRNGGSCKDQEDGYHCLCPPGYYGLHCEHSTLSCADSPCFNGGSCRERNQGANYACECPPNFTGSNCEKKVDRCTSNPCANGGQCLNRGPSRMCRCRPGFTGTYCELHVSDCARNPCAHGGTCHDLENGLMCTCPAGFSGRRCEVRTSIDACASSPCFNRATCYTDLSTDTFVCNCPYGFVGSRCEFPVGLPPSFPWVAVSLGVGLAVLLVLLGMVAVAVRQLRLRRPDDGSREAMNNLSDFQKDNLIPAAQLKNTNQKKELEVDCGLDKSNCGKQQNHTLDYNLAPGPLGRGTMPGKFPHSDKSLGEKAPLRLHSEKPECRISAICSPRDSMYQSVCLISEERNECVIATEV

SEQ ID NO: 756015 - protein, 470 aa, Homo sapiens
HFHNLLAKVMQRVNMIMAESPGLITICLLGYLLSAECTVFLDHENANKILNRPKRYNSGKLEEFVQGNLERECMEEKCSFEEAREVFENTERTTEFWKQYVDGDQCESNPCLNGGSCKDDINSYECWCPFGFEGKNCELDVTCNIKNGRCEQFCKNSADNKVVCSCTEGYRLAENQKSCEPAVPFPCGRVSVSQTSKLTRAETVFPDVDYVNSTEAETILDNITQSTQSFNDFTRVVGGEDAKPGQFPWQVVLNGKVDAFCGGSIVNEKWIVTAAHCVETGVKITVVAGEHNIEETEHTEQKRNVIRIIPHHNYNAAINKYNHDIALLELDEPLVLNSYVTPICIADKEYTNIFLKFGSGYVSGWGRVFHKGRSALVLQYLRVPLVDRATCLRSTKFTIYNNMFCAGFHEGGRDSCQGDSGGPHVTEVEGTSFLTGIISWGEECAMKGKYGIYTKVSRYVNWIKEKTKLT

SEQ ID NO: 756016 - protein, 470 aa, Homo sapiens; identical to SEQ ID NO: 756015

SEQ ID NO: 756017 - protein, 451 aa, Homo sapiens
HFHNLLAKVMQRVNMIMAESPGLITICLLGYLLSAECTVFLDHENANKILNRPKRYNSGKLEEFVQGNLERECMEEKCSFEEAREVFENTERTTEFWKQYVDGDQCESNPCLNGGSCKDDINSYECWCPFGFEGKNCELDVTCNIKNGRCEQFCKNSADNKVVCSCTEGYRLASQTSKLTRAETVFPDVDYVNSTEAETILDNITQSTQSFNDFTRVVGGEDAKPGQFPWQVVLNGKVDAFCGGSIVNEKWIVTAAHCVETGVKITVVAGEHNIEETEHTEQKRNVIRIIPHHNYNAAINKYNHDIALLELDEPLVLNSYVTPICIADKEYTNIFLKFGSGYVSGWGRVFHKGRSALVLQYLRVPLVDRATCLRSTKFTIYNNMFCAGFHEGGRDSCQGDSGGPHVTEVEGTSFLTGIISWGEECAMKGKYGIYTKVSRYVNWIKEKTKLT

SEQ ID NO: 756018 - protein, 451 aa, Homo sapiens
HFHNLLAKVMQRVNMIMAESPGLITICLLGYLLSAECTVFLDHENANKILNRPKRYNSGKLEEFVQGNLERECMEEKCSFEEAREVFENTERTTEFWKQYVDGDQCESNPCLNGGSCKDDINSYECWCPFGFEGKNCELDVTCNIKNGRCEQFCKNSADNKVVCSCTEGYRLAENQKSCEPAVPFPCGRVSVILLKLKPFWITSLKAPNHLMTSLGLLVEKMPNQVNSLWQVVLNGKVDAFCGGSIVNEKWIVTAAHCVETGVKITVVAGEHNIEETEHTEQKRNVIRIIPHHNYNAAINKYNHDIALLELDEPLVLNSYVTPICIADKEYTNIFLKFGSGYVSGWGRVFHKGRSALVLQYLRVPLVDRATCLRSTKFTIYNNMFCAGFHEGGRDSCQGDSGGPHVTEVEGTSFLTGIISWGEECAMKGKYGIYTKVSRYVNWIKEKTKLT

SEQ ID NO: 756019 - protein, 103 aa, Homo sapiens
HFHNLLAKVMQRVNMIMAESPGLITICLLGYLLSAECTVFLDHENANKILNRPKRYNSGKLEEFVQGNLERECMEEKCSFEEAREVFENTERTMEISVSPIHV

SEQ ID NO: 756020 - protein, 89 aa, Homo sapiens
MKGLAAALLVLVCTMALCSCAQVGTNKELCCLVYTSWQIPQKFIVDYSETSPQCPKPGVILLTKRGRQICADPNKKWVQKYISDLKLNA

SEQ ID NO: 756021 - protein, 268 aa, Homo sapiens
MSGKANASKKNAQQLKRNPKRKKDNEEVVLSENKVRNTVKKNKNHLKDLSSEGQTKHTNLKHGKTAASKRKTWQPLSKSTRDHLQTMMESVIMTILSNSIKEKEEIQYHLNFLKKRLLQQCETLKVPPKKMEDLTNVSSLLNMERARDKANEEGLALLQEEIDKMVETTELMTGNIQSLKNKIQILASEVEEEEERVKQMHQINSSGVLSLPELSQKTLKAPTLQKEILALIPNQNALLKDLDILHNSSQMKSMSTFIEEAYKKLDAS

SEQ ID NO: 756022 - protein, 247 aa, Homo sapiens
MSGKANASKKNAQQLKRNPKRKKDNEEVVLSENKVRNTVKKNKNHLKDLSSEGQTKHTNLKHGKTAASKRKTWQPLSKSTRDHLQTMMESVIMTILSNSIKEKEEIQYHLNFLKKRLLQQCETLKVPPKKMEDLTNVSSLLNMERARDKANEEGLALLQNKIQILASEVEEEEERVKQMHQINSSGVLSLPELSQKTLKAPTLQKEILALIPNQNALLKDLDILHNSSQMKSMSTFIEEAYKKLDAS

SEQ ID NO: 756023 - protein, 143 aa, Homo sapiens
MSGKANASKKNAQQLKRNPKRKKDNEEVVLSENKVRNTVKKNKNHLKDLSSEGQTKHTNLKHGKTAASKRKTWQPLSKSTRDHLQTMMESVIMTILSNSIKEKEEIQYHLNFLKKSLLSLVPEVTIPKIQLLLPIQQSTTLAN

SEQ ID NO: 756024 - protein, 268 aa, Homo sapiens; identical to SEQ ID NO: 756021

SEQ ID NO: 756025 - protein, 46 aa, Homo sapiens
WGLLEARGHVLFISGPPSPAPVFLTPSQDPVHKKCELLSQLWLSLD

SEQ ID NO: 756026 - protein, 131 aa, Homo sapiens
VFKVHKCAVCGFTTENLLQFHEHIPQHKSDGSFYQCRECGLCYMSRLSVQAPLFVHKLKEPQPVSKQNGAGEDNQQENKPSHEDESPNGAMSDRKCKVCAKTFETEAALNTHMQTHGMAFIKSKRMSSDEK

SEQ ID NO: 756027 - protein, 543 aa, Homo sapiens
MGCIKSKENKSPAIKYRPENTPEPVSTSVSHYGAEPTTVSPCPSSSAKGTAVNFSSLSMTPFGGSSGVTPFGGASSSFSVVPSSYPAGLTGGVTIFVALYDYEARTTEDLSFKKGERFQIINNTEGDWWEARSIATGKNGYIPSNYVAPADSIQAEEWYFGKMGRKDAERLLLNPGNQRGIFLVRESETTKGAYSLSIRDWDEIRGDNVKHYKIRKLDNGGYYITTRAQFDTLQKLVKHYTEHADGLCHKLTTVCPTVKPQTQGLAKDAWEIPRESLRLEVKLGQGCFGEVWMGTWNGTTKVAIKTLKPGTMMPEAFLQEAQIMKKLRHDKLVPLYAVVSEEPIYIVTEFMSKGSLLDFLKEGDGKYLKLPQLVDMAAQIADGMAYIERMNYIHRDLRAANILVGENLVCKIADFGLARLIEDNEYTARQGAKFPIKWTAPEAALYGRFTIKSDVWSFGILQTELVTKGRVPYPGMVNREVLEQVERGYRMPCPQGCPESLHELMNLCWKKDPDERPTFEYIQSFLEDYFTATEPQYQPGENL

SEQ ID NO: 756028 - protein, 543 aa, Homo sapiens; identical to SEQ ID NO: 756027

SEQ ID NO: 756029 - protein, 543 aa, Homo sapiens; identical to SEQ ID NO: 756027

SEQ ID NO: 756030 - protein, 499 aa, Homo sapiens
MGCIKSKENKSPAIKYRPENTPEPVSTSVSHYGAEPTTVSPCPSSSAKGTAVNFSSLSMTPFGGSSGVTPFGGASSSFSVVPSSYPAGLTGGVTIFVALYDYEARTTEDLSFKKGERFQIINNTEGDWWEARSIATGKNGYIPSNYVAPADSIQAEEWYFGKMGRKDAERLLLNPGNQRGIFLVRESETTKGAYSLSIRDWDEIRGDNVKHYKIRKLDNGGYYITTRAQFDTLQKLVKHYTEHADGLCHKLTTVCPTVKPQTQGLAKDAWEIPRESLRLEVKLGQGCFGEVWMGTWNGTTKVAIKTLKPGTMMPEAFLQEAQIMKKLRHDKLVPLYAVVSEEPIYIVTEFMSKGSLLDFLKEGDGKYLKLPQLVDMAAQIADGMAYIERMNYIHRDLRAANILVGENLVCKIADFGLARLIEDNEYTARQGMVNREVLEQVERGYRMPCPQGCPESLHELMNLCWKKDPDERPTFEYIQSFLEDYFTATEPQYQPGENL

SEQ ID NO: 756031 - protein, 543 aa, Homo sapiens; identical to SEQ ID NO: 756027

SEQ ID NO: 756032 - protein, 543 aa, Homo sapiens; identical to SEQ ID NO: 756027

SEQ ID NO: 756033 - protein, 543 aa, Homo sapiens; identical to SEQ ID NO: 756027

SEQ ID NO: 756034 - protein, 600 aa, Homo sapiens
MGCIKSKENKSPAIKYRPENTPEPVSTSVSHYGAEPTTVSPCPSSSAKGTAVNFSSLSMTPFGGSSGVTPFGGASSSFSVVPSSYPAGLTGGVTIFVALYDYEARTTEDLSFKKGERFQIINNTEGDWWEARSIATGKNGYIPSNYVAPADSIQAEEWYFGKMGRKDAERLLLNPGNQRGIFLVRESETTKGAYSLSIRDWDEIRGDNVKHYKIRKLDNGGYYITTRAQFDTLQKLVKHYTEHADGLCHKLTTVCPTVKPQTQGLAKDAWEIPRESLRLEVKLGQGCFGEVWMGTWNGTTKVAIKTLKPGTMMPEAFLQEAQIMKKLRHDKLVPLYAVVSEEPIYIVTEFMSKGSLLDFLKEGDGKYLKLPQLVDMAAQIADGMAYIERMNYIHRDLRAANILVGENLVCKIADFGLARLIEDNEYTARQGAKFPIKWTAPEAALYGRFTIKSDVWSFGILQTELVTKGRVPYPGMVNREVLEQVERGYRMPCPQGCPESLHELMNLCWKKDPDERPTFEYIQSFLEDYFTATEPQYQPGRQSKTPSQKDKKNLPGIMVAPVVSELRGLKGEHHWGPGSRPRREMANDSPMTMNLQKKGG

SEQ ID NO: 756035 - protein, 306 aa, Homo sapiens
IISLKLENHVNDIKKPFVIKERDTLKERERELQMTLNTRMESLETALRLVLPVEKASLLLCGSDLPLHKMAIQGFHLIDADRIYQHLRNIQDSIAKQIEICNRLEEPGNFVLKELHPFDLHAMQNIILKYKTQFEGMNHRVQRSEDTLKALEDFLASLRTAKLSAEPVTDLSASDTQVAQENTLTVKNKEGEIHLMKDKAKHLDKCLKMLDMSFKDAERGDDTSCENLLDAFSIKLSETHGYGVQEEFTEENKLLEACIFKNNELLKNIQDVQSQISKIGLKDPTVPAVKHRKKSLIRLDKVLDEY

SEQ ID NO: 756036 - protein, 1101 aa, Homo sapiens
RCSGWRSAAEVRAGPAPPPVSPPPTPQPLPLPQPHEAPHRALRRCGPGSALHARSPRRHQPSMHQKTPEIYSVELSGTKDIVKTDKGDGKEKYRGLKNNCLELKKKNHKEEFQKELHLDDHKLSNRELEEKYGTDIIMGLSSTRAAELLARDGPNSLTPPKQTPEIVKFLKQMVGGFSILLWVGAFLCWIAYGIQYSSDKSASLNNVYLGCVLGLVVILTGIFAYYQEAKSTNIMSSFNKMIPQQALVIRDSEKKTIPSEQLVVGDIVEVKGGDQIPADIRVLSSQGCRVDNSSLTGESEPQPRSSEFTHENPLETKNICFYSTTCLEGTVTGMVINTGDRTIIGHIASLASGVGNEKTPIAIEIEHFVHIVAGVAVSIGILFFIIAVSLKYQVLDSIIFLIGIIVANVPEGLLATVTVTLSLTAKRMAKKNCLVKNLEAVETLGSTSIICSDKTGTLTQNRMTVAHLWFDNQIFVADTSEDHSNQVFDQSSRTWASLSKIITLCNRAEFKPGQENVPIMKKAVIGDASETALLKFSEVILGDVMEIRKRNRKVAEIPFNSTNKFQLSIHEMDDPHGKRFLMVMKGAPERILEKCSTIMINGEEHPLDKSTAKTFHTAYMELGGLGERVLGFCHLYLPADEFPETYSFDIDAMNFPTSNLCFVGLLSMIDPPRSTVPDAVTKCRSAGIKVIMVTGDHPITAKAIAKSVGIISANSETVEDIAHRLNIAVEQVNKRDAKAAVVTGMELKDMSSEQLDEILANYQEIVFARTSPQQKLIIVEGCQRQDAVVAVTGDGVNDSPALKKADIGIAMGIAGSDAAKNAADMVLLDDNFASIVTGVEEGRLIFDNLKKTIAYSLTKNIAELCPFLIYIIVGLPLPIGTITILFIDLGTDIIPSIALAYEKAESDIMNRKPRHKNKDRLVNQPLAVYSYLHIGLMQALGAFLVYFTVYAQEGFLPRTLINLRVEWEKDYVNDLKDSYGQEWTRYQREYLEWTGYTAFFVGILVQQIADLIIRKTRRNSIFQQGLFRNKVIWVGITSQIIIGLILSYGLGSVTALSFTMLRAQYWFVAVPHAILIWVYDEVRKLFIRLYPGSWWDKNMYY

SEQ ID NO: 756037 - protein, 126 aa, Homo sapiens
TWAGRAAFKAGATSPVQRLAIGRGGACRARAAAGISTANTSATATATATRGPPPCAPPLRSRIRAPRPQPAAPPAQHAPGACSPRAGRGCETLGQGPGDRSRLTGSEEKAKRRNAPSRGKGRPPFL

SEQ ID NO: 756038 - protein, 360 aa, Homo sapiens
MEECWVTEIANGSKDGLDSNPMKDYMILSGPQKTAVAVLCTLLGLLSALENVAVLYLILSSHQLRRKPSYLFIGSLAGADFLASVVFACSFVNFHVFHGVDSKAVFLLKIGSVTMTFTASVGSLLLTAIDRYLCLRYPPSYKALLTRGRALVTLGIMWVLSALVSYLPLMGWTCCPRPCSELFPLIPNDYLLSWLLFIAFLFSGIIYTYGHVLWKAHQHVASLSGHQDRQVPGMARMRLDVRLAKTLGLVLAVLLICWFPVLALMAHSLATTLSDQVKKAFAFCSMLCLINSMVNPVIYALRSGEIRSSAHHCLAHWKKCVRGLGSEAKEEAPRSSVTETEADGKITPWPDSRDLDLSDC

SEQ ID NO: 756039 - protein, 360 aa, Homo sapiens; identical to SEQ ID NO: 756038

SEQ ID NO: 756040 - protein, 360 aa, Homo sapiens; identical to SEQ ID NO: 756038

SEQ ID NO: 756041 - protein, 360 aa, Homo sapiens; identical to SEQ ID NO: 756038

SEQ ID NO: 756042 - protein, 360 aa, Homo sapiens; identical to SEQ ID NO: 756038

SEQ ID NO: 756043 - protein, 304 aa, Homo sapiens
MIQNSRPSLLQPQDVGDTVETLMLHPVIKAFLCGSISGTCSTLLFQPLDLLKTRLQTLQPSDHGSRRVGMLAVLLKVVRTESLLGLWKGMSPSIVRCVPGVGIYFGTLYSLKQYFLRGHPPTALESVMLGVGSRSVAGVCMSPITVIKTRYESGKYGYESIYAALRSIYHSEGHRGLFSGLTATLLRDAPFSGIYLMFYNQTKNIVPHDQVDATLIPITNFSCGIFAGILASLVTQPADVIKTHMQLYPLKFQWIGQAVTLIFKDYGLRGFFQGGIPRALRRTLMAAMAWTVYEEMMAKMGLKS

SEQ ID NO: 756044 - protein, 304 aa, Homo sapiens; identical to SEQ ID NO: 756043

SEQ ID NO: 756045 - protein, 304 aa, Homo sapiens; identical to SEQ ID NO: 756043

SEQ ID NO: 756046 - protein, 304 aa, Homo sapiens; identical to SEQ ID NO: 756043

SEQ ID NO: 756047 - protein, 235 aa, Homo sapiens
MLAVLLKVVRTESLLGLWKGMSPSIVRCVPGVGIYFGTLYSLKQYFLRGHPPTALESVMLGVGSRSVAGVCMSPITVIKTRYESGKYGYESIYAALRSIYHSEGHRGLFSGLTATLLRDAPFSGIYLMFYNQTKNIVPHDQVDATLIPITNFSCGIFAGILASLVTQPADVIKTHMQLYPLKFQWIGQAVTLIFKDYGLRGFFQGGIPRALRRTLMAAMAWTVYEEMMAKMGLKS

SEQ ID NO: 756048 - protein, 304 aa, Homo sapiens; identical to SEQ ID NO: 756043

SEQ ID NO: 756049 - protein, 298 aa, Homo sapiens
MACTREAKYEENMRHHQLHPVIKAFLCGSISGTCSTLLFQPLDLLKTRLQTLQPSDHGSRRVGMLAVLLKVVRTESLLGLWKGMSPSIVRCVPGVGIYFGTLYSLKQYFLRGHPPTALESVMLGVGSRSVAGVCMSPITVIKTRYESGKYGYESIYAALRSIYHSEGHRGLFSGLTATLLRDAPFSGIYLMFYNQTKNIVPHDQVDATLIPITNFSCGIFAGILASLVTQPADVIKTHMQLYPLKFQWIGQAVTLIFKDYGLRGFFQGGIPRALRRTLMAAMAWTVYEEMMAKMGLKS

SEQ ID NO: 756050 - protein, 286 aa, Homo sapiens
MRHHQLHPVIKAFLCGSISGTCSTLLFQPLDLLKTRLQTLQPSDHGSRRVGMLAVLLKVVRTESLLGLWKGMSPSIVRCVPGVGIYFGTLYSLKQYFLRGHPPTALESVMLGVGSRSVAGVCMSPITVIKTRYESGKYGYESIYAALRSIYHSEGHRGLFSGLTATLLRDAPFSGIYLMFYNQTKNIVPHDQVDATLIPITNFSCGIFAGILASLVTQPADVIKTHMQLYPLKFQWIGQAVTLIFKDYGLRGFFQGGIPRALRRTLMAAMAWTVYEEMMAKMGLKS

SEQ ID NO: 756051 - protein, 244 aa, Homo sapiens
MIQNSRPSLLQPQDVGDTVETLMLHPVIKAFLCGSISGTCSTLLFQPLDLLKTRLQTLQPSDHGSRRVGMLAVLLKVVRTESLLGLWKGMSPSGKYGYESIYAALRSIYHSEGHRGLFSGLTATLLRDAPFSGIYLMFYNQTKNIVPHDQVDATLIPITNFSCGIFAGILASLVTQPADVIKTHMQLYPLKFQWIGQAVTLIFKDYGLRGFFQGGIPRALRRTLMAAMAWTVYEEMMAKMGLKS

SEQ ID NO: 756052 - protein, 304 aa, Homo sapiens; identical to SEQ ID NO: 756043

SEQ ID NO: 756053 - protein, 304 aa, Homo sapiens; identical to SEQ ID NO: 756043

SEQ ID NO: 756054 - protein, 304 aa, Homo sapiens; identical to SEQ ID NO: 756043

SEQ ID NO: 756055 - protein, 288 aa, Homo sapiens
MIQNSRPSLLQPQDVGDTVETLMLHPVIKAFLCGSISGTCSTLLFQPLDLLKTRLQTLQPSDHGSRRVGMLAVLLKSIVRCVPGVGIYFGTLYSLKQYFLRGHPPTALESVMLGVGSRSVAGVCMSPITVIKTRYESGKYGYESIYAALRSIYHSEGHRGLFSGLTATLLRDAPFSGIYLMFYNQTKNIVPHDQVDATLIPITNFSCGIFAGILASLVTQPADVIKTHMQLYPLKFQWIGQAVTLIFKDYGLRGFFQGGIPRALRRTLMAAMAWTVYEEMMAKMGLKS

SEQ ID NO: 756056 - protein, 287 aa, Homo sapiens
FGLRSGRVYSPPPPRPRGPRHRTSGGARPRLPRHSRTGSLLAGAGPGLAALVTMSETSFNLISEKCDILSILRDHPENRIYRRKIEELSKRFTAIRKTKGDGNCFYRALGYSYLESLLGKSREIFKFKERVLQTPNDLLAAGFEEHKFRNFFNAFYSVVELVEKDGSVSSLLKVFNDQSASDHIVQFLRLLTSAFIRNRADFFRHFIDEEMDIKDFCTHEVEPMATECDHIQITALSQALSIALQVEYVDEMDTALNHHVFPEAATPSVYLLYKTSHYNILYAADKH

SEQ ID NO: 756057 - protein, 155 aa, Homo sapiens
MHTHTMQLSHQGPAGPGWRCARCMWLCVGGRGGRFCGWTRDEVGGRSGLRGGRTVANHSTLAVFPCKHSVFPLCRFKERVLQTPNDLLAAGFEEHKFRNFFNAVSSPGPSFHTGRADRSGHWLEPLHSPQLCSSWLGKDRGFLPACGGVWAQGAL

SEQ ID NO: 756058 - protein, 225 aa, Homo sapiens
FGLRSGRVYSPPPPRPRGPRHRTSGGARPRLPRHSRTGSLLAGAGPGLAALVTMSETSFNLISEKCDILSILRDHPENRIYRRKIEELSKRFTAIRKTKGDGNCFYRALGYSYLESLLGKSREIFKWCRGPLACQGCVLCARSASSLSEVFVTLRLVNPENELKSCLAEAFDVGGAQLPAVVKLGAAKGWRMESVTSQMLSSLCFHHRPGSAQVSRREQVLRDPL

SEQ ID NO: 756059 - protein, 287 aa, Homo sapiens; identical to SEQ ID NO: 756056

SEQ ID NO: 756060 - protein, 347 aa, Homo sapiens
IASSSRGIGSHCKSEGQEESFVPQSSVQPPEGDSETKAPEESSEDATKYQEGVSAENPVENHINITQSDKFTAKPLDSNSGERNDLNLDRSCGVPEESASSEKAKEPETSDQTSTESATNENNTNPEPQFQTEATGPSAHEETSTRDSALQDTDDSDDDPVLIPGARYRAGPGDRFNIRGTTIGDRIMRRSAVARIQEFFRRRKERKEMEELDTLNIRRPLVKMVYKGHRNSRTMIKEANFWGANFVMSGSDCGHIFIWDRDTGEHLMLLEADNKGKLLEHIRCEPILASSGIDYDMRDLVTIRRVRIFNRKLLTEYNSKESMLEKLDTPSGPGSLLLTMLVHLSIS

SEQ ID NO: 756061 - protein, 71 aa, Homo sapiens
MVGGGKRPAKGKNREKIFKFSLLKGFYLHNNATFLPARPNRKSNGCISESSILSGRNMVMRFKKIFLKELN

SEQ ID NO: 756062 - protein, 422 aa, Homo sapiens
MDVLSPGQGNNTTSPPAPFETGGNTTGISDVTVSYQVITSLLLGTLIFCAVLGNACVVAAIALERSLQNVANYLIGSLAVTDLMVSVLVLPMAALYQVLNKWTLGQVTCDLFIALDVLCCTSSILHLCAIALDRYWAITDPIDYVNKRTPRRAAALISLTWLIGFLISIPPMLGWRTPEDRSDPDACTISKDHGYTIYSTFGAFYIPLLLMLVLYGRIFRAARFRIRKTVKKVEKTGADTRHGASPAPQPKKSVNGESGSRNWRLGVESKAGGALCANGAVRQGDDGAALEVIEVHRVGNSKEHLPLPSEAGPTPCAPASFERKNERNAEAKRKMALARERKTVKTLGIIMGTFILCWLPFFIVALVLPFCESSCHMPTLLGAIINWLGYSNSLLNPVIYAYFNKDFQNAFKKIIKCKFCRQ

SEQ ID NO: 756063 - protein, 118 aa, Homo sapiens
PLGCSAAYCLRKFRWATSPLGAPFFTLKLDNSLPSQGSIESEMRLGAVAHTCNFSTLGGRGGWITRSGVRDQPVQYGETLSLLENTKISRAWWHTPVVPATWEAEAGESLEPGRWRLQ

SEQ ID NO: 756064 - protein, 145 aa, Homo sapiens
ADAASASLTPDFLSPGSSNVSSPLPCFGSSFHSTTSFVISDITEETEVEVPELPSVPLLCSASPECCKPEHKAACSSSEEDDCVSLSKASSFADMMGILKDFHRMKQSQDLNRSLLKEEDPAVLISEVLRRKFALKEEDISRKGN

SEQ ID NO: 756065 - protein, 471 aa, Homo sapiens
EVGEEGPAGVEGLNFPAQSRRLPGPQQCSPGAEQGASARARRPRPRPRPAAMVPGVPGAVLTLCLWLAASSGCLAAGPGAAAARRLDESLSAGSVQRAPCASRCLSLQITRISAFFQHFQNNGSLVWCQNHKQCSKCLEPCKESGDLRKHQCQSFCEPLFPKKSYECLTSCEFLKYILLVKQGDCPAPEKASGFAAACVESCEVDNECSGVKKCCSNGCGHTCQVPKTLYKGVPLKPRKELRFTELQSGQLEVKWSSKFNISIEPVIYVVQRRWNYGIHPSEDDATHWQTVAQTTDERVQLTDIRPSRWYQFRVAAVNVHGTRGFTAPSKHFRSSKDPSAPPAPANLRLANSTVNSDGSVTVTIVWDLPEEPDIPVHHYKVFWSWMVSSKSLVPTKKKRRKTTDGFQNSVILEKLQPDCDYVVELQAITYWGQTRLKSAKVSLHFTSTHATNNNRTTGNSGSRNDQHGVGE

SEQ ID NO: 756066 - protein, 105 aa, Homo sapiens
LTVPNLRPSTLYRLEVQVLTPGGEGPATIKTFRTPELPPSSAHSEWGARALSHPVRSCGHREKSCWKMKTNKYTSTGFYEIGKLSSSEILSPCLYRLTRFYSRHL

SEQ ID NO: 756067 - protein, 731 aa, Homo sapiens
EVGEEGPAGVEGLNFPAQSRRLPGPQQCSPGAEQGASARARRPRPRPRPAAMVPGVPGAVLTLCLWLAASSGCLAAGPGAAAARRLDESLSAGSVQRAPCASRCLSLQITRISAFFQHFQNNGSLVWCQNHKQCSKCLEPCKESGDLRKHQCQSFCEPLFPKKSYECLTSCEFLKYILLVKQGDCPAPEKASGFAAACVESCEVDNECSGVKKCCSNGCGHTCQVPKTLYKGVPLKPRKELRFTELQSGQLEVKWSSKFNISIEPVIYVVQRRWNYGIHPSEDDATHWQTVAQTTDERVQLTDIRPSRWYQFRVAAVNVHGTRGFTAPSKHFRSSKDPSAPPAPANLRLANSTVNSDGSVTVTIVWDLPEEPDIPVHHYKVFWSWMVSSKSLVPTKKKRRKTTDGFQNSVILEKLQPDCDYVVELQAITYWGQTRLKSAKVSLHFTSTHATNNKEQLVKTRKGGIQTQLPFQRRRPTRPLEVGAPFYQDGQLQVKVYWKKTEDPTVNRYHVRWFPEACAHNRTTGSEASSGMTHENYIILQDLSFSCKYKVTVQPIRPKSHSKAEAVFFTTPPCSALKGKSHKPIGCLGEAGHVLSKVLAKPENLSASFIVQDVNITGHFSWKMAKANLYQPMTGFQVTWAEVTTESRQNSLPNSIISQSQILPSDHYVLTVPNLRPSTLYRLEVQVLTPGGEGPATIKTFRTPELPPSSAHRSHLKHRHPHHYKPSPERY

SEQ ID NO: 756068 - protein, 684 aa, Homo sapiens
EVGEEGPAGVEGLNFPAQSRRLPGPQQCSPGAEQGASARARRPRPRPRPAAMVPGVPGAVLTLCLWLAASSGCLAAGPGAAAARRLDESLSAGSVQRAPCASRCLSLQITRISAFFQHFQNNGSLVWCQNHKQCSKCLEPCKESGDLRKHQCQSFCEPLFPKKSYECLTSCEFLKYILLVKQGDCPAPEKASGFAAACVESCEVDNECSGVKKCCSNGCGHTCQVPKTLYKGVPLKPRKELRFTELQSGQLEVKWSSKFNISIEPVIYVVQRRWNYGIHPSEDDATHWQTVAQTTDERVQLTDIRPSRWYQFRVAAVNVHGTRGFTAPSKHFRSSKDPSAPPAPANLRLANSTVNSDGSVTVTIVWDLPEEPDIPVHHYKVFWSWMVSSKSLVPTKKKRRKTTDGFQNSVILEKLQPDCDYVVELQAITYWGQTRLKSAKVSLHFTSTHATNNKEQLVKTRKGGIQTQLPFQRRRPTRPLEVGAPFYQDGQLQVKVYWKKTEDPTVNRYHVRWFPEACAHNRTTGSEASSGMTHENYIILQDLSFSCKYKVTVQPIRPKSHSKAEAVFFTTPPCSALKGKSHKPIGCLGEAGHVLSKVLAKPENLSASFIVQDVNITGHFSWKMAKANLYQPMTGFQVTWAEVTTESRQNSLPNSIISQSQILPSVGPTSCTMSVSLVSTAPFY

SEQ ID NO: 756069 - protein, 71 aa, Homo sapiens
MEHIHGEEQKLYPIERLLFLPGDKDTCIGGQKREETKPLQMADVNLVERATGDERKRRRQVMQSVNGAVGW

SEQ ID NO: 756070 - protein, 364 aa, Homo sapiens
GSDLDSLLRCCRFGPARSQPPAARPAQLPPRPLAAVPLLVPSRLVRGCAGGRAGAQGKLEGRAREGSFVDFTAANIWAQRGPPLAVSPPRRLGDPEGAQPQGRRLRFGTSPPGCGSGRCAEAAKQLQPPPRRSTLAPCAMVTHSKFPAAGMSRPLDTSLRLKTFSSKSEYQLVVNAVRKLQESGFYWSAVTGGEANLLLSAEPAGTFLIRDSSDQRHFFTLSVKTQSGTKNLRIQCEGGSFSLQSDPRSTQPVPRFDCVLKLVHHYMPPPGAPSFPSPPTEPSSEVPEQPSAQPLPGSPPRRAYYIYSGGEKIPLVLSRPLSSNVATLQHLCRKTVNGHLDSYEKVTQLPGPIREFLDQYDAPL

SEQ ID NO: 756071 - protein, 364 aa, Homo sapiens; identical to SEQ ID NO: 756070

SEQ ID NO: 756072 - protein, 225 aa, Homo sapiens
MVTHSKFPAAGMSRPLDTSLRLKTFSSKSEYQLVVNAVRKLQESGFYWSAVTGGEANLLLSAEPAGTFLIRDSSDQRHFFTLSVKTQSGTKNLRIQCEGGSFSLQSDPRSTQPVPRFDCVLKLVHHYMPPPGAPSFPSPPTEPSSEVPEQPSAQPLPGSPPRRAYYIYSGGEKIPLVLSRPLSSNVATLQHLCRKTVNGHLDSYEKVTQLPGPIREFLDQYDAPL

SEQ ID NO: 756073 - protein, 215 aa, Homo sapiens
MVTHSKFPAAGMSRPLDTSLRLKTFSSKSEYQLVVNAVRKLQESGFYWSAVTGGEANLLLSAEPAGTFLIRDSSDQRHFFTLSVKTQSGTKNLRIQCEGGSFSLQSDPRSTQPVPRFDCVLKLVHHYTPPTEPSSEVPEQPSAQPLPGSPPRRAYYIYSGGEKIPLVLSRPLSSNVATLQHLCRKTVNGHLDSYEKVTQLPGPIREFLDQYDAPL

SEQ ID NO: 756074 - protein, 364 aa, Homo sapiens; identical to SEQ ID NO: 756070

SEQ ID NO: 756075 - protein, 364 aa, Homo sapiens; identical to SEQ ID NO: 756070

SEQ ID NO: 756076 - protein, 173 aa, Homo sapiens
LLGVWTSVAVVWFDLVDYEEVLGKLGIYDADGDGDFDVDDAKVLLGLKERSTSEPAVPPEEAEPLTEAEKSTKTRKETQKLREFEEGLVSQYKFYLENLEQMVKDWKQRKLKKSNVVSLKAYKGLAEVAVKSLCELLVALPHFNFHNNIIVLIVPLMNDMSKLVSCCKWLLLS

SEQ ID NO: 756077 - protein, 687 aa, Homo sapiens
FPCSEPVHAKKRKHERIIDKYEKIPRTLQTAPEKELIHLLPIKDKSGIIPQTREKPVTDSNKDEEDQEEERELEEEIIEDPIQELTIEEHLIERKKKLQEKKMHIAALASAILSDPENNIKKLKELRSMLMEQDPDVAVTVRKLVIVSLMELFKDITPSYKIRPLTEAEKSTKTRKETQKLREFEEGLVSQYKFYLENLEQMVKDWKQRKLKKSNVVSLKAYKGLAEVAVKSLCELLVALPHFNFHNNIIVLIVPLMNDMSKLISEMCCEAVKKLFKQDKLGQASLGVIKVISGFVKGRNYEVRPEMLKTFLCLRIKEVEVKKDTEDINKPKKFMTFKEKRKSLSRMQRKWKKAEEKLARELREAEASESTEKKLKLHTETLNIVFVTYFRILKKAQRSPLLPAVLEGLAKFAHLINVEFFDDLLVVLHTLIESGDLSYQESLHCVQTAFHILSGQGDVLNIDPLKFYTHLYKTLFKLHAGATNEGVEIVLQCLDVMLTKRRKQVSQQRALAFIKRLCTLALHVLPNSSIGILATTRILMHTFPKTDLLLDSESQGSGVFLPELDEPEYCNAQNTALWELHALRRHYHPIVQRFAAHLIAGAPSEGSGALKPELSRRSATELFEAYSMAEMTFNPPVESSNPKIKGKFLQGDSFLNEDLNQLIKRYSSEVATESPLDFTKYLKTSLH

SEQ ID NO: 756078 - protein, 687 aa, Homo sapiens; identical to SEQ ID NO: 756077

SEQ ID NO: 756079 - protein, 174 aa, Homo sapiens [sequence omitted]

SEQ ID NO: 756080 - protein, 625 aa, Homo sapiens
FPCSEPVHAKKRKHERIIDKYEKIPRTLQTAPEKELIHLLPIKDKSGIIPQTREKPVTDSNKDEEDQEEERELEEEIIEDPIQELTIEEHLIERKKKLQEKKMHIAALASAILSDPENNIKKLKELRSMLMEQDPDVAVTVRKLVIVSLMELFKDITPSYKIRPLTEAEKSTKTRKETQKLREFEEGLVSQYKFYLENLEQMVKDWKQRKLKKSNVVSLKAYKGLAEVAVKSLCELLVALPHFNFHNNIIVLIVPLMNDMSKLISEMCCEAVKKLFKQDKLGQASLGVIKVISGFVKGRNYEVRPEMLKTFLCLRIKEVEVKKDTEDINKPKKFMTFKEKRKSLSRMQRKWKKAEEKLARELREAEASESTEKKLKLHTETLNIVFVTYFRILKKAQRSPLLPAVLEGLAKFAHLINVEFFDDLLVVLHTLIESGDLSYQESLHCVQTAFHILSGQGDVLNIDPLKFYTHLYKTLFKLHAGATNEGVEIVLQCLDVMLTKRRKQVSQQRALAFIKRLCTLALHVLPNSSIGILATTRILMHTFPKTDLLLDSESQGSGVFLPELDEPEYCNAQNTALWELHALRVRVALVFFFLGMFVNNCFPVFLQIVVIARVLNYILFWGCLF

SEQ ID NO: 756081 - protein, 104 aa, Homo sapiens [sequence omitted]

SEQ ID NO: 756082 - protein, 104 aa, Homo sapiens [sequence omitted]

SEQ ID NO: 756083 - protein, 227 aa, Homo sapiens
MAAQLLEEKLTCAICLGLYQDPVTLPCGHNFCGACIRDWWDRCGKACPECREPFPDGAELRRNVALSGVLEVVRAGPARDPGPDPGPGPDPAARCPRHGRPLELFCRTEGRCVCSVCTVRECRLHERALLDAERLKREAQLRASLEVTQQQATQAEGQLLELRKQSSQIQVRGLCLPAHHGLTLHPGAATSWSLEHQAAGSGAEQGAGHRGPGEVPGTLPPHIPDPQ

SEQ ID NO: 756084 - protein, 485 aa, Homo sapiens
MAAQLLEEKLTCAICLGLYQDPVTLPCGHNFCGACIRDWWDRCGKACPECREPFPDGAELRRNVALSGVLEVVRAGPARDPGPDPGPGPDPAARCPRHGRPLELFCRTEGRCVCSVCTVRECRLHERALLDAERLKRENSACILASWVSGKFSSLLQALEIQHTTALRSIEVAKTQALAQARDEEQRLRVHLEAVARHGCRIRELLEQVDEQTFLQESQLLQPPGPLGPLTPLQWDEDQQLGDLKQLLSRLCGLLLEEGSHPGAPAKPVDLAPVEAPGPLAPVPSTVCPLRRKLWQNYRNLTFDPVSANRHFYLSRQDQQVKHCRQSRGPGGPGSFELWQVQCAQSFQAGHHYWEVRASDHSVTLGVSYPQLPRCRLGPHTDNIGRGPCSWGLCVQEDSLQAWHNGEAQRLPGVSGRLLGMDLDLASGCLTFYSLEPQTQPLYTFHALFNQPLTPVFWLLEGRTLTLCHQPGAVFPLGPQEEVLS

SEQ ID NO: 756085 - protein, 495 aa, Homo sapiens
MAAQLLEEKLTCAICLGLYQDPVTLPCGHNFCGACIRDWWDRCGKACPECREPFPDGAELRRNVALSGVLEVVRAGPARDPGPDPGPGPDPAARCPRHGRPLELFCRTEGRCVCSVCTVRECRLHERALLDAERLKREAQLRASLEVTQQQATQAEGQLLELRKQSSQIQNSACILASWVSGKFSSLLQALEIQHTTALRSIEVAKTQALAQARDEEQRLRVHLEAVARHGCRIRELLEQVDEQTFLQESQLLQPPGPLGPLTPLQWDEDQQLGDLKQLLSRLCGLLLEEGSHPGAPAKPVDLAPVDYRNLTFDPVSANRHFYLSRQDQQVKHCRQSRGPGGPGSFELWQVQCAQSFQAGHHYWEVRASDHSVTLGVSYPQLPRCRLGPHTDNIGRGPCSWGLCVQEDSLQAWHNGEAQRLPGVSGRLLGMDLDLASGCLTFYSLEPQTQPLYTFHALFNQPLTPVFWLLEGRTLTLCHQPGAVFPLGPQEEVLS

SEQ ID NO: 756086 - protein, 517 aa, Homo sapiens
MAAQLLEEKLTCAICLGLYQDPVTLPCGHNFCGACIRDWWDRCGKACPECREPFPDGAELRRNVALSGVLEVVRAGPARDPGPDPGPGPDPAARCPRHGRPLELFCRTEGRCVCSVCTVRECRLHERALLDAERLKREAQLRASLEVTQQQATQAEGQLLELRKQSSQIQNSACILASWVSGKFSSLLQALEIQHTTALRSIEVAKTQALAQARDEEQRLRVHLEAVARHGCRIRELLEQVDEQTFLQESQLLQPPGPLGPLTPLQWDEDQQLGDLKQLLSRLCGLLLEEGSHPGAPAKPVDLAPVEAPGPLAPVPSTVCPLRRKLWQNYRNLTFDPVSANRHFYLSRQDQQVKHCRQSRGPGGPGSFELWQVQCAQSFQAGHHYWEVRASDHSVTLGVSYPQLPRCRLGPHTDNIGRGPCSWGLCVQEDSLQAWHNGEAQRLPGVSGRLLGMDLDLASGCLTFYSLEPQTQPLYTFHALFNQPLTPVFWLLEGRTLTLCHQPGAVFPLGPQEEVLS

SEQ ID NO: 756087 - protein, 350 aa, Homo sapiens
MAAQLLEEKLTCAICLGLYQDPVTLPCGHNFCGACIRDWWDRCGKACPECREPFPDGAELRRNVALSGVLEVVRAGPARDPGPDPGPGPDPAARCPRHGRPLELFCRTEGRCVCSVCTVRECRLHERALLDAERLKREAQLRASLEVTQQQATQAEGQLLELRKQSSQIQNSACILASWVSGKFSSLLQALEIQHTTALRSIEVAKTQALAQARDEEQRLRVHLEAVARHGCRIRELLEQVDEQTFLQESQLLQPPGPLGPLTPLQWDEDQQLGDLKQLLSRLCGLLLEEGSHPGAPAKPVDLAPVDYRNLTFDPVSANRHFYLSRQDQQVESCSLKKTYSDPNPQDLWL

SEQ ID NO: 756088 - protein, 385 aa, Homo sapiens
MAAQLLEEKLTCAICLGLYQDPVTLPCGHNFCGACIRDWWDRCGKACPECREPFPDGAELRRNVALSGVLEVVRAGPARDPGPDPGPGPDPAARCPRHGRPLELFCRTEGRCVCSVCTVRECRLHERALLDAERLKREAQLRASLEVTQQQATQAEGQLLELRKQSSQIQNSACILASWVSGKFSSLLQALEIQHTTALRSIEVAKTQALAQARDEEQRLRVHLEAVARHGCRIRELLEQVDEQTFLQESQLLQPPGPLGPLTPLQWDEDQQLGDLKQLLSRLCGLLLEEGSHPGAPAKPVDLAPVDYRNLTFDPVSANRHFYLSRQDQQVKHCRQSRGPGGPGSFELWQVQCAQSFQAGHHYWEVESCSLKKTYSDPNPQDLWL

SEQ ID NO: 756089 - protein, 517 aa, Homo sapiens; identical to SEQ ID NO: 756086

SEQ ID NO: 756090 - protein, 517 aa, Homo sapiens; identical to SEQ ID NO: 756086

SEQ ID NO: 756091 - protein, 517 aa, Homo sapiens; identical to SEQ ID NO: 756086

SEQ ID NO: 756092 - protein, 352 aa, Homo sapiens
MAGTICFIMWVLFITDTVWSRSVRQVYEVHDSDDWTIHDFECPMECFCPPSFPTALYCENRGLKEIPAIPSRIWYLYLQNNLIETIPEKPFENATQLRWINLNKNKITNYGIEKGALSQLKKLLFLFLEDNELEEVPSPLPRSLEQLQLARNKVSRIPQGTFSNLENLTLLDLQNNKLVDNAFQRDTFKGLKNLMQLNMAKNALRNMPPRLPANTMQLFLDNNSIEGIPENYFNVIPKVAFLRLNHNKLSDEGLPSRGFDVSSILDLQLSHNQLTKVPRISAHLQHLHLDHNKIKSVNVSVICPSPSMLPAERDSFSYGPHLRYLRLDGNEIKPPIPMALMTCFRLLQAVII

SEQ ID NO: 756093 - protein, 121 aa, Homo sapiens
ILRVAVTDEVTYFVLFLGKLLVAGSIGVLAFLFFTQRLPVIAQGPASLNYYWVPLLTVIFGSYLIAHGFFSVYAMCVETIFICFCEDLERNDGSTEKPYFVTPNLHGILIKKQLVPQKQKE

SEQ ID NO: 756094 - protein, 119 aa, Homo sapiens
ILRVAVTDEVTYFVLFLGKLLVAGSIGVLAFLFFTQRLPVIAQGPASLNYYWVPLLTVIFGSYLIAHGFFSVYAMCVETIFICFLEDLERNDGSTARPYYVSQPLLKIFQEENPQTRKQ

SEQ ID NO: 756095 - protein, 101 aa, Homo sapiens
SGTISAHYNLQLPGSSNSHASASGVAGTTGTCHHARLIFVFLVEMGFRDLSSLQPPPPRFKQFSCLSLPSSPPPCPANFYIISRDGVLPCWPGWYRTPDLR

SEQ ID NO: 756096 - protein, 1437 aa, Homo sapiens
MKDIDIGKEYIIPSPGYRSVRERTSTSGTHRDREDSKFRRTRPLECQDALETAARAEGLSLDASMHSQLRILDEEHPKGKYHHGLSALKPIRTTSKHQHPVDNAGLFSCMTFSWLSSLARVAHKKGELSMEDVWSLSKHESSDVNCRRLERLWQEELNEVGPDAASLRRVVWIFCRTRLILSIVCLMITQLAGFSGPAFMVKHLLEYTQATESNLQYSLLLVLGLLLTEIVRSWSLALTWALNYRTGVRLRGAILTMAFKKILKLKNIKEKSLGELINICSNDGQRMFEAAAVGSLLAGGPVVAILGMIYNVIILGPTGFLGSAVFILFYPAMMFASRLTAYFRRKCVAATDERVQKMNEVLTYIKFIKMYAWVKAFSQSVQKIREEERRILEKAGYFQSITVGVAPIVVVIASVVTFSVHMTLGFDLTAAQAFTVVTVFNSMTFALKVTPFSVKSLSEASVAVDRFKSLFLMEEVHMIKNKPASPHIKIEMKNATLAWDSSHSSIQNSPKLTPKMKKDKRASRGKKEKVRQLQRTEHQAVLAEQKGHLLLDSDERPSPEEEEGKHIHLGHLRLQRTLHSIDLEIQEGKLVGICGSVGSGKTSLISAILGQMTLLEGSIAISGTFAYVAQQAWILNATLRDNILFGKEYDEERYNSVLNSCCLRPDLAILPSSDLTEIGERGANLSGGQRQRISLARALYSDRSIYILDDPLSALDAHVGNHIFNSAIRKHLKSKTVLFVTHQLQYLVDCDEVIFMKEGCITERGTHEELMNLNGDYATIFNNLLLGETPPVEINSKKETSGSQKKSQDKGPKTGSVKKEKAVKPEEGQLVQLEEKGQGSVPWSVYGVYIQAAGGPLAFLVIMALFMLNVGSTAFSTWWLSYWIKQGSGNTTVTRGNETSVSDSMKDNPHMQYYASIYALSMAVMLILKAIRGVVFVKGTLRASSRLHDELFRRILRSPMKFFDTTPTGRILNRFSKDMDEVDVRLPFQAEMFIQNVILVFFCVGMIAGVFPWFLVAVGPLVILFSVLHIVSRVLIRELKRLDNITQSPFLSHITSSIQGLATIHAYNKGQEFLHRYQELLDDNQAPFFLFTCAMRWLAVRLDLISIALITTTGLMIVLMHGQIPPAYAGLAISYAVQLTGLFQFTVRLASETEARFTSVERINHYIKTLSLEAPARIKNKAPSPDWPQEGEVTFENAEMRYRENLPLVLKKVSFTIKPKEKIGIVGRTGSGKSSLGMALFRLVELSGGCIKIDGVRISDIGLADLRSKLSIIPQEPVLFSGTVRSNLDPFNQYTEDQIWDALERTHMKECIAQLPLKLESEVMENGDNFSVGERQLLCIARALLRHCKILILDEATAAMDTETDLLIQETIREAFADCTMLTIAHRLHTVLGSDRIMVLAQGQVVEFDTPSVLLSNDSSRFYAMFAAAENKVAVKG

SEQ ID NO: 756097 - protein, 1276 aa, Homo sapiens
MVKHLLEYTQATESNLQYSLLLVLGLLLTEIVRSWSLALTWALNYRTGVRLRGAILTMAFKKILKLKNIKEKSLGELINICSNDGQRMFEAAAVGSLLAGGPVVAILGMIYNVIILGPTGFLGSAVFILFYPAMMFASRLTAYFRRKCVAATDERVQKMNEVLTYIKFIKMYAWVKAFSQSVQKIREEERRILEKAGYFQSITVGVAPIVVVIASVVTFSVHMTLGFDLTAAQAFTVVTVFNSMTFALKVTPFSVKSLSEASVAVDRFKLPSTVQPDVFCYVSVRPRLVSLVLIQCLIFAPPHNSYQSLFLMEEVHMIKNKPASPHIKIEMKNATLAWDSSHSSIQNSPKLTPKMKKDKRASRGKKEKVRQLQRTEHQAVLAEQKGHLLLDSDERPSPEEEEGKHIHLGHLRLQRTLHSIDLEIQEGKLVGICGSVGSGKTSLISAILGQMTLLEGSIAISGTFAYVAQQAWILNATLRDNILFGKEYDEERYNSVLNSCCLRPDLAILPSSDLTEIGERGANLSGGQRQRISLARALYSDRSIYILDDPLSALDAHVGNHIFNSAIRKHLKSKTVLFVTHQLQYLVDCDEVIFMKEGCITERGTHEELMNLNGDYATIFNNLLLGETPPVEINSKKETSGSQKKSQDKGPKTGSVKKEKAVKPEEGQLVQLEEKGQGSVPWSVYGVYIQAAGGPLAFLVIMALFMLNVGSTAFSTWWLSYWIKQGSGNTTVTRGNETSVSDSMKDNPHMQYYASIYALSMAVMLILKAIRGVVFVKGTLRASSRLHDELFRRILRSPMKFFDTTPTGRILNRFSKDMDEVDVRLPFQAEMFIQNVILVFFCVGMIAGVFPWFLVAVGPLVILFSVLHIVSRVLIRELKRLDNITQSPFLSHITSSIQGLATIHAYNKGQEFLHRYQELLDDNQAPFFLFTCAMRWLAVRLDLISIALITTTGLMIVLMHGQIPPAYAGLAISYAVQLTGLFQFTVRLASETEARFTSVERINHYIKTLSLEAPARIKNKAPSPDWPQEGEVTFENAEMRYRENLPLVLKKVSFTIKPKEKIGIVGRTGSGKSSLGMALFRLVELSGGCIKIDGVRISDIGLADLRSKLSIIPQEPVLFSGTVRSNLDPFNQYTEDQIWDALERTHMKECIAQLPLKLESEVMENGDNFSVGERQLLCIARALLRHCKILILDEATAAMDTETDLLIQETIREAFADCTMLTIAHRLHTVLGSDRIMVLAQGQVVEFDTPSVLLSNDSSRFYAMFAAAENKVAVKG

SEQ ID NO: 756098 - protein, 1437 aa, Homo sapiens; identical to SEQ ID NO: 756096

SEQ ID NO: 756099 - protein, 208 aa, Homo sapiens
MKDIDIGKEYIIPSPGYRSVRERTSTSGTHRDREDSKFRRTRPLECQDALETAARAEGLSLDASMHSQLRILDEEHPKGKYHHGLSALKPIRTTSKHQHPVDNAGLFSCMTFSWLSSLARVAHKKGELSMEDVWSLSKHESSDVNCRRLERLWQEELNEVGPDAASLRRVVWIFCRTRLILSIVCLMITQLAGFSGPNFQDGCILRSE

SEQ ID NO: 756100 - protein, 1437 aa, Homo sapiens; identical to SEQ ID NO: 756096

SEQ ID NO: 756101 - protein, 222 aa, Homo sapiens
MKDIDIGKEYIIPSPGYRSVRERTSTSGTHRDREDSKFRRTRPLECQDALETAARAEGLSLDASMHSQLRILDEEHPKGKYHHGLSALKPIRTTSKHQHPVDNAGLFSCMTFSWLSSLARVAHKKGELSMEDVWSLSKHESSDVNCRRLERLWQEELNEVGPDAASLRRVVWIFCRTRLILSIVCLMITQLAGFSGPFSLPLETAPSVPRCVGTGFTAPPSY

SEQ ID NO: 756102 - protein, 240 aa, Homo sapiens
MKDIDIGKEYIIPSPGYRSVRERTSTSGTHRDREDSKFRRTRPLECQDALETAARAEGLSLDASMHSQLRILDEEHPKGKYHHGLSALKPIRTTSKHQHPVDNAGLFSCMTFSWLSSLARVAHKKGELSMEDVWSLSKHESSDVNCRRLERLWQEELNEVGPDAASLRRVVWIFCRTRLILSIVCLMITQLAGFSGPPTDLRKEGMNLQTLRLRSSNKHQRFPGLPRAPVYQKLLERMKH

SEQ ID NO: 756103 - protein, 211 aa, Homo sapiens
MKDIDIGKEYIIPSPGYRSVRERTSTSGTHRDREDSKFRRTRPLECQDALETAARAEGLSLDASMHSQLRILDEEHPKGKYHHGLSALKPIRTTSKHQHPVDNAGLFSCMTFSWLSSLARVAHKKGELSMEDVWSLSKHESSDVNCRRLERLWQEELNEVGPDAASLRRVVWIFCRTRLILSIVCLMITQLAGFSGPPFMVKHLLEYTQTR

SEQ ID NO: 756104 - protein, 1475 aa, Homo sapiens
MKDIDIGKEYIIPSPGYRSVRERTSTSGTHRDREDSKFRRTRPLECQDALETAARAEGLSLDASMHSQLRILDEEHPKGKYHHGLSALKPIRTTSKHQHPVDNAGLFSCMTFSWLSSLARVAHKKGELSMEDVWSLSKHESSDVNCRRLERLWQEELNEVGPDAASLRRVVWIFCRTRLILSIVCLMITQLAGFSGPAFMVKHLLEYTQATESNLQYSLLLVLGLLLTEIVRSWSLALTWALNYRTGVRLRGAILTMAFKKILKLKNIKEKSLGELINICSNDGQRMFEAAAVGSLLAGGPVVAILGMIYNVIILGPTGFLGSAVFILFYPAMMFASRLTAYFRRKCVAATDERVQKMNEVLTYIKFIKMYAWVKAFSQSVQKIREEERRILEKAGYFQSITVGVAPIVVVIASVVTFSVHMTLGFDLTAAQAFTVVTVFNSMTFALKVTPFSVKSLSEASVAVDRFKLPSTVQPDVFCYVSVRPRLVSLVLIQCLIFAPLYNSYQSLFLMEEVHMIKNKPASPHIKIEMKNATLAWDSSHSSIQNSPKLTPKMKKDKRASRGKKEKVRQLQRTEHQAVLAEQKGHLLLDSDERPSPEEEEGKHIHLGHLRLQRTLHSIDLEIQEGKLVGICGSVGSGKTSLISAILGQMTLLEGSIAISGTFAYVAQQAWILNATLRDNILFGKEYDEERYNSVLNSCCLRPDLAILPSSDLTEIGERGANLSGGQRQRISLARALYSDRSIYILDDPLSALDAHVGNHIFNSAIRKHLKSKTVLFVTHQLQYLVDCDEVIFMKEGCITERGTHEELMNLNGDYATIFNNLLLGETPPVEINSKKETSGSQKKSQDKGPKTGSVKKEKAVKPEEGQLVQLEEKGQGSVPWSVYGVYIQAAGGPLAFLVIMALFMLNVGSTAFSTWWLSYWIKQGSGNTTVTRGNETSVSDSMKDNPHMQYYASIYALSMAVMLILKAIRGVVFVKGTLRASSRLHDELFRRILRSPMKFFDTTPTGRILNRFSKDMDEVDVRLPFQAEMFIQNVILVFFCVGMIAGVFPWFLVAVGPLVILFSVLHIVSRVLIRELKRLDNITQSPFLSHITSSIQGLATIHAYNKGQEFLHRYQELLDDNQAPFFLFTCAMRWLAVRLDLISIALITTTGLMIVLMHGQIPPAYAGLAISYAVQLTGLFQFTVRLASETEARFTSVERINHYIKTLSLEAPARIKNKAPSPDWPQEGEVTFENAEMRYRENLPLVLKKVSFTIKPKEKIGIVGRTGSGKSSLGMALFRLVELSGGCIKIDGVRISDIGLADLRSKLSIIPQEPVLFSGTVRSNLDPFNQYTEDQIWDALERTHMKECIAQLPLKLESEVMENGDNFSVGERQLLCIARALLRHCKILILDEATAAMDTETDLLIQETIREAFADCTMLTIAHRLHTVLGSDRIMVLAQGQVVEFDTPSVLLSNDSSRFYAMFAAAENKVAVKG

SEQ ID NO: 756105 - protein, 506 aa, Homo sapiens
TLCSAPQGTLRASSRLHDELFRRILRSPMKFFDTTPTGRILNRFSKDMDEVDVRLPFQAEMFIQNVILVFFCVGMIAGVFPWFLVAVGPLVILFSVLHIVSRVLIRELKRLDNITQSPFLSHITSSIQGLATIHAYNKGQEFLHRYQELLDDNQAPFFLFTCAMRWLAVRLDLISIALITTTGLMIVLMHGQIPPAYAGLAISYAVQLTGLFQFTVRLASETEARFTSVERINHYIKTLSLEAPARIKNKAPSPDWPQEGEVTFENAEMRYRENLPLVLKKVSFTIKPKEKIGIVGRTGSGKSSLGMALFRLVELSGGCIKIDGVRISDIGLADLRSKLSIIPQEPVLFSGTVRSNLDPFNQYTEDQIWDALERTHMKECIAQLPLKLESEVMENGDNFSVGERQLLCIARALLRHCKILILDEATAAMDTETDLLIQETIREAFADCTMLTIAHRLHTVLGSDRIMVLAQGQVVEFDTPSVLLSNDSSRFYAMFAAAENKVAVKG

SEQ ID NO: 756106 - protein, 1437 aa, Homo sapiens; identical to SEQ ID NO: 756096

SEQ ID NO: 756107 - protein, 208 aa, Homo sapiens; identical to SEQ ID NO: 756099

SEQ ID NO: 756108 - protein, 231 aa, Homo sapiens
MKDIDIGKEYIIPSPGYRSVRERTSTSGTHRDREDSKFRRTRPLECQDALETAARAEGLSLDASMHSQLRILDEEHPKGKYHHGLSALKPIRTTSKHQHPVDNAGLFSCMTFSWLSSLARVAHKKGELSMEDVWSLSKHESSDVNCRRLERLWQEELNEVGPDAASLRRVVWIFCRTRLILSIVCLMITQLAGFSGPVSSNHPFRQSPGARPRPALTLLFCCRGCAQLWAR

SEQ ID NO: 756109 - protein, 636 aa, Homo sapiens
MKDIDIGKEYIIPSPGYRSVRERTSTSGTHRDREDSKFRRTRPLECQDALETAARAEGLSLDASMHSQLRILDEEHPKGKYHHGLSALKPIRTTSKHQHPVDNAGLFSCMTFSWLSSLARVAHKKGELSMEDVWSLSKHESSDVNCRRLERLWQEELNEVGPDAASLRRVVWIFCRTRLILSIVCLMITQLAGFSGPAFMVKHLLEYTQATESNLQYSLLLVLGLLLTEIVRSWSLALTWALNYRTGVRLRGAILTMAFKKILKLKNIKEKSLGELINICSNDGQRMFEAAAVGSLLAGGPVVAILGMIYNVIILGPTGFLGSAVFILFYPAMMFASRLTAYFRRKCVAATDERVQKMNEVLTYIKFIKMYAWVKAFSQSVQKIREEERRILEKAGYFQSITVGVAPIVVVIASVVTFSVHMTLGFDLTAAQAFTVVTVFNSMTFALKVTPFSVKSLSEASVAVDRFKSLFLMEEVHMIKNKPASPHIKIEMKNATLAWDSSHSSIQNSPKLTPKMKKDKRASRGKKEKVRQLQRTEHQAVLAEQKGHLLLDSDERPSPEEEEGKHIHLGHLRLQRTLHSIDLEIQEGKLVGICGSVGSGKTSLISAILGQMTLRGQPLRGQRCPLKVTRKEAEVE

SEQ ID NO: 756110 - protein, 781 aa, Homo sapiens
MATQADLMELDMAMEPDRKAAVSHWQQQSYLDSGIHSGATTTAPSLSGKGNPEEEDVDTSQVLYEWEQGFSQSFTQEQVADIDGQYAMTRAQRVRAAMFPETLDEGMQIPSTQFDAAHPTNVQRLAEPSQMLKHAVVNLINYQDDAELATRAIPELTKLLNDEDQVVVNKAAVMVHQLSKKEASRHAIMRSPQMVSAIVRTMQNTNDVETARCTAGTLHNLSHHREGLLAIFKSGGIPALVKMLGSPVDSVLFYAITTLHNLLLHQEGAKMAVRLAGGLQKMVALLNKTNVKFLAITTDCLQILAYGNQESKLIILASGGPQALVNIMRTYTYEKLLWTTSRVLKVLSVCSSNKPAIVEAGGMQALGLHLTDPSQRLVQNCLWTLRNLSDAATKQEGMEGLLGTLVQLLGSDDINVVTCAAGILSNLTCNNYKNKMMVCQVGGIEALVRTVLRAGDREDITEPAICALRHLTSRHQEAEMAQNAVRLHYGLPVVVKLLHPPSHWPLIKATVGLIRNLALCPANHAPLREQGAIPRLVQLLVRAHQDTQRRTSMGGTQQQFVEGVRMEEIVEGCTGALHILARDVHNRIVIRGLNTIPLFVQLLYSPIENIQRVAAGVLCELAQDKEAAEAIEAEGATAPLTELLHSRNEGVATYAAAVLFRMSEDKPQDYKKRLSVELTSSLFRTEPMAWNETADLGLDIGAQGEPLGYRQDDPSYRSFHSGGYGQDALGMDPMMEHEMGGHHPGADYPVDGLPDLGHAQDLMDGLPPGDSNQLAWFDTDL

SEQ ID NO: 756111 - protein, 781 aa, Homo sapiens; identical to SEQ ID NO: 756110

SEQ ID NO: 756112 - protein, 774 aa, Homo sapiens
MELDMAMEPDRKAAVSHWQQQSYLDSGIHSGATTTAPSLSGKGNPEEEDVDTSQVLYEWEQGFSQSFTQEQVADIDGQYAMTRAQRVRAAMFPETLDEGMQIPSTQFDAAHPTNVQRLAEPSQMLKHAVVNLINYQDDAELATRAIPELTKLLNDEDQVVVNKAAVMVHQLSKKEASRHAIMRSPQMVSAIVRTMQNTNDVETARCTAGTLHNLSHHREGLLAIFKSGGIPALVKMLGSPVDSVLFYAITTLHNLLLHQEGAKMAVRLAGGLQKMVALLNKTNVKFLAITTDCLQILAYGNQESKLIILASGGPQALVNIMRTYTYEKLLWTTSRVLKVLSVCSSNKPAIVEAGGMQALGLHLTDPSQRLVQNCLWTLRNLSDAATKQEGMEGLLGTLVQLLGSDDINVVTCAAGILSNLTCNNYKNKMMVCQVGGIEALVRTVLRAGDREDITEPAICALRHLTSRHQEAEMAQNAVRLHYGLPVVVKLLHPPSHWPLIKATVGLIRNLALCPANHAPLREQGAIPRLVQLLVRAHQDTQRRTSMGGTQQQFVEGVRMEEIVEGCTGALHILARDVHNRIVIRGLNTIPLFVQLLYSPIENIQRVAAGVLCELAQDKEAAEAIEAEGATAPLTELLHSRNEGVATYAAAVLFRMSEDKPQDYKKRLSVELTSSLFRTEPMAWNETADLGLDIGAQGEPLGYRQDDPSYRSFHSGGYGQDALGMDPMMEHEMGGHHPGADYPVDGLPDLGHAQDLMDGLPPGDSNQLAWFDTDL

SEQ ID NO: 756113 - protein, 781 aa, Homo sapiens; identical to SEQ ID NO: 756110

SEQ ID NO: 756114 - protein, 141 aa, Homo sapiens
MRGRGARMAPHAFLGCLGGCSSHLRGPSEDTRRHQPHEIWDVHGTSMKPSEMIWSSLQRLTKFRESGKGKLRKSPQDRVEHVARSAAAWTSPIVLAVLLWPRWGRRPDVLTSPNPSPVVHVVHCTRALAEDQVGVEIQPWH

SEQ ID NO: 756115 - protein, 105 aa, Homo sapiens
KFHLLKGPEIPPPKQPYSLGKTPPFTVITSCPHSRIISVPSKQGESCLKSCLTNCIFIGDGHSCIAPQGGDTNCIPLWLMMPSVRSFLQVRYQCKVGKSSAAIDN

SEQ ID NO: 756116 - protein, 866 aa, Homo sapiens
MLRPGAQLLRGLLLRSCPLQGSPGRPRSVCGREGEEKPPLSAETQWKDRAETVIIGGGCVGVSLAYHLAKAGMKDVVLLEKSELTAGSTWHAAGLTTYFHPGINLKKIHYDSIKLYEKLEEETGQVVGFHQPGSIRLATTPVRVDEFKYQMTRTGWHATEQYLIEPEKIQEMFPLLNMNKVLAGLYNPGDGHIDPYSLTMALAAGARKCGALLKYPAPVTSLKARSDGTWDVETPQGSMRANRIVNAAGFWAREVGKMIGLEHPLIPVQHQYVVTSTISEVKALKRELPVLRDLEGSYYLRQERDGLLFGPYESQEKMKVQDSWVTNGVPPGFGKELFESDLDRIMEHIKAAMEMVPVLKKADIINVVNGPITYSPDILPMVGPHQGVRNYWVAIGFGYGIIHAGGVGKYLSDWILHGEPPFDLIELDPNRYGKWTTTQYTEAKARESYGFNNIVGYPKEERFAGRPTQRVSGLYQRLESKCSMGFHAGWEQPHWFYKPGQDTQYRPSFRRTNWFEPVGSEYKQVMQRVAVTDLSPFGKFNIKGQDSIRLLDHLFANVIPKVGFTNISHMLTPKGRVYAELTVSHQSPGEFLLITGSGSELHDLRWIEEEAVKGGYDVEIKNITDELGVLGVAGPQARKVLQKLTSEDLSDDVFKFLQTKSLKVSNIPVTAIRISYTGELGWELYHRREDSVALYDAIMNAGQEEGIDNFGTYAMNALRLEKAFRAWGLEMNCDTNPLEAGLEYFVKLNKPADFIGKQALKQIKAKGLKRRLVCLTLATDDVDPEGNESIWYNGKVVGNTTSGSYSYSIQKSLAFAYVPVQLSEVGQQVEVELLGKNYPAVIIQEPLVLTEPTRNRLQKKGGKDKT

SEQ ID NO: 756117 - protein, 848 aa, Homo sapiens
MLRPGAQLLRGLLLRSCPLQGSPGRPRSVCGREGEEKPPLSAETQWKDRAETVIIGGGCVGVSLAYHLAKAGMKDVVLLEKSELTAGSTWHAAGLTTYFHPGINLKKIHYDSIKLYEKLEEETGQVVGFHQPGSIRLATTPVRVDEFKYQMTRTGWHATEQYLIEPEKIQEMFPLLNMNKVLAGLYNPGDGHIDPYSLTMALAAGARKCGALLKYPAPVTSLKARSDGTWDVETPQGSMRANRIVNAAGFWAREVGKMIGLEHPLIPVQHQYVVTSTISEVKALKRELPVLRDLEGSYYLRQERDGLLFGPYESQEKMKVQDSWVTNGVPPGFGKELFESDLDRIMEHIKAAMEMVPVLKKADIINVVNGPITYSPDILPMVGPHQGVRNYWVAIGFGYGIIHAGGVGKYLSDWILHGEPPFDLIELDPNRYGKWTTTQYTEAKARESYGFNNIVGYPKEERFAGRPTQRVSGLYQRLESKCSMGFHAGWEQPHWFYKPGQDTQYRPSFRRTNWFEPVGSEYKQVMQRVAVTDLSPFGKFNIKGQDSIRLLDHLFANVIPKVGFTNISHMLTPKGRVYAELTVSHQSPGEFLLITGSGSELHDLRWIEEEAVKGGYDVEIKVLQKLTSEDLSDDVFKFLQTKSLKVSNIPVTAIRISYTGELGWELYHRREDSVALYDAIMNAGQEEGIDNFGTYAMNALRLEKAFRAWGLEMNCDTNPLEAGLEYFVKLNKPADFIGKQALKQIKAKGLKRRLVCLTLATDDVDPEGNESIWYNGKVVGNTTSGSYSYSIQKSLAFAYVPVQLSEVGQQVEVELLGKNYPAVIIQEPLVLTEPTRNRLQKKGGKDKT

SEQ ID NO: 756118 - protein, 111 aa, Homo sapiens
SYWRPWTANFDFEGEGQRQRNRERYDRDSIFAEEITRAQGATPSPTLHFGKGRYRFCGFSQKMCFHQKRAHFSFLLIANFPSIFCESHTPELHSISPVYFSGFPSWVGEIA

SEQ ID NO: 756119 - protein, 130 aa, Homo sapiens
MMVESRYALLIVDSATALYRTDYSGRGELSARQMHLARFLRMLLRLADEFGVAVVITNQVVAQVDGAAMFAADPKKPIGGNIIAHASTTRLYLRKGRGETRICKIYDSPCLPEAEAMFAINADGVGDAKD

SEQ ID NO: 756120 - protein, 339 aa, Homo sapiens
MAMQMQLEANADTSVEEESFGPQPISRLEQCGINANDVKKLEEAGFHTVEAVAYAPKKELINIKGISEAKADKILAEAAKLVPMGFTTATEFHQRRSEIIQITTGSKELDKLLQGGIETGSITEMFGEFRTGKTQICHTLAVTCQLPIDRGGGEGKAMYIDTEGTFRPERLLAVAERYGLSGSDVLDNVAYARAFNTDHQTQLLYQASAMMVESRYALLIVDSATALYRTDYSGRGELSARQMHLARFLRMLLRLADEFGVAVVITNQVVAQVDGAAMFAADPKKPIGGNIIAHASTTRLYLRKGRGETRICKIYDSPCLPEAEAMFAINADGVGDAKD

SEQ ID NO: 756121 - protein, 312 aa, Homo sapiens
MAMQMQLEANADTSVEEESFGPQPISRLEQCGINANDVKKLEEAGFHTVEAVAYAPKKELINIKGISEAKADKILAEAAKLVPMGFTTATEFHQRRSEIIQITTGSKELDKLLQGGIETGSITEMFGEFRTGKTQICHTLAVTCQLPIDRGGGEGKAMYIDTEGTFRPERLLAVAERYGLSGSDVLDNVAYARAFNTDHQTQLLYQASAMMVESRYALLIVDSATALYRTDYSGRGELSARQMHLARFLRMLLRLADEFGVAVVITNQVVAQVDGAAMFAADPKKPIGGNIIAHASTTSFSSFHRVDSIVWI

SEQ ID NO: 756122 - protein, 215 aa, Homo sapiens
MFGEFRTGKTQICHTLAVTCQLPIDRGGGEGKAMYIDTEGTFRPERLLAVAERYGLSGSDVLDNVAYARAFNTDHQTQLLYQASAMMVESRYALLIVDSATALYRTDYSGRGELSARQMHLARFLRMLLRLADEFGVAVVITNQVVAQVDGAAMFAADPKKPIGGNIIAHASTTRLYLRKGRGETRICKIYDSPCLPEAEAMFAINADGVGDAKD

SEQ ID NO: 756123 - protein, 215 aa, Homo sapiens; identical to SEQ ID NO: 756122

SEQ ID NO: 756124 - protein, 182 aa, Homo sapiens [sequence omitted]

SEQ ID NO: 756125 - protein, 109 aa, Homo sapiens
GLTLELPGERKQMHLARFLRMLLRLADEFGVAVVITNQVVAQVDGAAMFAADPKKPIGGNIIAHASTTRLYLRKGRGETRICKIYDSPCLPEAEAMFAINADGVGDAKD

SEQ ID NO: 756126 - protein, 339 aa, Homo sapiens; identical to SEQ ID NO: 756120

SEQ ID NO: 756127 - protein, 339 aa, Homo sapiens; identical to SEQ ID NO: 756120

SEQ ID NO: 756128 - protein, 280 aa, Homo sapiens
MAMQMQLEANADTSVEEESFGPQPISRLEQCGINANDVKKLEEAGFHTVEAVAYAPKKELINIKGISEAKADKILAEAAKLVPMGFTTATEFHQRRSEIIQITTGSKELDKLLQGGIETGSITEMFGEFRTGKTQICHTLAVTCQLPIDRGGGEGKAMYIDTEGTFRPERLLAVAERYGLSGSDVLDNVAYARAFNTDHQTQLLYQASAMMVESRYALLIVDSATALYRTDYSGRGELSARQMHLARFLRMLLRLADEIVSEERKRGNQNLQNLRLSLSS

SEQ ID NO: 756129 - protein, 151 aa, Homo sapiens
MAMQMQLEANADTSVEEESFGPQPISRLEQCGINANDVKKLEEAGFHTVEAVAYAPKKELINIKGISEAKADKILAEAAKLVPMGFTTATEFHQRRSEIIQITTGSKELDKLLQGGIETGSITEMFGEFRTGKTQICHTLAVTCQVWSLWQ

SEQ ID NO: 756130 - protein, 223 aa, Homo sapiens
MAMQMQLEANADTSVEEESFGPQPISRLEQCGINANDVKKLEEAGFHTVEAVAYAPKKELINIKGISEAKADKILAEAAKLVPMGFTTATEFHQRRSEIIQITTGSKELDKLLQGGIETGSITEMFGEFRTGKTQICHTLAVTCQLPIDRGGGEGKAMYIDTEGTFRPERLLAVAESPQCQCFLSFPTTKTYFPHFDLSHGSAQGKGHGKKVADALTNAVGTW

SEQ ID NO: 756131 - protein, 151 aa, Homo sapiens; identical to SEQ ID NO: 756129

SEQ ID NO: 756132 - protein, 161 aa, Homo sapiens
HTPAPTGIIDSTHTEQRQVVAVTGDGTNDGPALKKADVGFAMGIAGTDVAKEASDIILTDDNFSSIVKAVMWGRNVYDSISKFLQFQLTVNVVAVIVAFTGACITQDSPLKAVQMLWVNLIMDTFASLALATEPPTETLLLRKPYGRNKPLISRTMMKNIL

SEQ ID NO: 756133 - protein, 297 aa, Homo sapiens
ESAGSRRGAQRVLASGRAVQGAGWHAGPKLSSASGPNNSFTKGAAFYPGHTEVHSVMSMLFYTLITAFLIGIQAEPHSESNVPAGHTIPQAHWTKLQHSLDTALRRARSAPAAAIAARVAGQTRNITVDPRLFKKRRLRSPRVLFSTQPPREAADTQDLDFEVGGAAPFNRTHRSKRSSSHPIFHRGEFSVCDSVSVWVGDKTTATDIKGKEVMVLGEVNINNSVFKQYFFETKCRDPNPVDSGCRGIDSKHWNSYCTTTHTFVKALTMDGKQAAWRFIRIDTACVCVLSRKAVRRA

SEQ ID NO: 756134 - protein, 173 aa, Homo sapiens
QEQVVLSPTHTLTLSHTENSPLWKMGWDDDRLLLLSPVEGGSTTDLEVQILSVCSFTGRLGAKQHTVVNGVSVWVGDKTTATDIKGKEVMVLGEVNINNSVFKQYFFETKCRDPNPVDSGCRGIDSKHWNSYCTTTHTFVKALTMDGKQAAWRFIRIDTACVCVLSRKAVRRA

SEQ ID NO: 756135 - protein, 107 aa, Homo sapiens [sequence omitted]

SEQ ID NO: 756136 - protein, 1315 aa, Homo sapiens
VRFLHLLLDKLILLVIRPPVIAGQIVNLGQASFEAMASIINRLHKNLEGNHDQHGRNSLLASYIHYVFRLPNTYPNSSSPGPGGLGGSVHYATMARSAVRPASLNLNRSRSLSNSNPDISGTPTSPDDEVRSIIGSKAMDRSCNRMSSHTETSSFLQTLTGRLPTKKLFHEELALQWVVCSGSVRESALQQAWFFFELMVKSMVHHLYFNDKLEAPRKSRFPERFMDDIAALVSTIASDIVSRFQKDTEMVERLNTSLAFFLNDLLSVMDRGFVFSLIKSCYKQVSSKLYSLPNPSVLVSLRLDFLRIICSHEHYVTLNLPCSLLTPPASPSPSVSSATSQSSGFSTNVQDQKIANMFELSVPFRQQHYLAGLVLTELAVILDPDAEGLFGLHKKVINMVHNLLSSHDSDPRYSDPQIKARVAMLYLPLIGIIMETVPQLYDFTETHNQRGRPICIATDDYESESGSMISQTVAMAIAGTSVPQLTRPGSFLLTSTSGRQHTTFSAESSRSLLICLLWVLKNADETVLQKWFTDLSVLQLNRLLDLLYLCVSCFEYKGKKVFERMNSLTFKKSKDMRAKLEEAILGSIGARQEMVRRSRGQLERSPSGSAFGSQENLRWRKDMTHWRQNTEKLDKSRAEIEHEALIDGNLATEANLIILDTLEIVVQTVSVTESKESILGGVLKVLLHSMACNQSAVYLQHCFATQRALVSKFPELLFEEETEQCADLCLRLLRHCSSSIGTIRSHASASLYLLMRQNFEIGNNFARVKMQVTMSLSSLVGTSQNFNEEFLRRSLKTILTYAEEDLELRETTFPDQVQDLVFNLHMILSDTVKMKEHQEDPEMLIDLMYRIAKGYQTSPDLRLTWLQNMAGKHSERSNHAEAAQCLVHSAALVAEYLSMLEDRKYLPVGCVTFQNISSNVLEESAVSDDVVSPDEEGICSGKYFTESGLVGLLEQAAASFSMAGMYEAVNEVYKVLIPIHEANRDAKKLSTIHGKLQEAFSKIVHQSTGWERMFGTYFRVGFYGTKFGDLDEQEFVYKEPAITKLAEISHRLEGFYGERFGEDVVEVIKDSNPVDKCKLDPNKAYIQITYVEPYFDTYEMKDRITYFDKNYNLRRFMYCTPFTLDGRAHGELHEQFKRKTILTTSHAFPYIKTRVNVTHKEEIILTPIEVAIEDMQKKTQELAFATHQDPADPKMLQMVLQGSVGTTVNQGPLEVAQVFLSEIPSDPKLFRHHNKLRLCFKDFTKRCEDALRKNKSLIGPDQKEYQRELERNYHRLKEALQPLINRKIPQLYKAVLPVTCHRDSFSRMSLRKMDL

SEQ ID NO: 756137 - protein, 1346 aa, Homo sapiens
VRFLHLLLDKLILLVIRPPVIAGQIVNLGQASFEAMASIINRLHKNLEGNHDQHGRNSLLASYIHYVFRLPNTYPNSSSPGPGGLGGSVHYATMARSAVRPASLNLNRSRSLSNSNPDISGTPTSPDDEVRSIIGSKGLDRSNSWVNTGGPKAAPWGSNPSPSAESTQAMDRSCNRMSSHTETSSFLQTLTGRLPTKKLFHEELALQWVVCSGSVRESALQQAWFFFELMVKSMVHHLYFNDKLEAPRKSRFPERFMDDIAALVSTIASDIVSRFQKDTEMVERLNTSLAFFLNDLLSVMDRGFVFSLIKSCYKQVSSKLYSLPNPSVLVSLRLDFLRIICSHEHYVTLNLPCSLLTPPASPSPSVSSATSQSSGFSTNVQDQKIANMFELSVPFRQQHYLAGLVLTELAVILDPDAEGLFGLHKKVINMVHNLLSSHDSDPRYSDPQIKARVAMLYLPLIGIIMETVPQLYDFTETHNQRGRPICIATDDYESESGSMISQTVAMAIAGTSVPQLTRPGSFLLTSTSGRQHTTFSAESSRSLLICLLWVLKNADETVLQKWFTDLSVLQLNRLLDLLYLCVSCFEYKGKKVFERMNSLTFKKSKDMRAKLEEAILGSIGARQEMVRRSRGQLERSPSGSAFGSQENLRWRKDMTHWRQNTEKLDKSRAEIEHEALIDGNLATEANLIILDTLEIVVQTVSVTESKESILGGVLKVLLHSMACNQSAVYLQHCFATQRALVSKFPELLFEEETEQCADLCLRLLRHCSSSIGTIRSHASASLYLLMRQNFEIGNNFARVKMQVTMSLSSLVGTSQNFNEEFLRRSLKTILTYAEEDLELRETTFPDQVQDLVFNLHMILSDTVKMKEHQEDPEMLIDLMYRIAKGYQTSPDLRLTWLQNMAGKHSERSNHAEAAQCLVHSAALVAEYLSMLEDRKYLPVGCVTFQNISSNVLEESAVSDDVVSPDEEGICSGKYFTESGLVGLLEQAAASFSMAGMYEAVNEVYKVLIPIHEANRDAKKLSTIHGKLQEAFSKIVHQSTGWERMFGTYFRVGFYGTKFGDLDEQEFVYKEPAITKLAEISHRLEGFYGERFGEDVVEVIKDSNPVDKCKLDPNKAYIQITYVEPYFDTYEMKDRITYFDKNYNLRRFMYCTPFTLDGRAHGELHEQFKRKTILTTSHAFPYIKTRVNVTHKEEIILTPIEVAIEDMQKKTQELAFATHQDPADPKMLQMVLQGSVGTTVNQGPLEVAQVFLSEIPSDPKLFRHHNKLRLCFKDFTKRCEDALRKNKSLIGPDQKEYQRELERNYHRLKEALQPLINRKIPQLYKAVLPVTCHRDSFSRMSLRKMDL

SEQ ID NO: 756138 - protein, 882 aa, Homo sapiens
METVPQLYDFTETHNQRGRPICIATDDYESESGSMISQTVAMAIAGTSVPQLTRPGSFLLTSTSGRQHTTFSAESSRSLLICLLWVLKNADETVLQKWFTDLSVLQLNRLLDLLYLCVSCFEYKGKKVFERMNSLTFKKSKDMRAKLEEAILGSIGARQEMVRRSRGQLERSPSGSAFGSQENLRWRKDMTHWRQNTEKLDKSRAEIEHEALIDGNLATEANLIILDTLEIVVQTVSVTESKESILGGVLKVLLHSMACNQSAVYLQHCFATQRALVSKFPELLFEEETEQCADLCLRLLRHCSSSIGTIRSHASASLYLLMRQNFEIGNNFARVKMQVTMSLSSLVGTSQNFNEEFLRRSLKTILTYAEEDLELRETTFPDQVQDLVFNLHMILSDTVKMKEHQEDPEMLIDLMYRIAKGYQTSPDLRLTWLQNMAGKHSERSNHAEAAQCLVHSAALVAEYLSMLEDRKYLPVGCVTFQNISSNVLEESAVSDDVVSPDEEGICSGKYFTESGLVGLLEQAAASFSMAGMYEAVNEVYKVLIPIHEANRDAKKLSTIHGKLQEAFSKIVHQSTGWERMFGTYFRVGFYGTKFGDLDEQEFVYKEPAITKLAEISHRLEGFYGERFGEDVVEVIKDSNPVDKCKLDPNKAYIQITYVEPYFDTYEMKDRITYFDKNYNLRRFMYCTPFTLDGRAHGELHEQFKRKTILTTSHAFPYIKTRVNVTHKEEIILTPIEVAIEDMQKKTQELAFATHQDPADPKMLQMVLQGSVGTTVNQGPLEVAQVFLSEIPSDPKLFRHHNKLRLCFKDFTKRCEDALRKNKSLIGPDQKEYQRELERNYHRLKEALQPLINRKIPQLYKAVLPVTCHRDSFSRMSLRKMDL

SEQ ID NO: 756139 - protein, 425 aa, Homo sapiens
SRSIPEAWGRRDDPPGLSRALLSSCCPLARTRRTPRLVFTPSSPYPHTPKTEQTPIPGLEDPPLGSQLRRRPGEGETDIPSRAVPPLPPLPTLCSFPAPEVQGPPASCAPAAGTLDLLRAAGCRPGKMARRSRHRLLLLLLRYLVVALGYHKAYGFSAPKDQQVVTAVEYQEAILACKTPKKTVSSRLEWKKLGRSVSFVYYQQTLQGDFKNRAEMIDFNIRIKNVTRSDAGKYRCEVSAPSEQGQNLEEDTVTLEVLVAPAVPSCEVPSSALSGTVVELRCQDKEGNPAPEYTWFKDGIRLLENPRLGSQSTNSSYTMNTKTGTLQFNTVSKLDTGEYSCEARNSVGYRRCPGKRMQVDDLNISGIIAAVVVVALVISVCGLGVCYAQRKGYFSKETSFQKSNSSSKATTMSENDFKHTKSFII

SEQ ID NO: 756140 - protein, 425 aa, Homo sapiens; identical to SEQ ID NO: 756139

SEQ ID NO: 756141 - protein, 222 aa, Homo sapiens
GLPLHLCCGDSTDVRGVPWATLGLRSDAGKYRCEVSAPSEQGQNLEEDTVTLEVLVAPAVPSCEVPSSALSGTVVELRCQDKEGNPAPEYTWFKDGIRLLENPRLGSQSTNSSYTMNTKTGTLQFNTVSKLDTGEYSCEARNSVGYRRCPGKRMQVDDLNISGIIAAVVVVALVISVCGLGVCYAQRKGYFSKETSFQKSNSSSKATTMSENDFKHTKSFII

SEQ ID NO: 756142 - protein, 401 aa, Homo sapiens
SRSIPEAWGRRDDPPGLSRALLSSCCPLARTRRTPRLVFTPSSPYPHTPKTEQTPIPGLEDPPLGSQLRRRPGEGETDIPSRAVPPLPPLPTLCSFPAPEVQGPPASCAPAAGTLDLLRAAGCRPGKMARRSRHRLLLLLLRYLVVALGYHKAYGFSAPKDQQVVTAVEYQEAILACKTPKKTVSSRLEWKKLGRSVSFVYYQQTLQGDFKNRAEMIDFNIRIKNVTRSDAGKYRCEVSAPSEQGQNLEEDTVTLEVLVAPAVPSCEVPSSALSGTVVELRCQDKEGNPAPEYTWFKDGIRLLENPRLGSQSTNSSYTMNTKTGTLQFNTVSKLDTGEYSCEARNSVGYRRCPGKRMQVDDLNISGIIAAVVVVALVISVCGLGVCYAQRKGYFSKETSFQ

SEQ ID NO: 756143 - protein, 210 aa, Homo sapiens
MIDFNIRIKNVTRSDAGKYRCEVSAPSEQGQNLEEDTVTLEVLVAPAVPSCEVPSSALSGTVVELRCQDKEGNPAPEYTWFKDGIRLLENPRLGSQSTNSSYTMNTKTGTLQFNTVSKLDTGEYSCEARNSVGYRRCPGKRMQVDDLNISGIIAAVVVVALVISVCGLGVCYAQRKGYFSKETSFQKSNSSSKATTMSENDFKHTKSFII

SEQ ID NO: 756144 - protein, 397 aa, Homo sapiens
SRSIPEAWGRRDDPPGLSRALLSSCCPLARTRRTPRLVFTPSSPYPHTPKTEQTPIPGLEDPPLGSQLRRRPGEGETDIPSRAVPPLPPLPTLCSFPAPEVQGPPASCAPAAGTLDLLRAAGCRPGKMARRSRHRLLLLLLRYLVVALGYHKAYGFSAPKDQQVVTAVEYQEAILACKTPKKTVSSRLEWKKLGRSVSFVYYQQTLQGDFKNRAEMIDFNIRIKNVTRSDAGKYRCEVSAPSEQGQNLEEDTVTLEVLVAPAVPSCEVPSSALSGTVVELRCQDKEGNPAPEYTWFKDGIRLLENPRLGSQSTNSSYTMNTKTGTLQFNTVSKLDTGEYSCEARNSVGYRRCPGKRMQVDDLNISGIIAAVCGLGVCYAQRKGYFSRRVILHLKPRQ

SEQ ID NO: 756145 - protein, 265 aa, Homo sapiens
SRSIPEAWGRRDDPPGLSRALLSSCCPLARTRRTPRLVFTPSSPYPHTPKTEQTPIPGLEDPPLGSQLRRRPGEGETDIPSRAVPPLPPLPTLCSFPAPEVQGPPASCAPAAGTLDLLRAAGCRPGKMARRSRHRLLLLLLRYLVVALGYHKAYGFSAPKDQQVVTAVEYQEAILACKTPKKTVSSRLEWKKLGRSVSFVYYQQTLQGDFKNRAEMIDFNIRIKNVTRSDAGKYRCEVSAPSEQGQNLEEDTVTLEVLGDVHVCV

SEQ ID NO: 756146 - protein, 104 aa, Homo sapiens
ELSPFSDSASHRQSLVGAMMTDTSCHTHRHTHGIHTAVHTCKQQCTCTQARAHNFKLTCGYTTQSIHIEVHMHSTHTHSTLMPTGVHVHTHTHSPAISLHPSRT

SEQ ID NO: 756147 - protein, 408 aa, Homo sapiens
MIPGNRMLMVVLLCQVLLGGASHASLIPETGKKKVAEIQGHAGGRRSGQSHELLRDFEATLLQMFGLRRRPQPSKSAVIPDYMRDLYRLQSGEEEEEQIHSTGLEYPERPASRANTVRSFHHEEHLENIPGTSENSAFRFLFNLSSIPENEVISSAELRLFREQVDQGPDWERGFHRINIYEVMKPPAEVVPGHLITRLLDTRLVHHNVTRWETFDVSPAVLRWTREKQPNYGLAIEVTHLHQTRTHQGQHVRISRSLPQGSGNWAQLRPLLVTFGHDGRGHALTRRRRAKRSPKHHSQRARKKNKNCRRHSLYVDFSDVGWNDWIVAPPGYQAFYCHGDCPFPLADHLNSTNHAIVQTLVNSVNSSIPKACCVPTELSAISMLYLDEYDKVVLKNYQEMVVEGCGCR

SEQ ID NO: 756148 - protein, 435 aa, Homo sapiens
EALLGSNCRAIQLLTNSCRTSVTVEGNEANILRMLMVVLLCQVLLGGASHASLIPETGKKKVAEIQGHAGGRRSGQSHELLRDFEATLLQMFGLRRRPQPSKSAVIPDYMRDLYRLQSGEEEEEQIHSTGLEYPERPASRANTVRSFHHEEHLENIPGTSENSAFRFLFNLSSIPENEVISSAELRLFREQVDQGPDWERGFHRINIYEVMKPPAEVVPGHLITRLLDTRLVHHNVTRWETFDVSPAVLRWTREKQPNYGLAIEVTHLHQTRTHQGQHVRISRSLPQGSGNWAQLRPLLVTFGHDGRGHALTRRRRAKRSPKHHSQRARKKNKNCRRHSLYVDFSDVGWNDWIVAPPGYQAFYCHGDCPFPLADHLNSTNHAIVQTLVNSVNSSIPKACCVPTELSAISMLYLDEYDKVVLKNYQEMVVEGCGCR

SEQ ID NO: 756149 - protein, 408 aa, Homo sapiens; identical to SEQ ID NO: 756147

SEQ ID NO: 756150 - protein, 408 aa, Homo sapiens; identical to SEQ ID NO: 756147

SEQ ID NO: 756151 - protein, 444 aa, Homo sapiens
VSLYSNIPFRSHSVVPSRATHCCSFPEPFQQVCSRLAVKNHGLLLYALFSVILLGGASHASLIPETGKKKVAEIQGHAGGRRSGQSHELLRDFEATLLQMFGLRRRPQPSKSAVIPDYMRDLYRLQSGEEEEEQIHSTGLEYPERPASRANTVRSFHHEEHLENIPGTSENSAFRFLFNLSSIPENEVISSAELRLFREQVDQGPDWERGFHRINIYEVMKPPAEVVPGHLITRLLDTRLVHHNVTRWETFDVSPAVLRWTREKQPNYGLAIEVTHLHQTRTHQGQHVRISRSLPQGSGNWAQLRPLLVTFGHDGRGHALTRRRRAKRSPKHHSQRARKKNKNCRRHSLYVDFSDVGWNDWIVAPPGYQAFYCHGDCPFPLADHLNSTNHAIVQTLVNSVNSSIPKACCVPTELSAISMLYLDEYDKVVLKNYQEMVVEGCGCR

SEQ ID NO: 756152 - protein, 460 aa, Homo sapiens
TRGSTHASGRGGGREGRSAEPGPEARSHSVVPSRATHCCSFPEPFQQVCSRLAVKNHGLLLYALFSVILLGGASHASLIPETGKKKVAEIQGHAGGRRSGQSHELLRDFEATLLQMFGLRRRPQPSKSAVIPDYMRDLYRLQSGEEEEEQIHSTGLEYPERPASRANTVRSFHHEEHLENIPGTSENSAFRFLFNLSSIPENEVISSAELRLFREQVDQGPDWERGFHRINIYEVMKPPAEVVPGHLITRLLDTRLVHHNVTRWETFDVSPAVLRWTREKQPNYGLAIEVTHLHQTRTHQGQHVRISRSLPQGSGNWAQLRPLLVTFGHDGRGHALTRRRRAKRSPKHHSQRARKKNKNCRRHSLYVDFSDVGWNDWIVAPPGYQAFYCHGDCPFPLADHLNSTNHAIVQTLVNSVNSSIPKACCVPTELSAISMLYLDEYDKVVLKNYQEMVVEGCGCR

SEQ ID NO: 756153 - protein, 461 aa, Homo sapiens
MSVSALSRVNRNCGGDFLCEPITHAKLVARLAVYTNHRHVYMYMPVYSVMTDTMIPGNRMLMVVLLCQVLLGGASHASLIPETGKKKVAEIQGHAGGRRSGQSHELLRDFEATLLQMFGLRRRPQPSKSAVIPDYMRDLYRLQSGEEEEEQIHSTGLEYPERPASRANTVRSFHHEEHLENIPGTSENSAFRFLFNLSSIPENEVISSAELRLFREQVDQGPDWERGFHRINIYEVMKPPAEVVPGHLITRLLDTRLVHHNVTRWETFDVSPAVLRWTREKQPNYGLAIEVTHLHQTRTHQGQHVRISRSLPQGSGNWAQLRPLLVTFGHDGRGHALTRRRRAKRSPKHHSQRARKKNKNCRRHSLYVDFSDVGWNDWIVAPPGYQAFYCHGDCPFPLADHLNSTNHAIVQTLVNSVNSSIPKACCVPTELSAISMLYLDEYDKVVLKNYQEMVVEGCGCR

SEQ ID NO: 756154 - protein, 408 aa, Homo sapiens; identical to SEQ ID NO: 756147

SEQ ID NO: 756155 - protein, 408 aa, Homo sapiens; identical to SEQ ID NO: 756147

SEQ ID NO: 756156 - protein, 408 aa, Homo sapiens; identical to SEQ ID NO: 756147

SEQ ID NO: 756157 - protein, 383 aa, Homo sapiens
MIPGNRMLMVVLLCQVLLGGASHASLIPETGKKKVAEIQGHAGGRRSGQSHELLRDFEATLLQMFGLRRRPQPSKSAVIPDYMRDLYRLQSGEEEEEQIHSTGLEYPERPASRANTVRSFHHEEHLENIPGTSENSAFRFLFNLSSIPENEVISSAELRLFREQVDQGPDWERGFHRINIYEVMKPPAEVVPGHLITRLLDTRLVHHNVTRWETFDVSPAVLRWTREKQPNYGLAIEVTHLHQTRTHQGQHVRISRSLPQGSGNWAQLRPLLVTFGHDGRGHALTRRRRAKRSPKHHSQRARKKNKNCRRHSLYVDFSDVGWNDWIVAPPGYQAFYCHGDCPFPLADHHASSGLTSHASSGLTSMQGRANQPCKVGTNQPCKV

SEQ ID NO: 756158 - protein, 1514 aa, Homo sapiens
RRWDPRRQKAPMAAPAEPCAGQGVWNQTEPEPAATSLLSLCFLRTAGVWVPPMYLWVLGPIYLLFIHHHGRGYLRMSPLFKAKMVLGFALIVLCTSSVAVALWKIQQGTPEAPEFLIHPTVWLTTMSFAVFLIHTERKKGVQSSGVLFGYWLLCFVLPATNAAQQASGAGFQSDPVRHLSTYLCLSLVVAQFVLSCLADQPPFFPEDPQQSNPCPETGAAFPSKATFWWVSGLVWRGYRRPLRPKDLWSLGRENSSEELVSRLEKEWMRNRSAARRHNKAIAFKRKGGSGMKAPETEPFLRQEGSQWRPLLKAIWQVFHSTFLLGTLSLIISDVFRFTVPKLLSLFLEFIGDPKPPAWKGYLLAVLMFLSACLQTLFEQQNMYRLKVLQMRLRSAITGLVYRKVLALSSGSRKASAVGDVVNLVSVDVQRLTESVLYLNGLWLPLVWIVVCFVYLWQLLGPSALTAIAVFLSLLPLNFFISKKRNHHQEEQMRQKDSRARLTSSILRNSKTIKFHGWEGAFLDRVLGIRGQELGALRTSGLLFSVSLVSFQVSTFLVALVVFAVHTLVAENAMNAEKAFVTLTVLNILNKAQAFLPFSIHSLVQARVSFDRLVTFLCLEEVDPGVVDSSSSGSAAGKDCITIHSATFAWSQESPPCLHRINLTVPQGCLLAVVGPVGAGKSSLLSALLGELSKVEGFVSIEGAVAYVPQEAWVQNTSVVENVCFGQELDPPWLERVLEACALQPDVDSFPEGIHTSIGEQGMNLSGGQKQRLSLARAVYRKAAVYLLDDPLAALDAHVGQHVFNQVIGPGGLLQGTTRILVTHALHILPQADWIIVLANGAIAEMGSYQELLQRKGALVCLLDQARQPGDRGEGETEPGTSTKDPRGTSAGRRPELRRERSIKSVPEKDRTTSEAQTEVPLDDPDRAGWPAGKDSIQYGRVKATVHLAYLRAVGTPLCLYALFLFLCQQVASFCRGYWLSLWADDPAVGGQQTQAALRGGIFGLLGCLQAIGLFASMAAVLLGGARASRLLFQRLLWDVVRSPISFFERTPIGHLLNRFSKETDTVDVDIPDKLRSLLMYAFGLLEVSLVVAVATPLATVAILPLFLLYAGFQSLYVVSSCQLRRLESASYSSVCSHMAETFQGSTVVRAFRTQAPFVAQNNARVDESQRISFPRLVADRWLAANVELLGNGLVFAAATCAVLSKAHLSAGLVGFSVSAALQVTQTLQWVVRNWTDLENSIVSVERMQDYAWTPKEAPWRLPTCAAQPPWPQGGQIEFRDFGLRYRPELPLAVQGVSFKIHAGEKVGIVGRTGAGKSSLASGLLRLQEAAEGGIWIDGVPIAHVGLHTLRSRISIIPQDPILFPGSLRMNLDLLQEHSDEAIWAALETVQLKALVASLPGQLQYKCADRGEDLSVGQKQLLCLARALLRKTQILILDEATAAVDPGTELQMQAMLGSWFAQCTVLLIAHRLRSVMDCARVLVMDKGQVAESGSPAQLLAQKGLFYRLAQESGLV

SEQ ID NO: 756159 - protein, 416 aa, Homo sapiens
RRWDPRRQKAPMAAPAEPCAGQGVWNQTEPEPAATSLLSLCFLRTAGVWVPPMYLWVLGPIYLLFIHHHGRGYLRMSPLFKAKMVLGFALIVLCTSSVAVALWKIQQGTPEAPEFLIHPTVWLTTMSFAVFLIHTERKKGVQSSGVLFGYWLLCFVLPATNAAQQASGAGFQSDPVRHLSTYLCLSLVVAQFVLSCLADQPPFFPEDPQQSNPCPETGAAFPSKATFWWVSGLVWRGYRRPLRPKDLWSLGRENSSEELVSRLEKEWMRNRSAARRHNKAIAFKRKGGSGMKAPETEPFLRQEGSQWRPLLKAIWQVFHSTFLLGTLSLIISDVFRFTVPKLLSLFLEFIGDPKPPAWKGYLLAVLMFLSACLQTLFEQQNMYRLKVLQMRLRSAITGLVYRKASTAYLKKYSEVN

SEQ ID NO: 756160 - protein, 974 aa, Homo sapiens
RRWDPRRQKAPMAAPAEPCAGQGVWNQTEPEPAATSLLSLCFLRTAGVWVPPMYLWVLGPIYLLFIHHHGRGYLRMSPLFKAKMVLGFALIVLCTSSVAVALWKIQQGTPEAPEFLIHPTVWLTTMSFAVFLIHTERKKGVQSSGVLFGYWLLCFVLPATNAAQQASGAGFQSDPVRHLSTYLCLSLVVAQFVLSCLADQPPFFPEDPQQSNPCPETGAAFPSKATFWWVSGLVWRGYRRPLRPKDLWSLGRENSSEELVSRLEKEWMRNRSAARRHNKAIAFKRKGGSGMKAPETEPFLRQEGSQWRPLLKAIWQVFHSTFLLGTLSLIISDVFRFTVPKLLSLFLEFIGDPKPPAWKGYLLAVLMFLSACLQTLFEQQNMYRLKVLQMRLRSAITGLVYRKVLALSSGSRKASAVGDVVNLVSVDVQRLTESVLYLNGLWLPLVWIVVCFVYLWQLLGPSALTAIAVFLSLLPLNFFISKKRNHHQEEQMRQKDSRARLTSSILRNSKTIKFHGWEGAFLDRVLGIRGQELGALRTSGLLFSVSLVSFQVSTFLVALVVFAVHTLVAENAMNAEKAFVTLTVLNILNKAQAFLPFSIHSLVQARVSFDRLVTFLCLEEVDPGVVDSSSSGSAAGKDCITIHSATFAWSQESPPCLHRINLTVPQGCLLAVVGPVGAGKSSLLSALLGELSKVEGFVSIEGAVAYVPQEAWVQNTSVVENVCFGQELDPPWLERVLEACALQPDVDSFPEGIHTSIGEQGMNLSGGQKQRLSLARAVYRKAAVYLLDDPLAALDAHVGQHVFNQVIGPGGLLQGTTRILVTHALHILPQADWIIVLANGAIAEMGSYQELLQRKGALVCLLDQARQPGDRGEGETEPGTSTKDPRGTSAGRRPELRRERSIKSVPEKDRTTSEAQTEVPLDDPDRAGWPAGKDSIQYGRVTTSFTHPSPPTVPPPGAQVLPPNVALGSDTHLS

SEQ ID NO: 756161 - protein, 110 aa, Homo sapiens
RRWDPRRQKAPMAAPAEPCAGQGVWNQTEPEPAATSLLSLCFLRTAGVWVPPMYLWVLGPIYLLFIHHHGRGYLRMSPLFKAKMVAAIPGSLEPGNVRGRQGTGWNLVKS

SEQ ID NO: 756162 - protein, 491 aa, Homo sapiens
SASAAAGPITRRPVPAAARASNRARSPAARCPPPPGTGMALRGFCSRWLRPALAIGLFASMAAVLLGGARASRLLFQRLLWDVVRSPISFFERTPIGHLLNRFSKETDTVDVDIPDKLRSLLMYAFGLLEVSLVVAVATPLATVAILPLFLLYAGFQVACGQCGAPGEWPGVCSCHVCCAEQSPPQCWPRGLLCLCCPPGDPDTAVGCSQLDRPREQHRVSGADAGLCLDAQGGSLEAATCAAQPPWPQGGQIEFRDFGLRYRPELPLAVQGVSFKIHAGEKVGIVGRTGAGKSSLASGLLRLQEAAEGGIWIDGVPIAHVGLHTLRSRISIIPQDPILFPGSLRMNLDLLQEHSDEAIWAALETVQLKALVASLPGQLQYKCADRGEDLSVGQKQLLCLARALLRKTQILILDEATAAVDPGTELQMQAMLGSWFAQCTVLLIAHRLRSVMDCARVLVMDKGQVAESGSPAQLLAQKGLFYRLAQESGLV

SEQ ID NO: 756163 - protein, 349 aa, Homo sapiens
SILPYGDSMDRIEKDRLQGMAPAAGADLDKIGLHSDSQEELWMFVRKKLMMEQENGNLRGSPGPKGDMGSPGPKGDRGFPGTPGIPGPLGHPGPQGPKGQKGSVGDPGMEGPMGQRGREGPMGPRGEAGPPGSGEKGERGAAGEPGPHGPPGVPGSVGPKGSSGSPGPQGPPGPVGLQGLRGEVGLPGVKGDKGPMGPPGPKGDQGEKGPRGLTGEPGMRGLPGAVGEPGAKGAMGPAGPDGHQGPRGEQGLTGMPGIRGPPGPSGDPGKPGLTGPQGPQGLPGTPGRPGIKGEPGAPGKIVTSEGSSMLTVPGPPGPPGAMGPPGPPGAPGPAGPAGLPGHQEVLNLP

SEQ ID NO: 756164 - protein, 1017 aa, Homo sapiens
SKSRGLRSYTGGRTGASRPRPGRGSGGGNMEQSRSQQRGGEQSWWGSDPQYQYMPFEHCTSYGLPSENGGLQHRLRKDAGPRHNVHPTQIYGHHKEQFSDREQDIGMPKKTGSSSTVDSKDEDHYSKCQDCIHRLGQVVRRKLGEDWIFLVLLGLLMALVSWSMDYVSAKSLQAYKWSYAQMQPSLPLQFLVWVTFPLVLILFSALFCHLISPQAVGSGIPEMKTILRGVVLKEYLTMKAFVAKVVALTAGLGSGIPVGKEGPFVHIASICAAVLSKFMSVFCGVYEQPYYYSDILTVGCAVGVGCCFGTPLGGVLFSIEVTSTYFAVRNYWRGFFAATFSAFVFRVLAVWNKDAVTITALFRTNFRMDFPFDLKELPAFAAIGICCGLLGAVFVYLHRQVMLGVRKHKALSQFLAKHRLLYPGIVTFVIASFTFPPGMGQFMAGELMPREAISTLFDNNTWVKHAGDPESLGQSAVWIHPRVNVVIIIFLFFVMKFWMSIVATTMPIPCGGFMPVFVLGAAFGRLVGEIMAMLFPDGILFDDIIYKILPGGYAVIGAAALTGAVSHTVSTAVICFELTGQIAHILPMMVAVILANMVAQSLQPSLYDSIIQVKKLPYLPDLGWNQLSKYTIFVEDIMVRDVKFVSASYTYGELRTLLQTTTVKTLPLVDSKDSMILLGSVERSELQALLQRHLCPERRLRAAQEMARKLSELPYDGKARLAGEGPPGAPPGRPESFAFVDEDEDEDLSGKSELPPSLALHPSTTAPLSPEEPNGPLPGHKQQPEAPEPAGQRPSIFQSLLHCLLGRARPTKKKTTQDSTDLVDNMSPEEIEAWEQEQLSQPVCFDSCCIDQSPFQLVEQTTLHKTHTLFSLLGLHLAYVTSMGKLRGVLALEELQKAIEGHTKSGVQLRPPLASFRNTTSTRKSTGAPPSSAENWNLPEDRPGATGTGDVIAASPETPVPSPSPEPPLSLAPGKVEGELEELELVESPGLEEELADILQGPSLRSTDEEDEDELIL

SEQ ID NO: 756165 - protein, 1495 aa, Homo sapiens
MANWAEARPLLILIVLLGQFVSIKAQEEDEDEGYGEEIACTQNGQMYLNRDIWKPAPCQICVCDNGAILCDKIECQDVLDCADPVTPPGECCPVCSQTPGGGNTNFGRGRKGQKGEPGLVPVVTGIRGRPGPAGPPGSQGPRGERGPKGRPGPRGPQGIDGEPGVPGQPGAPGPPGHPSHPGPDGLSRPFSAQMAGLDEKSGLGSQVGLMPGSVGPVGPRGPQGLQGQQGGAGPTGPPGEPGDPGPMGPIGSRGPEGPPGKPGEDGEPGRNGNPGEVGFAGSPGARGFPGAPGLPGLKGHRGHKGLEGPKGEVGAPGSKGEAGPTGPMGAMGPLGPRGMPGERGRLGPQGAPGQRGAHGMPGKPGPMGPLGIPGSSGFPGNPGMKGEAGPTGARGPEGPQGQRGETGPPGPVGSPGLPGAIGTDGTPGPKGPTGSPGTSGPPGSAGPPGSPGPQGSTGPQGNSGLPGDPGFKGEAGPKGEPGPHGIQGPIGPPGEEGKRGPRGDPGTLGPPGPVGERGAPGNRGFPGSDGLPGPKGAQGERGPVGSSGPKGSQGDPGRPGEPGLPGARGLTGNPGVQGPEGKLGPLGAPGEDGRPGPPGSIGIKGQPGTMGLPGPKGSNGDPGKPGEAGNPGVPGQRGAPGKDGKVGPYGPPGPPGLRGERGEQGPPGPTGFQGHPGPPGPPGEGGKPGDQGVPGGPGAVGPLGPRGERGNPGERGEPGITGLPGEKGMAGGHGPDGPKGSPGPSGTPGDTGPPGLQGMPGERGIAGTPGPKGDRGGIGEKGAEGTAGNDGAGGLPGPLGPPGPAGLLGEKGEPGPRGLVGPPGSRGNPGSRGENGPTGAVGFAGPQGSDGQPGVKGEPGEPGQKGDAGSPGPQGLAGSPGPHGPNGVPGLKGGRGTQGPPGATGFPGSAGRVGPPGPAGAPGPAGPLGEPGKEGPPGPRGDPGSHGRVGVRGPAGPPGGPGDKGDPGEDGQPGPDGPPGPAGTTGQRGIVGMPGQRGERGMPGLPGPAGTPGKVGPTGATGDKGPPGPVGPPGSNGPVGEPGPEGPAGNDGTPGRDGAVGERGDRGDPGPAGLPGSQGAPGTPGPVGAPGDAGQRGDPGSRGPIGHLGRAGKRGLPGPQGPRGDKGDHGDRGDRGQKGHRGFTGLQGLPGPPGPNGEQGSAGIPGPFGPRGPPGPVGPSGKEGNPGPLGPLGPPGVRGSVGEAGPEGPPGEPGPPGPPGPPGHLTAALGDIMGHYDESMPDPLPEFTEDQAAPDDKNKTDPGVHATLKSLSSQIETMRSPDGSKKHPARTCDDLKLCHSAKQSGEYWIDPNQGSVEDAIKVYCNMETGETCISANPSSVPRKTWWASKSPDNKPVWYGLDMNRGSQFAYGDHQSPNTAITQMTFLRLLSKEASQNITYICKNSVGYMDDQAKNLKKAVVLKGANDLDIKAEGNIRFRYIVLQDTCSKRNGNVGKTVFEYRTQNVARLPIIDLAPVDVGGTDQEFGVEIGPVCFV

SEQ ID NO: 756166 - protein, 69 aa, Homo sapiens
GRDVTGSVPVTHDLHVLAVVSAQCVLWDRIISKPPKEDPLPNLTPASEGLGGLWHTLPAGFVLERAGGT

SEQ ID NO: 756167 - protein, 363 aa, Homo sapiens
MKRSLSENSARSTAGCLPVPLFNQKKRNRQPLTSNPLKDDSGISTPSDNYDFPPLPTDWAWEAVNPELAPVMKTVDTGQIPHSASRPLRSQDSVFNSIQSNTGRSQGGWSYRDGNKNTSLKTWNKNDFKPQCKRTNLVANDGKNSCPVSSGAQQQKQLRIPEPPNLSRNKETELLRQTHSSKISGCTMRGLDKNSALQTLKPNFQQNQYKKQMLDDIPEDNTLKETSLYQLQFKEKASSLRIISAVIESMKYWREHAQKTVLLFEVLAVLDSAVTPGPYYSKTFLMRDGKNTLPCVFYEIDRELPRLIRGRVHRCVGNYDQKKNIFQCVSVRPASVSEQKTFQAFVKIADVEMQYYINVMNET

SEQ ID NO: 756168 - protein, 320 aa, Homo sapiens
MKRSLSENSARSTADWAWEAVNPELAPVMKTVDTGQIPHSASRPLRSQDSVFNSIQSNTGRSQGGWSYRDGNKNTSLKTWNKNDFKPQCKRTNLVANDGKNSCPVSSGAQQQKQLRIPEPPNLSRNKETELLRQTHSSKISGCTMRGLDKNSALQTLKPNFQQNQYKKQMLDDIPEDNTLKETSLYQLQFKEKASSLRIISAVIESMKYWREHAQKTVLLFEVLAVLDSAVTPGPYYSKTFLMRDGKNTLPCVFYEIDRELPRLIRGRVHRCVGNYDQKKNIFQCVSVRPASVSEQKTFQAFVKIADVEMQYYINVMNET

SEQ ID NO: 756169 - protein, 363 aa, Homo sapiens; identical to SEQ ID NO: 756167

SEQ ID NO: 756170 - protein, 363 aa, Homo sapiens; identical to SEQ ID NO: 756167

SEQ ID NO: 756171 - protein, 363 aa, Homo sapiens; identical to SEQ ID NO: 756167

SEQ ID NO: 756172 - protein, 1028 aa, Homo sapiens
MKVNRETKRLYVGGLSQDISEADLQNQFSRFGEVSDVEIITRKDDQGNPQKVFAYINISVAEADLKKSIFHVIQRDSSDEENSSMYNSAGLGPFHLASADMEHFTGMSVLNKTKWKGGTLQIQLAKESFLHRLAQEREAAKAKKEESTTGNANLLEKTGGVDFHMKAVPGTEVPGHKNWVVSKFGRVLPVLHLKNQHKRKIIKYDPSKYCHNLKKIGEDFSNTIPISSLTWELEGGNDPMSKKRRGEFSDFHGPPKKIIKVQKDESSTGSLAMSTRPRRVIERPPLTQQQAAQKRTCDSITPSKSSPVPVSDTQKLKNLPFKTSGLETAKKRNSISDDDTDSEDELRMMIAKEENLQRTTQPSINESESDPFEVVRDDFKSGVHKLHSLIGLGIKNRVSCHDSDDDIMRNDREYDSGDTDEIIAMKKNVAKVKNSTEFSQMEKSTKKTSFKNRENCELSDHCIKLQKRKSNVESALSHGLKSLNRKSPSHSSSSEDADSASELADSEGGEEYNAMMKNCLRVNLTLADLEQLAGSDLKVPNEDTKSDGPETTTQCKFDRGSKSPKTPTGLRRGRQCIRPAEIVASLLEGEENTCGKQKPKENNLKPKFQAFKGVGCLYEKESMKKSLKDSVASNNKDQNSMKHEDPSIISMEDGSPYVNGSLGEVTPCQHAKKANGPNYIQPQKRQTTFESQDRKAVSPSSSEKRSKNPISRPLEGKKSLSLSAKTHNIGFDKDSCHSTTKTEASQEERSDSSGLTSLKKSPKVSSKDTREIKTDFSLSISNSSDVSAKDKHAEDNEKRLAALEARQKAKEVQKKLVHNALANLDGHPEDKPTHIIFGSDSECETEETSTQEQSHPGEEWVKESMGKTSGKLFDSSDDDESDSEDDSNRFKIKPQFEGRAGQKLMDLQSHFGTDDRFRMDSRFLETDSEEEQEEVNEKKTAEEEELAEEKKKALNVVQSVLQINLSNSTNRGSVAAKKFKDIIHYDPTKQDHATYERKRDDKPKESKAKRKKKREEAEKLPEVSSDNV

SEQ ID NO: 756173 - protein, 915 aa, Homo sapiens
MVLVFHKGELGHPLEQQHRLAQEREAAKAKKEESTTGNANLLEKTGGVDFHMKAVPGTEVPGHKNWVVSKFGRVLPVLHLKNQHKRKIIKYDPSKYCHNLKKIGEDFSNTIPISSLTWELEGGNDPMSKKRRGEFSDFHGPPKKIIKVQKDESSTGSLAMSTRPRRVIERPPLTQQQAAQKRTCDSITPSKSSPVPVSDTQKLKNLPFKTSGLETAKKRNSISDDDTDSEDELRMMIAKEENLQRTTQPSINESESDPFEVVRDDFKSGVHKLHSLIGLGIKNRVSCHDSDDDIMRNDREYDSGDTDEIIAMKKNVAKVKNSTEFSQMEKSTKKTSFKNRENCELSDHCIKLQKRKSNVESALSHGLKSLNRKSPSHSSSSEDADSASELADSEGGEEYNAMMKNCLRVNLTLADLEQLAGSDLKVPNEDTKSDGPETTTQCKFDRGSKSPKTPTGLRRGRQCIRPAEIVASLLEGEENTCGKQKPKENNLKPKFQAFKGVGCLYEKESMKKSLKDSVASNNKDQNSMKHEDPSIISMEDGSPYVNGSLGEVTPCQHAKKANGPNYIQPQKRQTTFESQDRKAVSPSSSEKRSKNPISRPLEGKKSLSLSAKTHNIGFDKDSCHSTTKTEASQEERSDSSGLTSLKKSPKVSSKDTREIKTDFSLSISNSSDVSAKDKHAEDNEKRLAALEARQKAKEVQKKLVHNALANLDGHPEDKPTHIIFGSDSECETEETSTQEQSHPGEEWVKESMGKTSGKLFDSSDDDESDSEDDSNRFKIKPQFEGRAGQKLMDLQSHFGTDDRFRMDSRFLETDSEEEQEEVNEKKTAEEEELAEEKKKALNVVQSVLQINLSNSTNRGSVAAKKFKDIIHYDPTKQDHATYERKRDDKPKESKAKRKKKREEAEKLPEVSSDNV

SEQ ID NO: 756174 - protein, 296 aa, Homo sapiens
MKVNRETKRLYVGGLSQDISEADLQNQFSRFGEVSDVEIITRKDDQGNPQKVFAYINISVAEADLKKCMSVLNKTKWKGGNITNSTSKRKLSDGHPEDKPTHIIFGSDSECETEETSTQEQSHPGEEWVKESMGKTSGKLFDSSDDDESDSEDDSNRFKIKPQFEGRAGQKLMDLQSHFGTDDRFRMDSRFLETDSEEEQEEVNEKKTAEEEELAEEKKKALNVVQSVLQINLSNSTNRGSVAAKKFKDIIHYDPTKQDHATYERKRDDKPKESKAKRKKKREEAEKLPEVSSDNV

SEQ ID NO: 756175 - protein, 235 aa, Homo sapiens
MTLIWRHLLRPLCLVTSAPRILEMHPFLSLGTSRTSVTKLSLHTKPRMPPCDFMPERYQSLGYNRVLEIHKEHLSPVVTAYFQKPLLLHQGHMEWLFDAEGNRYLDFFSGIVTVSVGHCHPKVNAVAQKQLGRLWHTSTVFFHPPMHEYAEKLAALLPEPLKVIFLVNSGSEANELAMLMARAHSNNIDIISFRGAYHGCSPYTLGLTNVGTYKMELPGGTGCQPVSLEIFLLFL

SEQ ID NO: 756176 - protein, 514 aa, Homo sapiens
MTLIWRHLLRPLCLVTSAPRILEMHPFLSLGTSRTSVTKLSLHTKPRMPPCDFMPERYQSLGYNRVLEIHKEHLSPVVTAYFQKPLLLHQGHMEWLFDAEGNRYLDFFSGIVTVSVGHCHPKVNAVAQKQLGRLWHTSTVFFHPPMHEYAEKLAALLPEPLKVIFLVNSGSEANELAMLMARAHSNNIDIISFRGAYHGCSPYTLGLTNVGTYKMELPGGTGCQPTMCPDVFRGPWGGSHCRDSPVQTIRKCSCAPDCCQAKDQYIEQFKDTLSTSVAKSIAGFFAEPIQGVNGVVQYPKGFLKEAFELVRARGGVCIADEVQTGFGRLGSHFWGFQTHDVLPDIVTMAKGIGNGFPMAAVITTPEIAKSLAKCLQHFNTFGGNPMACAIGSAVLEVIKEENLQENSQEVGTYMLLKFAKLRDEFEIVGDVRGKGLMIGIEMVQDKISCRPLPREEVNQIHEDCKHMGLLVGRGSIFSQTFRIAPSMCITKPEVDFAVEVFRSALTQHMERRAK

SEQ ID NO: 756177 - protein, 514 aa, Homo sapiens; identical to SEQ ID NO: 756176

SEQ ID NO: 756178 - protein, 434 aa, Homo sapiens
MTLIWRHLLRPLCLVTSAPRILEMHPFLSLGTSRTSVTKLSLHTKPRMPPCDFMPERYQSLGYNRVLEIHKEHLSPVVTAYFQKPLLLHQGHMEWLFDAEGNRYLDFFSGIVTVSVGHCHPKVNAVAQKQLGRLWHTSTVFFHPPMHEYAEKLAALLPEPLKVIFLVNSGSEANELAMLMARAHSNNIDIISFRGAYHGCSPYTLGLTNVGTYKMELPGGTGCQPTMCPDVFRGPWGGSHCRDSPVQTIRKCSCAPDCCQAKDQYIEQFKDTLSTSVAKSIAGFFAEPIQGVNGVVQYPKGFLKEAFELVRARGGVCIADEVQTGFGRLGSHFWGFQTHDVLPDIVTMAKGIGNGFPMAAVITTPEIAKSLAKCLQHFNTFGGNPMACAIGSAVLEVGSSGHINLTHFTNDSFKTTHALAELYHAELLKGRVNS

SEQ ID NO: 756179 - protein, 514 aa, Homo sapiens; identical to SEQ ID NO: 756176

SEQ ID NO: 756180 - protein, 242 aa, Homo sapiens
DPRLRGEGYSRENCGCGQGVNGVVQYPKGFLKEAFELVRARGGVCIADEVQTGFGRLGSHFWGFQTHDVLPDIVTMAKGIGNGFPMAAVITTPEIAKSLAKCLQHFNTFGGNPMACAIGSAVLEVIKEENLQENSQEVGTYMLLKFAKLRDEFEIVGDVRGKGLMIGIEMVQDKISCRPLPREEVNQIHEDCKHMGLLVGRGSIFSQTFRIAPSMCITKPEVDFAVEVFRSALTQHMERRAK

SEQ ID NO: 756181 - protein, 135 aa, Homo sapiens
LLTATSSEVRTMHDTEKMLTDGFNESNIEESMSAGNKQDRWQHSMPLRTWLWIQIPDQSLNFKPLCLSEPLFSHLSSGNNNKWYVPHRGTLRIKREGFNKSSTDFKTWHIVGTQHMALIYLWPAAAGPHPSLAGS

SEQ ID NO: 756182 - protein, 70 aa, Homo sapiens
SPGPLSGSSGRRAFSYPLSAALLLLFKSCFFLLLLLVLFHDLFICRHGQNVLINKFVKKKSGSLLIQTLV

SEQ ID NO: 756183 - protein, 128 aa, Homo sapiens
MQRHHCLTSLCVSDLRQFSRNQFLVLQCHWQLPRASRTLVAWWELLFLTRPLHSPGPVRFLPGYMELDFHFSLVNGDADYLEALAPKFEIPLSEWFWRSPSFSYTIGFLSCSFRLPNLLYNPHPPSKE

SEQ ID NO: 756184 - protein, 110 aa, Homo sapiens
MQRHHCLTSLCVSDLRQFSRNQFLVLQCHWQLPRASRTLVAWWELLFLTRPLHSPGPVRFLPGYMELDFHFSLVHRGQEPGWNGCQGDCLFSEPLTGSQQDRTPLLLGEW

SEQ ID NO: 756185 - protein, 72 aa, Homo sapiens
TKDKDTYMDTVNRYHLTEPERNTSSKLKDCVTDTMTPEETEAVVQQLVSAAGPGHQRHPTALDLLESRDSVP

SEQ ID NO: 756186 - protein, 45 aa, Homo sapiens
MEVPSKPLALFTFNKVCHLFDPASGKNSPGLFAHKTVIPMHHHRP

SEQ ID NO: 756187 - protein, 47 aa, Homo sapiens
VETTVMMQTACFTAAPHQPGPVISLDLSSEKHSIPVLPVSWRRDLKP

SEQ ID NO: 756188 - protein, 120 aa, Homo sapiens [sequence omitted]

SEQ ID NO: 756189 - protein, 120 aa, Homo sapiens [sequence omitted]

SEQ ID NO: 756190 - protein, 1115 aa, Homo sapiens
EQPTTSQPETTTPQGLLSDKDDMGRRNAGIDFGSRKASAAQPIPENMDNSMVSDPQPYHEDAASGAEKTEARASLSLMVESLSTTQEEAILSVAAEAQVFMNPSHIQLEDQEAFSFDLQKAQSKMESAQDVQTICKEKPSGNVHQTFTASVLGMTSTTAKGDVYAKTLPPRSLFQSSRKPDAEEVSSDSENIPEEGDGSEELAHGHSSQSLGKFEDEQEVFSESKSFVEDLSSSEEELDLRCLSQALEEPEDAEVFTESSSYVEKYNTSEDCSSSEEDLPLRHPAQALGKPKNQQEVSSASNNTPEEQNDFMQQLPSRCPSQPIMNPTVQQQVPTSSVGTSIKQSDSVEPIPPRHPFQPWVNPKVEQEVSSSPKSMAVEESISMKPLPPKLLCQPLMNPKVQQNMFSGSEDIAVERVISVEPLLPRYSPQSLTDPQIRQISESTAVEEGTYVEPLPPRCLSQPSERPKFLDSMSTSAEWSSPVAPTPSKYTSPPWVTPKFEELYQLSAHPESTTVEEDISKEQLLPRHLSQLTVGNKVQQLSSNFERAAIEADISGSPLPPQYATQFLKRSKVQEMTSRLEKMAVEGTSNKSPIPRRPTQSFVKFMAQQIFSESSALKRGSDVAPLPPNLPSKSLSKPEVKHQVFSDSGSANPKGGISSKMLPMKHPLQSLGRPEDPQKVFSYSERAPGKCSSFKEQLSPRQLSQALRKPEYEQKVSPVSASSPKEWRNSKKQLPPKHSSQASDRSKFQPQMSSKGPVNVPVKQSSGEKHLPSSSPFQQQVHSSSVNAAARRSVFESNSDNWFLGRDEAFAIKTKKFSQGSKNPIKSIPAPATKPGKFTIAPVRQTSTSGGIYSKKEDLESGDGNNNQHANLSNQDDVEKLFGVRLKRAPPSQKYKSEKQDNFTQLASVPSGPISSSVGRGHKIRSTSQGLLDAAGNLTKISYVADKQQSRPKSESMAKKQPACKTPGKPAGQQSDYAVSEPVWITMAKQKQKSFKAHISVKELKTKSNAGADAETKEPKYEGAGSANENQPKKMFTSSVHKQEKTAQMKPPKPTKSVGFEAQKILQVPAMEKETKRSSTLPAKFQNPVEPIEPVWFSLARKKAKAWSHMAEITQ

SEQ ID NO: 756191 - protein, 72 aa, Homo sapiens
GCSGVQGSQTGTMELSVLLFLALLTGLLLLLVQRHPNSHGTLPPGPRPLPLLGNLLQMDRRGLLKSFLREWI

SEQ ID NO: 756192 - protein, 404 aa, Homo sapiens
GCSGVQGSQTGTMELSVLLFLALLTGLLLLLVQRHPNSHGTLPPGPRPLPLLGNLLQMDRRGLLKSFLRFREKYGDVFTVHLGPRPVVMLCGVEAIREALVDNAEAFSGRGKIVIMDPVYQGYGMLFANGNRWKVLRRFSVTTMRDFGMGKRSVEERIQDEAQCLIEELRKSKGALVDPTFLFHSITANIICSIIFGKRFHYQDQEFLKTLNLFCQSFLLISSISSQLFELFSGFLKYFPGAHRQVYKNLQEINAYIGHSVEKHRETLDPSAPRDLIDTYLLHMEKVRNPTHTVNSATRTSSSTRSRSSLLALRPPAPLSATASCSCSNTLMSQRESTRRLNRWLAHIALQRLMTEPKCHTQRQSSVRFRDLLTFSPWVCPTLSPNTPASEGTPSPRTRKYFSS

SEQ ID NO: 756193 - protein, 110 aa, Homo sapiens
PSLLSIAEKSNPHSEFSHQNLIINTLSLFFAGTETTSTTLRYGFLLMLKYPHVAERVYKEIEQVVGPHRPPALDDRAKMPYTEAVIREIQRFADLLPMGVPHIVTQHTSF

SEQ ID NO: 756194 - protein, 263 aa, Homo sapiens
GCSGVQGSQTGTMELSVLLFLALLTGLLLLLVQRHPNSHGTLPPGPRPLPLLGNLLQMDRRGLLKSFLRFREKYGDVFTVHLGPRPVVMLCGVEAIREALVDNAEAFSGRGKIVIMDPVYQGYGMLFANGNRWKVLRRFSVTTMRDFGMGKRSVEERIQDEAQCLIEELRKSKGALVDPTFLFHSITANIICSIIFGKRFHYQDQEFLKTLNLFCQSFLLISSISSQVQEREKEREGGGEVNIQDTREKDDLTWGLRNAAYPW

SEQ ID NO: 756195 - protein, 404 aa, Homo sapiens; identical to SEQ ID NO: 756192

SEQ ID NO: 756196 - protein, 110 aa, Homo sapiens; identical to SEQ ID NO: 756193

SEQ ID NO: 756197 - protein, 293 aa, Homo sapiens
GCSGVQGSQTGTMELSVLLFLALLTGLLLLLVQRHPNSHGTLPPGPRPLPLLGNLLQMDRRGLLKSFLRFREKYGDVFTVHLGPRPVVMLCGVEAIREALVDNAEAFSGRGKIVIMDPVYQGYGMLFANGNRWKVLRRFSVTTMRDFGMGKRSVEERIQDEAQCLIEELRKSKGALVDPTFLFHSITANIICSIIFGKRFHYQDQEFLKTLNLFCQSFLLISSISSQLFELFSGFLKYFPGAHRQVYKNLQEINAYIGHSVEKHRETLDPSAPRDLIDTYLLHMEKVKERKMR

SEQ ID NO: 756198 - protein, 69 aa, Homo sapiens
PGSSCFPQAACSTPGLVLLRRWAVVVRGSNQYGNGEMAYHACPSPQEGGRGAGEQTPDSWTLAACVMEA

SEQ ID NO: 756199 - protein, 173 aa, Homo sapiens
QPRNTFGQLFCGSLDLFGILCVGLYRIIDEEELNPENKRFVITRPANEFKLLPSDLVFCAIPFSTACYKRNEEFSLQKSYEIVNKASQTTETHSDTNCPPTIDSVTETLYSPVYSYQPRTNSLSFPKQIAWNQSRTNSIISSQIPLGDNAKENERKTSDEVYDEDPFAYSEPL

SEQ ID NO: 756200 - protein, 214 aa, Homo sapiens
MKTKCICELCSCGRHHCPHLPTKIYDETEKPCLLSEYTENYPFYHSYLPRESFKPRREYQKGSIPMEGLTTSRRDFGPHKVAPVKVHQYDQFVPSEENMDLLTTYKKDYNPYPVCRVDPIKPRDSKYPCSDKMECLPTYKADYLPWNQPRREPLRLEHKYQPASVRFDNRTTHQDDYPIKGLVKTISCKPLAMPKLCNIPLEDVTNYKMSYVAH

SEQ ID NO: 756201 - protein, 106 aa, Homo sapiens
SLQQTSWNVPLVKVASLGCGHGKEDEETPSEQNVSVGVSQFKAGSSTLKTQPREIYVPFLKDILPLANLPGREPYLVGARANQYQHQKHHSAKKSLKRDMDRASDH

SEQ ID NO: 756202 - protein, 311 aa, Homo sapiens
SGTRARARAAVDALLSWCAPEPKFQVETAGARGRNAWSMKRQGASSERKRARIPSGKAGAANGFLMEVCVDSVESAVNAERGGADRIELCSGLSEGGTTPSMGVLQVVKQSVQIPVFVMIRPRGGDFLYSDREIEVMKADIRLAKLYGADGLVFGALTEDGHIDKELCMSLMAICRPLPVTFHRAFDMVHDPMAALETLLTLGFERVLTSGCDSSALEGLPLIKRLIEQAKGRIVVMPGGGITDRNLQRILEGSGATEFHCSARSTRDSGMKFRNSSVAMGASLSCSEYSLKVTDVTKVRTLNAIAKNILV

SEQ ID NO: 756203 - protein, 232 aa, Homo sapiens
SGTRARARAAVDALLSWCAPEPKFQVETAGARGRNAWSMKRQGASSERKRARIPSGKAGAANGFLMEVCVDSVESAVNAERGGADRIELCSGLSEGGTTPSMGVLQVVKQSVQIPVFVMIRPRGGDFLYSDREIEVMKADIRLAKLYGADGLVFGALTEDGHIDKELCMSLMAICRPLPVTFHRAFDMVHDPMAALETLLTLGFERVLTSGCDSSALEGLPLIKRLIEQEVV

SEQ ID NO: 756204 - protein, 361 aa, Homo sapiens
SGTRARARAAVDALLSWCAPEPKFQVETAGARGRNAWSMKRQGASSERKRARIPSGKAGAEGGGGGDGRPKAPRGGPAGVVVSGDFFWSRFLSSFQPLGRHLLSLRLKGAANGFLMEVCVDSVESAVNAERGGADRIELCSGLSEGGTTPSMGVLQVVKQSVQIPVFVMIRPRGGDFLYSDREIEVMKADIRLAKLYGADGLVFGALTEDGHIDKELCMSLMAICRPLPVTFHRAFDMVHDPMAALETLLTLGFERVLTSGCDSSALEGLPLIKRLIEQAKGRIVVMPGGGITDRNLQRILEGSGATEFHCSARSTRDSGMKFRNSSVAMGASLSCSEYSLKVTDVTKVRTLNAIAKNILV

SEQ ID NO: 756205 - protein, 276 aa, Homo sapiens
WCGDSRVIPALEIARARIPSGKAGAANGFLMEVCVDSVESAVNAERGGADRIELCSGLSEGGTTPSMGVLQVVKQSVQIPVFVMIRPRGGDFLYSDREIEVMKADIRLAKLYGADGLVFGALTEDGHIDKELCMSLMAICRPLPVTFHRAFDMVHDPMAALETLLTLGFERVLTSGCDSSALEGLPLIKRLIEQAKGRIVVMPGGGITDRNLQRILEGSGATEFHCSARSTRDSGMKFRNSSVAMGASLSCSEYSLKVTDVTKVRTLNAIAKNILV

SEQ ID NO: 756206 - protein, 246 aa, Homo sapiens
MEVCVDSVESAVNAERGGADRIELCSGLSEGGTTPSMGVLQVVKQSVQIPVFVMIRPRGGDFLYSDREIEVMKADIRLAKLYGADGLVFGALTEDGHIDKELCMSLMAICRPLPVTFHRAFDMVHDPMAALETLLTLGFERVLTSGCDSSALEGLPLIKRLIEQAKGRIVVMPGGGITDRNLQRILEGSGATEFHCSARSTRDSGMKFRNSSVAMGASLSCSEYSLKVTDVTKVRTLNAIAKNILV

SEQ ID NO: 756207 - protein, 286 aa, Homo sapiens
SGTRARARAAVDALLSWCAPEPKFQVETAGARGRNAWSMKRQGASSERKRARIPSGKAGAANGFLMEVCVDSVESAVNAERGGADRIELCSGLSEGGTTPSMGVLQVVKQSVQIPVFVMIRPRGGDFLYSDREIEVMKADIRLAKLYAICRPLPVTFHRAFDMVHDPMAALETLLTLGFERVLTSGCDSSALEGLPLIKRLIEQAKGRIVVMPGGGITDRNLQRILEGSGATEFHCSARSTRDSGMKFRNSSVAMGASLSCSEYSLKVTDVTKVRTLNAIAKNILV

SEQ ID NO: 756208 - protein, 271 aa, Homo sapiens
SGTRARARAAVDALLSWCAPEPKFQVETAGARGRNAWSMKRQGASSERKRARIPSGKAGAANGFLMEVCVDSVESAVNAERGGADRIELCSGLSEGGTTPSMGVLQVVKQSVQIPVFVMIRPRGGDFLYSDREIEVMKADIRLAKLYGADGLVFGALTEDGHIDKELCMSLMAICRPLPVTFHRAFDMVHDPMAALETLLTLGFERVLTSGCDSSALEGLPLIKRLIEQKFICCHGSLTFLLRIFPKGNRCDQSKDFECYRKEHPGVARPL

SEQ ID NO: 756209 - protein, 194 aa, Homo sapiens [sequence omitted]

SEQ ID NO: 756210 - protein, 171 aa, Homo sapiens
MQDAPLSCLSPTRWSSVSSADSTEKSASGAGTRNLPFQFCLRQALRMKAAGILTLIGCLVTGAESKIYTRCKLAKIFSRAGLDNYWGFSLGNWICMAYYESGYNTTAQTVLDDGSIDYGIFQINSFAWCRRGKLKENNHCHVACSALITDDLTDAIICARKIVKETQGMNY

SEQ ID NO: 756211 - protein, 190 aa, Homo sapiens
MQDAPLSCLSPTRWSSVSSADSTEKSASGAGTRNLPFQFCLRQALRMKAAGILTLIGCLVTGAESKIYTRCKLAKIFSRAGLDNYWGFSLGNWICMAYYESGYNTTAQTVLDDGSIDYGIFQINSFAWCRRGKLKENNHCHVACSALITDDLTDAIICARKIVKETCPSGKKAVRFPKLELDPGCFAATP

SEQ ID NO: 756212 - protein, 840 aa, Homo sapiens
MALASAAPGSIFCKQLLFSLLVLTLLCDACQKVYLRVPSHLQAETLVGKVNLEECLKSASLIRSSDPAFRILEDGSIYTTHDLILSSERKSFSIFLSDGQRREQQEIKVVLSARENKSPKKRHTKDTALKRSKRRWAPIPASLMENSLGPFPQHVQQIQSDAAQNYTIFYSISGPGVDKEPFNLFYIEKDTGDIFCTRSIDREKYEQFALYGYATTADGYAPEYPLPLIIKIEDDNDNAPYFEHRVTIFTVPENCRSGTSVGKVTATDLDEPDTLHTRLKYKILQQIPDHPKHFSIHPDTGVITTTTPFLDREKCDTYQLIMEVRDMGGQPFGLFNTGTITISLEDENDNPPSFTETSYVTEVEENRIDVEILRMKVQDQDLPNTPHSKAVYKILQGNENGNFIISTDPNTNEGVLCVVKPLNYEVNRQVILQVGVINEAQFSKAASSQTPTMCTTTVTVKIIDSDEGPECHPPVKVIQSQDGFPAGQELLGYKALDPEISSGEGLRYQKLGDEDNWFEINQHTGDLRTLKVLDRESKFVKNNQYNISVVAVDAVGRSCTGTLVVHLDDYNDHAPQIDKEVTICQNNEDFAVLKPVDPDGPENGPPFQFFLDNSASKNWNIEEKDGKTAILRQRQNLDYNYYSVPIQIKDRHGLVATHMLTVRVCDCSTPSECRMKDKSTRDVRPNVILGRWAILAMVLGSVLLLCILFTCFCVTAKRTVKKCFPEDIAQQNLIVSNTEGPGEEVTEANIRLPMQTSNICDTSMSVGTVGGQGIKTQQSFEMVKGGYTLDSNKGGGHQTLESVKGVGQGDTGRYAYTDWQSFTQPRLGEESIRGHTLIKN

SEQ ID NO: 756213 - protein, 783 aa, Homo sapiens
MALASAAPGSIFCKQLLFSLLVLTLLCDACQKVYLRVPSHLQAETLVGKVNLEECLKSASLIRSSDPAFRILEDGSIYTTHDLILSSERKSFSIFLSDGQRREQQEIKVVLSARENKSPKKRHTKDTALKRSKRRWAPIPASLMENSLGPFPQHVQQIQSDAAQNYTIFYSISGPGVDKEPFNLFYIEKDTGDIFCTRSIDREKYEQFALYGYATTADGYAPEYPLPLIIKIEDDNDNAPYFEHRVTIFTVPENCRSGTSVGKVTATDLDEPDTLHTRLKYKILQQIPDHPKHFSIHPDTGVITTTTPFLDREKCDTYQLIMEVRDMGGQPFGLFNTGTITISLEDENDNPPSFTETSYVTEVEENRIDVEILRMKVQDQDLPNTPHSKAVYKILQGNENGNFIISTDPNTNEGVLCVVKPLNYEVNRQVILQVGVINEAQFSKAASSQTPTMCTTTVTVKIIDSDEGPECHPPVKVIQSQDGFPAGQELLGYKALDPEISSGEGLRYQKLGDEDNWFEINQHTGDLRTLKVLDRESKFVKNNQYNISVVAVDAVGRSCTGTLVVHLDDYNDHAPQIDKEVTICQNNEDFAVLKPVDPDGPENGPPFQFFLDNSASKNWNIEEKDGKTAILRQRQNLDYNYYSVPIQIKDRHGLVATHMLTVRVCDCSTPSECRMKDKSTRDVRPNVILGRWAILAMVLGSVLLLCILFTCFCVTAKRTVKKCFPEDIAQQNLIVSNTEGPGEEVTVNQISHPFELYGEQMMTDYYSTMSMIISLMFIEHLLC

SEQ ID NO: 756214 - protein, 894 aa, Homo sapiens
MALASAAPGSIFCKQLLFSLLVLTLLCDACQKVYLRVPSHLQAETLVGKVNLEECLKSASLIRSSDPAFRILEDGSIYTTHDLILSSERKSFSIFLSDGQRREQQEIKVVLSARENKSPKKRHTKDTALKRSKRRWAPIPASLMENSLGPFPQHVQQIQSDAAQNYTIFYSISGPGVDKEPFNLFYIEKDTGDIFCTRSIDREKYEQFALYGYATTADGYAPEYPLPLIIKIEDDNDNAPYFEHRVTIFTVPENCRSGTSVGKVTATDLDEPDTLHTRLKYKILQQIPDHPKHFSIHPDTGVITTTTPFLDREKCDTYQLIMEVRDMGGQPFGLFNTGTITISLEDENDNPPSFTETSYVTEVEENRIDVEILRMKVQDQDLPNTPHSKAVYKILQGNENGNFIISTDPNTNEGVLCVVKPLNYEVNRQVILQVGVINEAQFSKAASSQTPTMCTTTVTVKIIDSDEGPECHPPVKVIQSQDGFPAGQELLGYKALDPEISSGEGLRYQKLGDEDNWFEINQHTGDLRTLKVLDRESKFVKNNQYNISVVAVDAVGRSCTGTLVVHLDDYNDHAPQIDKEVTICQNNEDFAVLKPVDPDGPENGPPFQFFLDNSASKNWNIEEKDGKTAILRQRQNLDYNYYSVPIQIKDRHGLVATHMLTVRVCDCSTPSECRMKDKSTRDVRPNVILGRWAILAMVLGSVLLLCILFTCFCVTAKRTVKKCFPEDIAQQNLIVSNTEGPGEEVTEANIRLPMQTSNICDTSMSVGTVGGQGIKTQQSFEMVKGGYTLDSNKGGGHQTLESVKGVGQGDTGRYAYTDWQSFTQPRLGEKVYLCGQDEEHKHCEDYVCSYNYEGKGSLAGSVGCCSDRQEEEGLEFLDHLEPKFRTLAKTCIKK

SEQ ID NO: 756215 - protein, 130 aa, Homo sapiens
IVRAPWTPVPMTFGARMGGRCRMSLAPLWARNCHPIPRPQPPSYPGPPADPGQDGALQEVRGGDFFAPCASFQSPEGRALPTLGMGRQPLPRGRARGSVQSADSDLCARDSTPPLHSCPSRWDKKCGATS

SEQ ID NO: 756216 - protein, 46 aa, Homo sapiens
MTTVTYSSEVTWQISNNRLNQCRHSLVDKNHLLFLLTRLQLAALYA

SEQ ID NO: 756217 - protein, 149 aa, Homo sapiens
MGAKLCVVKTQRKAKQAETLTQDYIITPHALPMFREPRQRSTRKQLEKDRLDPLKSHKPEPPVAGPGRGGRVGTHGGTLSSYIVKNIALDKTDDSNPREAILRHAKAAEDSPYWVSPAYSKTQPKTMFAQVESDDEEAKNEPEWKKRKI

SEQ ID NO: 756218 - protein, 654 aa, Homo sapiens
MERSGPSEVTGSDASGPDPQLAVTMGFTGFGKKARTFDLEAMFEQTRRTAVERSRKTLEAREKEEEMNREKELRRQNEDIEPTSSRSNVVRDCSKSSSRDTSSSESEQSSDSSDDELIGPPLPPKMVGKPVNFMEEDILGPLPPPLNEEEEEAEEEEEEEEEEENPVHKIPDSHEITLKHGTKTVSALGLDPSGARLVTGGYDYDVKFWDFAGMDASFKAFRSLQPCECHQIKSLQYSNTGDMILVVSGSSQAKVIDRDGFEVMECIKGDQYIVDMANTKGHTAMLHTGSWHPKIKGEFMTCSNDATVRTWEVENPKKQKSVFKPRTMQGKKVIPTTCTYSRDGNLIAAACQNGSIQIWDRNLTVHPKFHYKQAHDSGTDTSCVTFSYDGNVLASRGGDDSLKLWDIRQFNKPLFSASGLPTMFPMTDCCFSPDDKLIVTGTSIQRGCGSGKLVFFERRTFQRVYEIDITDASVVRCLWHPKLNQIMVGTGNGLAKVYYDPNKSQRGAKLCVVKTQRKAKQAETLTQDYIITPHALPMFREPRQRSTRKQLEKDRLDPLKSHKPEPPVAGPGRGGRVGTHGGTLSSYIVKNIALDKTDDSNPREAILRHAKAAEDSPYWVSPAYSKTQPKTMFAQVESDDEEAKNEPEWKKRKI

SEQ ID NO: 756219 - protein, 412 aa, Homo sapiens
MILVVSGSSQAKVIDRDGFEVMECIKGDQYIVDMANTKGHTAMLHTGSWHPKIKGEFMTCSNDATVRTWEVENPKKQKSVFKPRTMQGKKVIPTTCTYSRDGNLIAAACQNGSIQIWDRNLTVHPKFHYKQAHDSGTDTSCVTFSYDGNVLASRGGDDSLKLWDIRQFNKPLFSASGLPTMFPMTDCCFSPDDKLIVTGTSIQRGCGSGKLVFFERRTFQRVYEIDITDASVVRCLWHPKLNQIMVGTGNGLAKVYYDPNKSQRGAKLCVVKTQRKAKQAETLTQDYIITPHALPMFREPRQRSTRKQLEKDRLDPLKSHKPEPPVAGPGRGGRVGTHGGTLSSYIVKNIALDKTDDSNPREAILRHAKAAEDSPYWVSPAYSKTQPKTMFAQVESDDEEAKNEPEWKKRKI

SEQ ID NO: 756220 - protein, 750 aa, Homo sapiens
MEDYPDPQSANHMNSSLLSLYRKGNPDSVSNTPEMEQRETTSSTPRISSKTGSIPLKTPAKDSEGGWFIDKTPSVKKDSFFLDLSCEKSNPKKPITEIQDSKDSSLLESDMKRKGKLKNKGSKRKKEDLQEVDGEIEAVLQKKAKARGLEFQISNVKFEDVGGNDMTLKEVCKMLIHMRHPEVYHHLGVVPPRGVLLHGPPGCGKTLLAHAIAGELDLPILKVAAPEIVSGVSGESEQKLRELFEQAVSNAPCIIFIDEIDAITPKREVASKDMERRIVAQLLTCMDDLNNVAATARVLVIGATNRPDSLDPALRRAGRFDREICLGIPDEASRERILQTLCRKLRLPQAFDFCHLAHLTPGFVGADLMALCREAAMCAVNRVLMKLQEQQKKNPEMEDLPSKGVQEERLGTEPTSETQDELQRLLGLLRDQDPLSEEQMQGLCIELNDFIVALSSVQPSAKREGFVTVPNVTWADIGALEDIREELTMAILAPVRNPDQFKALGLVTPAGVLLAGPPGCGKTLLAKAVANESGLNFISVKGPELLNMYVGESERAVRQVFQRAKNSAPCVIFFDEVDALCPRRSDRETGASVRVVNQLLTEMDGLEARQQVFIMAATNRPDIIDPAILRPGRLDKTLFVGLPPPADRLAILKTITKNGTKPPLDADVNLEAIAGDLRCDCYTGADLSALVREASICALRQEMARQKSGNEKGELKVSHKHFEEAFKKVRSSISKKDQIMYERLQESLSR

SEQ ID NO: 756221 - protein, 856 aa, Homo sapiens
MKPRPAGFVDNKLKQRVIQYLTSNKCGKYVDIGVLASDLQRVYSIDYGRRKRNAFRIQVEKVFSIISSEKELKNLTELEDEHLAKRARQGEEDNEYTESYSDDDSSMEDYPDPQSANHMNSSLLSLYRKGNPDSVSNTPEMEQRETTSSTPRISSKTGSIPLKTPAKDSEGGWFIDKTPSVKKDSFFLDLSCEKSNPKKPITEIQDSKDSSLLESDMKRKGKLKNKGSKRKKEDLQEVDGEIEAVLQKKAKARGLEFQISNVKFEDVGGNDMTLKEVCKMLIHMRHPEVYHHLGVVPPRGVLLHGPPGCGKTLLAHAIAGELDLPILKVAAPEIVSGVSGESEQKLRELFEQAVSNAPCIIFIDEIDAITPKREVASKDMERRIVAQLLTCMDDLNNVAATARVLVIGATNRPDSLDPALRRAGRFDREICLGIPDEASRERILQTLCRKLRLPQAFDFCHLAHLTPGFVGADLMALCREAAMCAVNRVLMKLQEQQKKNPEMEDLPSKGVQEERLGTEPTSETQDELQRLLGLLRDQDPLSEEQMQGLCIELNDFIVALSSVQPSAKREGFVTVPNVTWADIGALEDIREELTMAILAPVRNPDQFKALGLVTPAGVLLAGPPGCGKTLLAKAVANESGLNFISVKGPELLNMYVGESERAVRQVFQRAKNSAPCVIFFDEVDALCPRRSDRETGASVRVVNQLLTEMDGLEARQQVFIMAATNRPDIIDPAILRPGRLDKTLFVGLPPPADRLAILKTITKNGTKPPLDADVNLEAIAGDLRCDCYTGADLSALVREASICALRQEMARQKSGNEKGELKVSHKHFEEAFKKVRSSISKKDQIMYERLQESLSR

SEQ ID NO: 756222 - protein, 738 aa, Homo sapiens
MNSSLLSLYRKGNPDSVSNTPEMEQRETTSSTPRISSKTGSIPLKTPAKDSEGGWFIDKTPSVKKDSFFLDLSCEKSNPKKPITEIQDSKDSSLLESDMKRKGKLKNKGSKRKKEDLQEVDGEIEAVLQKKAKARGLEFQISNVKFEDVGGNDMTLKEVCKMLIHMRHPEVYHHLGVVPPRGVLLHGPPGCGKTLLAHAIAGELDLPILKVAAPEIVSGVSGESEQKLRELFEQAVSNAPCIIFIDEIDAITPKREVASKDMERRIVAQLLTCMDDLNNVAATARVLVIGATNRPDSLDPALRRAGRFDREICLGIPDEASRERILQTLCRKLRLPQAFDFCHLAHLTPGFVGADLMALCREAAMCAVNRVLMKLQEQQKKNPEMEDLPSKGVQEERLGTEPTSETQDELQRLLGLLRDQDPLSEEQMQGLCIELNDFIVALSSVQPSAKREGFVTVPNVTWADIGALEDIREELTMAILAPVRNPDQFKALGLVTPAGVLLAGPPGCGKTLLAKAVANESGLNFISVKGPELLNMYVGESERAVRQVFQRAKNSAPCVIFFDEVDALCPRRSDRETGASVRVVNQLLTEMDGLEARQQVFIMAATNRPDIIDPAILRPGRLDKTLFVGLPPPADRLAILKTITKNGTKPPLDADVNLEAIAGDLRCDCYTGADLSALVREASICALRQEMARQKSGNEKGELKVSHKHFEEAFKKVRSSISKKDQIMYERLQESLSR

SEQ ID NO: 756223 - protein, 836 aa, Homo sapiens
MKPRPAGFVDNKLKQRVIQYLTSNKCGKYVDIGVLASDLQRVYSIDYGRRKRNAFRIQVEKVFSIISSEKELKNLTELEDEHLAKRARQGEEDNEYTESYSDDDSSMEDYPDPQSANHMNSSLLSLYRKGNPDSVSNTPEMEQRETTSSTPRISSKTGSIPLKTPAKDSEGGWFIDKTPSVKKDSFFLDLSCEKSNPKKPITEIQDSKDSSLLESDMKRKGKLKNKGSKRKKEDLQEVDGEIEAVLQKKAKARGLEFQISNVKFEDVGGNDMTLKEVCKMLIHMRHPEVYHHLGVVPPRGVLLHGPPGCGKTLLAHAIAGELDLPILKVAAPEIVSGVSGESEQKLRELFEQAVSNAPCIIFIDEIDAITPKREVASKDMERRIVAQLLTCMDDLNNVAATARVLVIGATNRPDSLDPALRRAGRFDREICLGIPDEASRERILQTLCRKLRLPQAFDFCHLAHLTPGFVGADLMALCREAAMCAVNRVLMKLQEQQKKNPEMEDLPSKGVQEERLGTEPTSETQDELQRLLGLLRDQDPLSEEQMQGLCIELNDFIVALSSVQPSAKREGFVTVPNVTWADIGALEDIREELTMAILAPVRNPDQFKALGLVTPAGVLLAGPPGCGKTLLAKAVANESGLNFISVKGPELLNMYVGESERAVRQVFQRAKNSAPCVIFFDEVDALCPRRSDRETGASVRVVNQLLTEMDGLEARQQVFIMAATNRPDIIDPAILRPGRLDKTLFVGLPPPADRLAILKTITKNGTKPPLDADVNLEAIAGDLRCDCYTGADLSALVREASICALRQEMARQKSGNEKVETGFHHVSQDGLDLLTS

SEQ ID NO: 756224 - protein, 828 aa, Homo sapiens
MKPRPAGFVDNKLKQRVIQYLTSNKCGKYVDIGVLASDLQRVYSIDYGRRKRNAFRIQVEKVFSIISSEKELKNLTELEDEHLAKRARQGEEDNEYTESYSDDDSSMEDYPDPQSANHMNSSLLSLYRKGNPDSVSNTPEMEQRETTSSTPRISSKTGSIPLKTPAKDSEGGWFIDKTPSVKKDSFFLDLSCEKSNPKKPITEIQDSKDSSLLESDMKRKGKLKNKGSKRKKEDLQEVDGEIEAVLQKKAKARGLEFQISNVKFEDVGGNDMTLKEVCKMLIHMRHPEVYHHLGVVPPRGVLLHGPPGCGKTLLAHAIAGELDLPILKVAAPEIVSGVSGESEQKLRELFEQAVSNAPCIIFIDEIDAITPKREVASKDMERRIVAQLLTCMDDLNNVAATARVLVIGATNRPDSLDPALRRAGRFDREICLGIPDEASRERILQTLCRKLRLPQAFDFCHLAHLTPGFVGADLMALCREAAMCAVNRVLMKLQEQQKKNPEMEDLPSKGVQEERLGTEPTSETQDELQRLLGLLRDQDPLSEEQMQGLCIELNDFIVALSSVQPSAKREGFVTVPNVTWADIGALEDIREELTMAILAPVRNPDQFKALGLVTPAGVLLAGPPGCGKTLLAKAVANESGLNFISVKGPELLNMYVGESERAVRQVFQRAKNSAPCVIFFDEVDALCPRRSDRETGASVRVVNQLLTEMDGLEARQQVFIMAATNRPDIIDPAILRPGRLDKTLFVGLPPPADRLAILKTITKNGTKPPLDADVNLEAIAGDLRCDCYTGADLSALVREASICALRQEMARQKSGNEKGKWIHSLSSS

SEQ ID NO: 756225 - protein, 477 aa, Homo sapiens
MERRIVAQLLTCMDDLNNVAATARVLVIGATNRPDSLDPALRRAGRFDREICLGIPDEASRERILQTLCRKLRLPQAFDFCHLAHLTPGFVGADLMALCREAAMCAVNRVLMKLQEQQKKNPEMEDLPSKGVQEERLGTEPTSETQDELQRLLGLLRDQDPLSEEQMQGLCIELNDFIVALSSVQPSAKREGFVTVPNVTWADIGALEDIREELTMAILAPVRNPDQFKALGLVTPAGVLLAGPPGCGKTLLAKAVANESGLNFISVKGPELLNMYVGESERAVRQVFQRAKNSAPCVIFFDEVDALCPRRSDRETGASVRVVNQLLTEMDGLEARQQVFIMAATNRPDIIDPAILRPGRLDKTLFVGLPPPADRLAILKTITKNGTKPPLDADVNLEAIAGDLRCDCYTGADLSALVREASICALRQEMARQKSGNEKGELKVSHKHFEEAFKKVRSSISKKDQIMYERLQESLSR

SEQ ID NO: 756226 - protein, 328 aa, Homo sapiens
MKPRPAGFVDNKLKQRVIQYLTSNKCGKYVDIGVLASDLQRVYSIDYGRRKRNAFRIQVEKVFSIISSEKELKNLTELEDEHLAKRARQGEEDNEYTESYSDDDSSMEDYPDPQSANHMNSSLLSLYRKGNPDSVSNTPEMEQRETTSSTPRISSKTGSIPLKTPAKDSEGGWFIDKTPSVKKDSFFLDLSCEKSNPKKPITEIQDSKDSSLLESDMKRKGKLKNKGSKRKKEDLQEVDGEIEAVLQKKAKARGLEFQISNVKFEDVGGNDMTLKEVCKMLIHMRHPEVYHHLGVVPPRGVLLHGPPGCGKTLLAHAIAGRFSLCCPG

SEQ ID NO: 756227 - protein, 659 aa, Homo sapiens
MEDYPDPQDSKDSSLLESDMKRKGKLKNKGSKRKKEDLQEVDGEIEAVLQKKAKARGLEFQISNVKFEDVGGNDMTLKEVCKMLIHMRHPEVYHHLGVVPPRGVLLHGPPGCGKTLLAHAIAGELDLPILKVAAPEIVSGVSGESEQKLRELFEQAVSNAPCIIFIDEIDAITPKREVASKDMERRIVAQLLTCMDDLNNVAATARVLVIGATNRPDSLDPALRRAGRFDREICLGIPDEASRERILQTLCRKLRLPQAFDFCHLAHLTPGFVGADLMALCREAAMCAVNRVLMKLQEQQKKNPEMEDLPSKGVQEERLGTEPTSETQDELQRLLGLLRDQDPLSEEQMQGLCIELNDFIVALSSVQPSAKREGFVTVPNVTWADIGALEDIREELTMAILAPVRNPDQFKALGLVTPAGVLLAGPPGCGKTLLAKAVANESGLNFISVKGPELLNMYVGESERAVRQVFQRAKNSAPCVIFFDEVDALCPRRSDRETGASVRVVNQLLTEMDGLEARQQVFIMAATNRPDIIDPAILRPGRLDKTLFVGLPPPADRLAILKTITKNGTKPPLDADVNLEAIAGDLRCDCYTGADLSALVREASICALRQEMARQKSGNEKGELKVSHKHFEEAFKKVRSSISKKDQIMYERLQESLSR

SEQ ID NO: 756228 - protein, 856 aa, Homo sapiens; identical to SEQ ID NO: 756221

SEQ ID NO: 756229 - protein, 284 aa, Homo sapiens
YARYEAGCADIGALEDIREELTMAILAPVRNPDQFKALGLVTPAGVLLAGPPGCGKTLLAKAVANESGLNFISVKGPELLNMYVGESERAVRQVFQRAKNSAPCVIFFDEVDALCPRRSDRETGASVRVVNQLLTEMDGLEARQQVFIMAATNRPDIIDPAILRPGRLDKTLFVGLPPPADRLAILKTITKNGTKPPLDADVNLEAIAGDLRCDCYTGADLSALVREASICALRQEMARQKSGNEKGELKVSHKHFEEAFKKVRSSISKKDQIMYERLQESLSR

SEQ ID NO: 756230 - protein, 71 aa, Homo sapiens
QTQISKSHVFEGLCERTVGLSRENISASCKAQTGKGPANQEQHSGDSEIKLTTEGTLCFPSPRLRKPRRAR

SEQ ID NO: 756231 - protein, 642 aa, Homo sapiens
MKRSSVSSGGAGRLSMQELRSQDVNKQGLYTPQTKEKPTFGKLSINKPTSERKVSLFGKRTSGHGSRNSQLGIFSSSEKIKDPRPLNDKAFIQQCIRQLCEFLTENGYAHNVSMKSLQAPSVKDFLKIFTFLYGFLCPSYELPDTKFEEEVPRIFKDLGYPFALSKSSMYTVGAPHTWPHIVAALVWLIDCIKIHTAMKESSPLFDDGQPWGEETEDGIMHNKLFLDYTIKCYESFMSGADSFDEMNAELQSKLKDLFNVDAFKLESLEAKNRALNEQIARLEQEREKEPNRLESLRKLKASLQGDVQKYQAYMSNLESHSAILDQKLNGLNEEIARVELECETIKQENTRLQNIIDNQKYSVADIERINHERNELQQTINKLTKDLEAEQQKLWNEELKYARGKEAIETQLAEYHKLARKLKLIPKGAENSKGYDFEIKFNPEAGANCLVKYRAQVYVPLKELLNETEEEINKALNKKMGLEDTLEQLNAMITESKRSVRTLKEEVQKLDDLYQQKIKEAEEEDEKCASELESLEKHKHLLESTVNQGLSEAMNELDAVQREYQLVVQTTTEERRKVGNNLQRLLEMVATHVGSVEKHLEEQIAKVDREYEECMSEDLSENIKEIRDKYEKKATLIKSSEE

SEQ ID NO: 756232 - protein, 642 aa, Homo sapiens; identical to SEQ ID NO: 756231

SEQ ID NO: 756233 - protein, 602 aa, Homo sapiens
MKRSSVSSGGAGRLSMQELRSQDVNKQGLYTPQTKEKPTFGKLSINKPTSERKVSLFGKRTSGHGSRNSQLGIFSSSEKIKDPRPLNDKAFIQQCIRQLCEFLTENGYAHNVSMKSLQAPSVKDFLKIFTFLYGFLCPSYELPDTKFEEEVPRIFKDLGYPFALSKSSMYTVGAPHTWPHIVAALVWLIDCIKIHTAMKESSPLFDDGQPWGEETEDGIMHNKLFLDYTIKCYESFMSGADSFDEMNAELQSKLKDLFNVDAFKLESLEAKNRALNEQIARLEQEREKEPNRLESLRKLKASLQGDVQKYQAYMSNLESHSAILDQKLNGLNEEIARVELECETIKQENTRLQNIIDNQKYSVADIERINHERNELQQTINKLTKDLEAEQQKLWNEELKYARGKEAIETQLAEYHKLARKLKLIPKGAENSKGYDFEIKFNPEAGANCLVKYRAQVYVPLKELLNETEEEINKALNKKMGLEDTLEQLNAMITESKRSVRTLKEEVQKLDDLYQQKIKEAEEEDEKCASELESLEKHKHLLESTVNQGLSEAMNELDAVQREYQLVVQTTTEERRKVGNNLQRLLEMVATHVGSVERRMLG

SEQ ID NO: 756234 - protein, 488 aa, Homo sapiens
MKRSSVSSGGAGRLSMQELRSQDVNKQGLYTPQTKEKPTFGKLSINKPTSERKVSLFGKRTSGHGSRNSQLGIFSSSEKIKDPRPLNDKAFIQQCIRQLCEFLTENGYAHNVSMKSLQAPSVKDFLKIFTFLYGFLCPSYELPDTKFEEEVPRIFKDLGYPFALSKSSMYTVGAPHTWPHIVAALVWLIDCIKIHTAMKESSPLFDDGQPWGEETEDGIMHNKLFLDYTIKCYESFMSGADSFDEMNAELQSKLKDLFNVDAFKLESLEAKNRALNEQIARLEQEREKEPNRLESLRKLKASLQGDVQKYQAYMSNLESHSAILDQKLNGLNEEIARVELECETIKQENTRLQNIIDNQKYSVADIERINHERNELQQTINKLTKDLEAEQQKLWNEELKYARGKEAIETQLAEYHKLARKLKLIPKGAENSKGYDFEIKFNPEAGANCLVKYRAQVYVPLKELLNETEEEINKALNKKMGLEDTLEQ

SEQ ID NO: 756235 - protein, 490 aa, Homo sapiens
MASCAPHTNFLTQSLKKRFQESLKTLAHIVAALVWLIDCIKIHTAMKESSPLFDDGQPWGEETEDGIMHNKLFLDYTIKCYESFMSGADSFDEMNAELQSKLKDLFNVDAFKLESLEAKNRALNEQIARLEQEREKEPNRLESLRKLKASLQGDVQKYQAYMSNLESHSAILDQKLNGLNEEIARVELECETIKQENTRLQNIIDNQKYSVADIERINHERNELQQTINKLTKDLEAEQQKLWNEELKYARGKEAIETQLAEYHKLARKLKLIPKGAENSKGYDFEIKFNPEAGANCLVKYRAQVYVPLKELLNETEEEINKALNKKMGLEDTLEQLNAMITESKRSVRTLKEEVQKLDDLYQQKIKEAEEEDEKCASELESLEKHKHLLESTVNQGLSEAMNELDAVQREYQLVVQTTTEERRKVGNNLQRLLEMVATHVGSVEKHLEEQIAKVDREYEECMSEDLSENIKEIRDKYEKKATLIKSSEE

SEQ ID NO: 756236 - protein, 163 aa, Homo sapiens [sequence omitted]

SEQ ID NO: 756237 - protein, 150 aa, Homo sapiens
MKRSSVSSGGAGRLSMQELRSQDVNKQGLYTPQTKEKPTFGKLSINKPTSERKVSLFGKRTSGHGSRNSQLGIFSSSEKIKDPRPLNDKAFIQQCIRQLCEFLTENGYAHNVSMKSLQAPSVKDFLKMKQRKRMKNVPVSLSPWRNTSTC

SEQ ID NO: 756238 - protein, 199 aa, Homo sapiens
MKRSSVSSGGAGRLSMQELRSQDVNKQGLYTPQTKEKPTFGKLSINKPTSERKVSLFGKRTSGHGSRNSQLGIFSSSEKIKDPRPLNDKAFIQQCIRQLCEFLTENGYAHNVSMKSLQAPSVKDFLKIFTFLYGFLCPSYELPDTKFEEEVPRIFKDLGYPFALSKSSMYTVGAPHTWPHIVAALVWLIDCIKVFDLFF

SEQ ID NO: 756239 - protein, 85 aa, Homo sapiens
LRASCVMTSAPAENFKFERLWRAEEGPGVLMTAVLSSRYLHGLQKFGPWVVSGNWKKGHKHEAQFSFQRWCWPPLHAGVKIPGCK

SEQ ID NO: 756240 - protein, 247 aa, Homo sapiens
GFEVLKSFWILSPEDLFNVDAFKLESLEAKNRALNEQIARLEQEREKEPNRLESLRKLKASLQGDVQKYQAYMSNLESHSAILDQKLNGLNEEIARVELECETIKQENTRLQNIIDNQKYSVADIERINHERNELQQTINKLTKDLEAEQQKLWNEELKYARGKEAIETQLAEYHKLARKLKLIPKGAENSKGYDFEIKFNPEAGANCLVKYRAQVYVPLKELLNETEEEINKALNKKMGLEDTLEQ

SEQ ID NO: 756241 - protein, 642 aa, Homo sapiens; identical to SEQ ID NO: 756231

SEQ ID NO: 756242 - protein, 527 aa, Homo sapiens
MKRSSVSSGGAGRLSMQELRSQDVNKQGLYTPQTKEKPTFGKLSINKPTSERKVSLFGKRTSGHGSRNSQLGIFSSSEKIKDPRPLNDKAFIQQCIRQLCEFLTENGYAHNVSMKSLQAPSVKDFLKIFTFLYGFLCPSYELPDTKFEEEVPRIFKDLGYPFALSKSSMYTVGAPHTWPHIVAALVWLIDCIKIHTAMKESSPLFDDGQPWGEETEDGIMHNKLFLDYTIKCYESFMSGADSFDEMNAELQSKLKDLFNVDAFKLESLEAKNRALNEQIARLEQEREKEPNRLESLRKLKASLQGDVQKYQAYMSNLESHSAILDQKLNGLNEEIARVELECETIKQENTRLQNIIDNQKYSVADIERINHERNELQQTINKLTKDLEAEQQKLWNEELKYARGKEAIETQLAEYHKLARKLKLIPKGAENSKGYDFEIKFNPEAGANCLVKYRAQVYVPLKELLNETEEEINKALNKKMGLEDTLEQLNAMITESKRSVRTLKEEVQKLDDLYQQKIKVRTLPQFA

SEQ ID NO: 756243 - protein, 85 aa, Homo sapiens; identical to SEQ ID NO: 756239

SEQ ID NO: 756244 - protein, 420 aa, Homo sapiens
MKRSSVSSGGAGRLSMQELRSQDVNKQGLYTPQTKEKPTFGKLSINKPTSERKVSLFGKRTSGHGSRNSQLGIFSSSEKIKDPRPLNDKAFIQQCIRQLCEFLTENGYAHNVSMKSLQAPSVKDFLKIFTFLYGFLCPSYELPDTKFEEEVPRIFKDLGYPFALSKSSMYTVGAPHTWPHIVAALVWLIDCIKIHTAMKESSPLFDDGQPWGEETEDGIMHNKLFLDYTIKCYESFMSGADSFDEMNAELQSKLKDLFNVDAFKLESLEAKNRALNEQIARLEQEREKEPNRLESLRKLKASLQGDVQKYQAYMSNLESHSAILDQKLNGLNEEIARVELECETIKQENTRLQNIIDNQKYSVADIERINHERNELQQTINKLTKDLEAEQQKLWNEELKYARGKEAVCHTISRVATHHS

SEQ ID NO: 756245 - protein, 231 aa, Homo sapiens
RTRGSTHASKLKLIPKGAENSKGYDFEIKFNPEAGANCLVKYRAQVYVPLKELLNETEEEINKALNKKMGLEDTLEQLNAMITESKRSVRTLKEEVQKLDDLYQQKIKEAEEEDEKCASELESLEKHKHLLESTVNQGLSEAMNELDAVQREYQLVVQTTTEERRKVGNNLQRLLEMVATHVGSVEKHLEEQIAKVDREYEECMSEDLSENIKEIRDKYEKKATLIKSSEE

SEQ ID NO: 756246 - protein, 202 aa, Homo sapiens
  misc_feature (160)..(160): Xaa can be any naturally occurring amino acid
  misc_feature (196)..(196): Xaa can be any naturally occurring amino acid
MKRSSVSSGGAGRLSMQELRSQDVNKQGLYTPQTKEKPTFGKLSINKPTSERKVSLFGKRTSGHGSRNSQLGIFSSSEKIKDPRPLNDKAFIQQCIRQLCEFLTENGYAHNVSMKSLQAPSVKDFLKIFTFLYGFLCPSYELPDTKFEEEVPRIFKDLGXEPFGVFLFLHLLPKKLPLYHKLGGLPQYNGPSHFVXTPLSFG

SEQ ID NO: 756247 - protein, 82 aa, Homo sapiens
LVRAGFKSAPNFKFERLWRAEEGPGVLMTAVLSSRYLHGLQKFGPWVVSGNWKKGHKHEAQFSFQRWCWPPLHAGVKIPGCK

SEQ ID NO: 756248 - protein, 633 aa, Homo sapiens
MPLTPTVQGFQWTLRGPDVETSPFGAPRAASHGVGRHQELRDPTVPGPTSSATNVSMVVSAGPWSGEKAEMNILEINKKSRPQLAENKQQFRNLKQKCLVTQVAYFLANRQNNYDYEDCKDLIKSMLRDERLLTEEKLAEELGQAEELRQYKVLVHSQERELTQLREKLQEGRDASRSLNQHLQALLTPDEPDNSQGRDLREQLAEGCRLAQHLVQKLSPENDDDEDEDVKVEEAEKVQELYAPREVQKAEEKEVPEDSLEECAITCSNSHHPCESNQPYGNTRITFEEDQVDSTLIDSSSHDEWLDAVCIIPENESDHEQEEEKGPVSPRNLQESEEEEAPQESWDEGDWTLSIPPDMSASYQSDRSTFHSVEEQQVGLALDIGRHWCDQVKKEDQEATSPRLSRELLDEKEPEVLQDSLDRFYSTPFEYLELPDLCQPYRSDFYSLQEQHLGLALDLDRMKKDQEEEEDQGPPCPRLSRELPEVVEPEDLQDSLDRWYSTPFSYPELPDSCQPYGSCFYSLEEEHVGFSLDVDEIEKYQEGEEDQKPPCPRLNEVLMEAEEPEVLQDSLDRCYSTTSTYFQLHASFQQYRSAFYSFEEQDVSLALDVDNRFFTLTVIRHHLAFQMGVIFPH

SEQ ID NO: 756249 - protein, 70 aa, Homo sapiens
  misc_feature (11)..(11): Xaa can be any naturally occurring amino acid
GSEAEYFRSQXRPVKFHCPALGPKVVVVWVIRGLPGTVQRARCAVLAWLGMAAEVPFSWCFVVAAEDQFC

SEQ ID NO: 756250 - protein, 680 aa, Homo sapiens [sequence omitted]

SEQ ID NO: 756251 - protein, 278 aa, Homo sapiens
MLPQIPFLLLVSLNLVHGVFYAERYQTPTGIKGPLPNTKTQFFIPYTIKSKGIAVRGEQGTPGPPGPAGPRGHPGPSGPPGKPGYGSPGLQGEPGLPGPPGPSAVGKPGVPGLPGKPGERGPYGPKGDVGPAGLPGPRGPPGPPGIPGPAGISVPGKPGQQGPTGAPGPRGFPGEKGAPGVPGMNGQKGEMGYGAPGRPGERGLPGPQGPTGPSGPPGVGKRGENGVPGQPGIKGDRGFPGEMGPIGPPGPQGPPGERGPSQMAYTPLSMSTPLSQDS

SEQ ID NO: 756252 - protein, 680 aa, Homo sapiens [sequence omitted]

SEQ ID NO: 756253 - protein, 680 aa, Homo sapiens [sequence omitted]

SEQ ID NO: 756254 - protein, 147 aa, Homo sapiens
MGFIFSKSMNESMKNQKEFMLMNARLQLERQLIMQSEMRERQMAMQIAWSREFLKYFGTFFGLAAISLTAGAIKKKKPAFLVPIVPLSFILTYQYDLGYGTLLERMKGEAEDILETEKSKLQLPRGMITFESIEKARKEQSRFFIDK

SEQ ID NO: 756255 - protein, 147 aa, Homo sapiens; identical to SEQ ID NO: 756254

SEQ ID NO: 756256 - protein, 147 aa, Homo sapiens; identical to SEQ ID NO: 756254

SEQ ID NO: 756257 - protein, 147 aa, Homo sapiens; identical to SEQ ID NO: 756254

SEQ ID NO: 756258 - protein, 114 aa, Homo sapiens
MQSEMRERQMAMQIAWSREFLKYFGTFFGLAAISLTAGAIKKKKPAFLVPIVPLSFILTYQYDLGYGTLLERMKGEAEDILETEKSKLQLPRGMITFESIEKARKEQSRFFIDK

SEQ ID NO: 756259 - protein, 146 aa, Homo sapiens
  misc_feature (24)..(24): Xaa can be any naturally occurring amino acid
PPPPINPPLPPLLVKEKKKKSYMXNALERQLIMQSEMRERQMAMQIAWSREFLKYFGTFFGLAAISLTAGAIKKKKPAFLVPIVPLSFILTYQYDLGYGTLLERMKGEAEDILETEKSKLQLPRGMITFESIEKARKEQSRFFIDK

SEQ ID NO: 756260 - protein, 114 aa, Homo sapiens; identical to SEQ ID NO: 756258

SEQ ID NO: 756261 - protein, 147 aa, Homo sapiens; identical to SEQ ID NO: 756254

SEQ ID NO: 756262 - protein, 147 aa, Homo sapiens; identical to SEQ ID NO: 756254

SEQ ID NO: 756263 - protein, 130 aa, Homo sapiens
MGFIFSKSMNESMKNQKEFMLMNARLQLERQLIMQSEMRERQMAMQIAWSREFLKYFGTFFGLAAISLTAGAIKKKKPAFLVPIVPLSFILTYQYDLGYGTLLERMKGEAEDILETEKTRKEQSRFFIDK

SEQ ID NO: 756264 - protein, 385 aa, Homo sapiens
MAAAAARWNHVWVGTETGILKGVNLQRKQAANFTAGGQPRREEAVSALCWGTGGETQMLVGCADRTVKHFSTEDGIFQGQRHCPGGEGMFRGLAQADGTLITCVDSGILRVWHDKDKDTSSDPLLELRVGPGVCRMRQDPAHPHVVATGGKENALKIWDLQGSEEPVFRAKNVRNDWLDLRVPIWDQDIQFLPGSQKLVTCTGYHQVRVYDPASPQRRPVLETTYGEYPLTAMTLTPGGNSVIVGNTHGQLAEIDLRQGRLLGCLKGLAGSVRGLQCHPSKPLLASCGLDRVLRIHRIQNPRGLEHKVYLKSQLNCLLLSGRDNWEDEPQEPQEPNKVPLEDTETDELWASLEAAAKRKLSGLEQPQGALQTRRRKKKRPGSTSP

SEQ ID NO: 756265 - protein, 222 aa, Homo sapiens
HASRTAWVDPRVRAAAAARWNHVWVGTETGILKGVNLQRKQAANFTAGGQPRREEAVSALCWGTGGETQMLVGCADRTVKHFSTEDGIFQGQRHCPGGEGMFRGLAQADGTLITCVDSGILRVWHDKDKDTSSDPLLELRVGPGVCRMRQDPAHPHVVATGGKENALKIWDLQGSEEPVFRAKNVRNDWLDLRVPIWDQDIQFLPGSQKLVTCTGYHQGGVS

SEQ ID NO: 756266 - protein, 385 aa, Homo sapiens; identical to SEQ ID NO: 756264

SEQ ID NO: 756267 - protein, 385 aa, Homo sapiens; identical to SEQ ID NO: 756264

SEQ ID NO: 756268 - protein, 366 aa, Homo sapiens
MAAAAARWNHVWVGTETGILKGVNLQRKQAANFTAGGQPRREEAVSALCWGTGGETQMLVGCADRTVKHFSTEDGIFQGQRHCPGGEGMFRGLAQADGTLITCVDSGILRVWHDKDKDTSSDPLLELRVGPGVCRMRQDPAHPHVVATGGKENALKIWDLQGSEEPVFRAKNVRNDWLDLRVPIWDQDIQFLPGSQKLVTCTGYHQVRVYDPASPQRRPVLETTYGEYPLTAMTLTPGGNSVIVGNTHGQLAEIDLRQGRLLGCLKGLAGSVRGLQCHPSKPLLASCGLDRVLRIHRIQNPRGLEHKDEPQEPQEPNKVPLEDTETDELWASLEAAAKRKLSGLEQPQGALQTRRRKKKRPGSTSP

SEQ ID NO: 756269 - protein, 437 aa, Homo sapiens
MYSSDLHKQAPPGFIFVKQNKHGSFTVSALQTSSNYTALHRTRRPLVTHTLRRKCELSASRLCHGGCCCTLEPWVNLQRKQAANFTAGGQPRREEAVSALCWGTGGETQMLVGCADRTVKHFSTEDGIFQGQRHCPGGEGMFRGLAQADGTLITCVDSGILRVWHDKDKDTSSDPLLELRVGPGVCRMRQDPAHPHVVATGGKENALKIWDLQGSEEPVFRAKNVRNDWLDLRVPIWDQDIQFLPGSQKLVTCTGYHQVRVYDPASPQRRPVLETTYGEYPLTAMTLTPGGNSVIVGNTHGQLAEIDLRQGRLLGCLKGLAGSVRGLQCHPSKPLLASCGLDRVLRIHRIQNPRGLEHKVYLKSQLNCLLLSGRDNWEDEPQEPQEPNKVPLEDTETDELWASLEAAAKRKLSGLEQPQGALQTRRRKKKRPGSTSP

SEQ ID NO: 756270 - protein, 387 aa, Homo sapiens
HASRTAWVDPRVRWVGTETGILKGVNLQRKQAANFTAGGQPRREEAVSALCWGTGGETQMLVGCADRTVKHFSTEDGIFQGQRHCPGGEGMFRGLAQADGTLITCVDSGILRVWHDKDKDTSSDPLLELRVGPGVCRMRQDPAHPHVVATGGKENALKIWDLQGSEEPVFRAKNVRNDWLDLRVPIWDQDIQFLPGSQKLVTCTGYHQVRVYDPASPQRRPVLETTYGEYPLTAMTLTPGGNSVIVGNTHGQLAEIDLRQGRLLGCLKGLAGSVRGLQCHPSKPLLASCGLDRVLRIHRIQNPRGLEHKVYLKSQLNCLLLSGRDNWEDEPQEPQEPNKVPLEDTETDELWASLEAAAKRKLSGLEQPQGALQTRRRKKKRPGSTSP

SEQ ID NO: 756271 - protein, 399 aa, Homo sapiens
MAAAAARWNHVWVGTETGILKGVNLQRKQAANFTAGGQPRREEAVSALCWGTGGETQMLVGCADRTVKHFSTEDGIFQGQRHCPGGEGMFRGLAQADGTLITCVDSGILRVWHDKDKDTSSDPVRLPCPDGWGRWAGLLELRVGPGVCRMRQDPAHPHVVATGGKENALKIWDLQGSEEPVFRAKNVRNDWLDLRVPIWDQDIQFLPGSQKLVTCTGYHQVRVYDPASPQRRPVLETTYGEYPLTAMTLTPGGNSVIVGNTHGQLAEIDLRQGRLLGCLKGLAGSVRGLQCHPSKPLLASCGLDRVLRIHRIQNPRGLEHKVYLKSQLNCLLLSGRDNWEDEPQEPQEPNKVPLEDTETDELWASLEAAAKRKLSGLEQPQGALQTRRRKKKRPGSTSP

SEQ ID NO: 756272 - protein, 153 aa, Homo sapiens
MTLTPGGNSVIVGNTHGQLAEIDLRQGRLLGCLKGLAGSVRGLQCHPSKPLLASCGLDRVLRIHRIQNPRGLEHKVYLKSQLNCLLLSGRDNWEDEPQEPQEPNKVPLEDTETDELWASLEAAAKRKLSGLEQPQGALQTRRRKKKRPGSTSP

SEQ ID NO: 756273 - protein, 238 aa, Homo sapiens [sequence omitted]

SEQ ID NO: 756274 - protein, 211 aa, Homo sapiens
MYSSDLHKQAPPGFIFVKQNKHGSFTVSALQTSSNYTALHRTRRPLVTHTLRRKCELSASRLCHGGCCCTLEPCVGRHRDWDLERGKSSAKTGGELHGRRTAAARGGSERPVLGHRRRDPDAGGLRGQDGEALQHRGWHIPGSETLPGRGGHDEPQEPQEPNKVPLEDTETDELWASLEAAAKRKLSGLEQPQGALQTRRRKKKRPGSTSP

SEQ ID NO: 756275 - protein, 79 aa, Homo sapiens
TLGKGGLRTLERTLISYSLQDEPQEPQEPNKVPLEDTETDELWASLEAAAKRKLSGLEQPQGALQTRRRKKKRPGSTSP

SEQ ID NO: 756276 - protein, 128 aa, Homo sapiens
PRGAMGCCQDKDFEMSDEQSKEEESEDGREDETTDTQRGPRECERGLPEGRGELRGLVVPSGAEDIDLNSPDHPNHKSNESLLITVLWRRLSTFGRRGSSRPSKRQPDQIRKQESPIREGNQEEPEKG

SEQ ID NO: 756277 - protein, 385 aa, Homo sapiens; identical to SEQ ID NO: 756264

SEQ ID NO: 756278 - protein, 385 aa, Homo sapiens; identical to SEQ ID NO: 756264

SEQ ID NO: 756279 - protein, 385 aa, Homo sapiens; identical to SEQ ID NO: 756264

SEQ ID NO: 756280 - protein, 328 aa, Homo sapiens
MLVGCADRTVKHFSTEDGIFQGQRHCPGGEGMFRGLAQADGTLITCVDSGILRVWHDKDKDTSSDPLLELRVGPGVCRMRQDPAHPHVVATGGKENALKIWDLQGSEEPVFRAKNVRNDWLDLRVPIWDQDIQFLPGSQKLVTCTGYHQVRVYDPASPQRRPVLETTYGEYPLTAMTLTPGGNSVIVGNTHGQLAEIDLRQGRLLGCLKGLAGSVRGLQCHPSKPLLASCGLDRVLRIHRIQNPRGLEHKVYLKSQLNCLLLSGRDNWEDEPQEPQEPNKVPLEDTETDELWASLEAAAKRKLSGLEQPQGALQTRRRKKKRPGSTSP

SEQ ID NO: 756281 - protein, 323 aa, Homo sapiens
MAAAAARWNHVWVGTETGILKGVNLQRKQAANFTAGGQPRREEAVSALCWGTGGETQMLVGCADRTVKHFSTEDGIFQGQRHCPGGEGMFRGLAQADGTLITCVDSGILRVWHDKDKDTSSDPLLELRVGPGVCRMRQDPAHPHVVATGGKENALKIWDLQGSEEPVFRAKNVRNDWLDLRVPIWDQDIQFLPGSQKLVTCTGYHQVRVYDPASPQRRPVLETTYGEYPLTAMTLTPGGNSVIVGNTHGQLAEIDLRQGRLLGCLKGLAGSVRGLQCHPSKPLLASCGLDRVLRIHRIPEFGYIQRSGRHMQDIESDIVELGL

SEQ ID NO: 756282 - protein, 250 aa, Homo sapiens
MRQDPAHPHVVATGGKENALKIWDLQGSEEPVFRAKNVRNDWLDLRVPIWDQDIQFLPGSQKLVTCTGYHQVRVYDPASPQRRPVLETTYGEYPLTAMTLTPGGNSVIVGNTHGQLAEIDLRQGRLLGCLKGLAGSVRGLQCHPSKPLLASCGLDRVLRIHRIQNPRGLEHKVYLKSQLNCLLLSGRDNWEDEPQEPQEPNKVPLEDTETDELWASLEAAAKRKLSGLEQPQGALQTRRRKKKRPGSTSP

SEQ ID NO: 756283 - protein, 210 aa, Homo sapiens
MAAAAARWNHVWVGTETGILKGVNLQRKQAANFTAGGQPRREEAVSALCWGTGGETQMLVGCADRTVKHFSTEDGIFQGQRHCPGGEGMFRGLAQADGTLITCVDSGILRVWHDKDKDTSSDPLLELRVGPGVCRMRQDPAHPHVVATGGKENALKIWDLQGSEEPVFRAKNVRNDWLDLRVPIWDQDIQFLPGSQKLVTCTGYHQGGVS

SEQ ID NO: 756284 - protein, 192 aa, Homo sapiens
MTLTPGGNSVIVGNTHGQLAEIDLRQGRLLGCLKGLAGSVRGLQCHPSKPLLASCGLDRVLRIHRIQNPRGLEHKVSCLSHLQLMVLWRPRLLCPPFMFLSQHAWLLKVPHLLQVYLKSQLNCLLLSGRDNWEDEPQEPQEPNKVPLEDTETDELWASLEAAAKRKLSGLEQPQGALQTRRRKKKRPGSTSP

SEQ ID NO: 756285 - protein, 143 aa, Homo sapiens
MVGYWPASYHGCFPPSLGRLLGCLKGLAGSVRGLQCHPSKPLLASCGLDRVLRIHRIQNPRGLEHKVSCLSHLQLMVLWRPRLLCPPFMFLSQHAWLLKVPHLLQVYLKSQLNCLLLSGRDNWEVSSWARECGSQGHRCEDLP

SEQ ID NO: 756286 - protein, 142 aa, Homo sapiens
ADRSSWYPPTSPTGRSWLAELQQWLKPGLKVLSIAQAHSPAFSCEQVRAFPALTSLDLSDNPGLGERGLMAALCPHKFPAIQNLALRNTGMETPTGVCAALAAAGVQPHSLDLSHNSLRATVNPSAPRCMWSSALNSLNLSG

SEQ ID NO: 756287 - protein, 375 aa, Homo sapiens
MERASCLLLLLLPLVHVSATTPEPCELDDEDFRCVCNFSEPQPDWSEAFQCVSAVEVEIHAGGLNLEPFLKRVDADADPRQYADTVKALRVRRLTVGAAQVPAQLLVGALRVLAYSRLKELTLEDLKITGTMPPLPLEATGLALSSLRLRNVSWATGRSWLAELQQWLKPGLKVLSIAQAHSPAFSCEQVRAFPALTSLDLSDNPGLGERGLMAALCPHKFPAIQNLALRNTGMETPTGVCAALAAAGVQPHSLDLSHNSLRATVNPSAPRCMWSSALNSLNLSFAGLEQVPKGLPAKLRVLDLSCNRLNRAPQPDELPEVDNLTLDGNPFLVPGTALPHEGSMNSGVVPACARSTLSVGVSGTLVLLQGARGFA

SEQ ID NO: 756288 - protein, 375 aa, Homo sapiens; identical to SEQ ID NO: 756287

SEQ ID NO: 756289 - protein, 232 aa, Homo sapiens
ADRSSWYPPTSPTGRSWLAELQQWLKPGLKVLSIAQAHSPAFSCEQVRAFPALTSLDLSDNPGLGERGLMAALCPHKFPAIQNLALRNTGMETPTGVCAALAAAGVQPHSLDLSHNSLRATVNPSAPRCMWSSALNSLNLSFAGLEQVPKGLPAKLRVLDLSCNRLNRAPQPDELPEVDNLTLDGNPFLVPGTALPHEGSMNSGVVPACARSTLSVGVSGTLVLLQGARGFA

SEQ ID NO: 756290 - protein, 285 aa, Homo sapiens
MERASCLLLLLLPLVHVSATTPEPCELDDEDFRCVCNFSEPQPDWSEAFQCVSAVEVEIHAGGLNLEPFLKRVDADADPRQYADTVKALRVRRLTVGAAQVPAQLLVGALRVLAYSRLKELTLEDLKITGTMPPLPLEATGLALSSLRLRNVSWATGRSWLAELQQWLKPGLKVLSIAQAHSPAFSCEQVRAFPALTSLDLSDNPGLGERGLMAALCPHKFPAIQNLALRNTGMETPTGVCAALAAAGVQPHSLDLSHNSLRATVNPSAPRCMWSSALNSLNLSG

SEQ ID NO: 756291 - protein, 48 aa, Homo sapiens
  misc_feature (7)..(7): Xaa can be any naturally occurring amino acid
  misc_feature (16)..(16): Xaa can be any naturally occurring amino acid
  misc_feature (24)..(24): Xaa can be any naturally occurring amino acid
MVTYSLXECMILGANXGDTSRMQXALSGEIVFGCTGVGAFTVVGSFGP

SEQ ID NO: 756292 - protein, 375 aa, Homo sapiens; identical to SEQ ID NO: 756287

SEQ ID NO: 756293 - protein, 385 aa, Homo sapiens [sequence omitted]

SEQ ID NO: 756294 - protein, 42 aa, Homo sapiens
MECTRAPGSNSQKGCPARRLHRNLLTEATVRRNTGRDARFLW

SEQ ID NO: 756295 - protein, 427 aa, Homo sapiens [sequence omitted]

SEQ ID NO: 756296 - protein, 581 aa, Homo sapiens [sequence omitted]

SEQ ID NO: 756297 - protein, 581 aa, Homo sapiens [sequence omitted]

SEQ ID NO: 756298 - protein, 139 aa, Homo sapiens
MHHAVYPAVNRFSPSPRNSPRPSPKQSPRNSPRSRSPARGIEYSRVSPQPMISRLQQPRLSLQGHPTDLQTSNVKNEEKLRRSLPNLSRTSNTQVDSVKSSRSDSNFQVPNGGIPRMQPQASASKYPSYAFMYQLFKEK

SEQ ID NO: 756299 - protein, 581 aa, Homo sapiens [sequence omitted]

SEQ ID NO: 756300 - protein, 581 aa, Homo sapiens [sequence omitted]

SEQ ID NO: 756301 - protein, 341 aa, Homo sapiens
MEDVNSNVNADQEVRKLQELVKKLEKQNEQLRSRSGAVQGAGSLGPGSPVRAGASIPSSGAASPRGFPLGLSAKSGGGPGSGPRRTSSEELRDATSLLAAGEGGLLDEVEPLRPDELERLSGWEEEEESWLYSSPKKKLTPMQKSVSPLVWCRQVLDYPSPDVECAKKSLIHKLDQTMSALKRQNLYNNPFNSMSYTSPYSPNASSPYSSGFNSPSSTPVRPPIVKQLILPGNSGNLKSSDRNPPLSPQSSIDSELSASELDEDSIGSNYKLNDVTDVQILARMQEESLRQEYAATTSRRSSGSSCNSTRRGFHHHHAIHLDRHLSSHPEIHLVHDLLLGE

SEQ ID NO: 756302 - protein, 581 aa, Homo sapiens [sequence omitted]

SEQ ID NO: 756303 - protein, 147 aa, Homo sapiens [sequence omitted]

SEQ ID NO: 756304 - protein, 469 aa, Homo sapiens
MEDVNSNVNADQEVRKLQELVKKLEKQNEQLRSRSGAVQGAGSLGPGSPVRAGASIPSSGAASPRGFPLGLSAKSGGGPGSGPRRTSSEELRDATSLLAAGEGGLLDEVEPLRPDELERLSGWEEEEESWLYSSPKKKLTPMQKSVSPLVWCRQVLDYPSPDVECAKKSLIHKLDQTMSALKRQNLYNNPFNSMSYTSPYSPNASSPYSSGFNSPSSTPVRPPIVKQLILPGNSGNLKSSDRNPPLSPQSSIDSELSASELDEDSIGSNYKLNDVTDVQILARMQEESLRQEYAATTSRRSSGSSCNSTRRGTFSDQELDAQSLDDEDDNMHHAVYPAVNRFSPSPRNSPRPSPKQSPRNSPRSRSPARGIEYSRVSPQPMISRLQQPRLSLQGHPTDLQTSNVKNEEKLRRSLPNLSRTSNTQVDSVKSSRSDSNFQVPNGGIPRMQPQASASKYPSYAFMYQLFKEK

SEQ ID NO: 756305 - protein, 581 aa, Homo sapiens [sequence omitted]

SEQ ID NO: 756306 - protein, 201 aa, Homo sapiens
MISRLQQPRLSLQGHPTDLQTSNVKNEEKLRRSLPNLSRTSNTQVDSVKSSRSDSNFQVPNGGIPRMQPQASAIPSPGKFRSPAAPSPLALRQPVKAFSNHGSGSPGSQEITQLTQTTSSPGPPMVQSTVSANPPSNINSATLTRPAGTTAMRSGLPRPSAPSAGGIPVPRSKLAQPVRRSLPAPKTYGSMKDDSWKDGCY

SEQ ID NO: 756307 - protein, 581 aa, Homo sapiens [sequence omitted]

SEQ ID NO: 756308 - protein, 110 aa, Homo sapiens
LGFFSPALWLDRKNPLFLGGFLFFPPKAPNLNLVSSFLAGRQAFTDFLCLPAKSSANWILAASLLSCSCFRSGFHRDSRVFLVQLAEGLSHSLETVSSHSVWSFRPTPRQ

SEQ ID NO: 756309 - protein, 112 aa, Homo sapiens [sequence omitted]

SEQ ID NO: 756310 - protein, 71 aa, Homo sapiens
LYNLFRQMEAEGTVPNSFCEASFTLIPKPVKDITRKENYRPISLINIDAKSPTKYSHMLHSDVLVNDRPYT

SEQ ID NO: 756311 - protein, 646 aa, Homo sapiens
APQRPSCSPGSVSAAAVNMEPPDAPAQARGAPRLLLLAVLLAAHPDAQAEVRLSVPPLVEVMRGKSVILDCTPTGTHDHYMLEWFLTDRSGARPRLASAEMQGSELQVTMHDTRGRSPPYQLDSQGRLVLAEAQVGDERDYVCVVRAGAAGTAEATARLNVFAKPEATEVSPNKGTLSVMEDSAQEIATCNSRNGNPAPKITWYRNGQRLEVPVEMNPEGYMTSRTVREASGLLSLTSTLYLRLRKDDRDASFHCAAHYSLPEGRHGRLDSPTFHLTLHYPTEHVQFWVGSPSTPAGWVREGDTVQLLCRGDGSPSPEYTLFRLQDEQEEVLNVNLEGNLTLEGVTRGQSGTYGCRVEDYDAADDVQLSKTLELRVAYLDPLELSEGKVLSLPLNSSAVVNCSVHGLPTPALRWTKDSTPLGDGPMLSLSSITFDSNGTYVCEASLPTVPVLSRTQNFTLLVQGSPELKTAEIEPKADGSWREGDEVTLICSARGHPDPKLSWSQLGGSPAEPIPGRQGWVSSSLTLKVTSALSRDGISCEASNPHGNKRHVFHFGAVSPQTSQAGVAVMAVAVSVGLLLLVVAVFYCVRRKGGPCCRQRREKGAPPPGEPGLSHSGSEQPEQTGLLMGGASGGARGGSGGFGDEC

SEQ ID NO: 756312 - protein, 201 aa, Homo sapiens
MEPPDAPAQARGAPRLLLLAVLLAAHPDAQAEVRLSVPPLVEVMRGKSVILDCTPTGTHDHYMLEWFLTDRSGARPRLASAEMQGSELQVTMHDTRGRSPPYQLDSQGRLVLAEAQVGDERDYVCVVRAGAAGTAEATARLNVFAKPEATEVSPNKGTLSVMEDSAQEVPLGWTLAPGSWRRRGQGPGLLGLREEGLGTPG

SEQ ID NO: 756313 - protein, 283 aa, Homo sapiens
  misc_feature (161)..(162): Xaa can be any naturally occurring amino acid
  misc_feature (172)..(172): Xaa can be any naturally occurring amino acid
  misc_feature (180)..(180): Xaa can be any naturally occurring amino acid
  misc_feature (185)..(185): Xaa can be any naturally occurring amino acid
  misc_feature (218)..(218): Xaa can be any naturally occurring amino acid
  misc_feature (232)..(232): Xaa can be any naturally occurring amino acid
  misc_feature (235)..(235): Xaa can be any naturally occurring amino acid
  misc_feature (241)..(241): Xaa can be any naturally occurring amino acid
  misc_feature (246)..(246): Xaa can be any naturally occurring amino acid
  misc_feature (256)..(256): Xaa can be any naturally occurring amino acid
  misc_feature (260)..(260): Xaa can be any naturally occurring amino acid
  misc_feature (262)..(262): Xaa can be any naturally occurring amino acid
  misc_feature (270)..(270): Xaa can be any naturally occurring amino acid
APQRPSCSPGSVSAAAVNMEPPDAPAQARGAPRLLLLAVLLAAHPDAQAEVRLSVPPLVEVMRGKSVILDCTPTGTHDHYMLEWFLTDRSGARPRLASAEMQGSELQVTMHDTRGRSPPYQLDSQGRLVLAEAQVGDERDYVCVVRAGAAGTAEAHKRHTXXCPTRGPCGIXPQRDTVTXMKTIXPGDRPPVPSRPRAPRSPTTPRVYAPPGRRLCRXPVDACPPRADSHVXRPXQVPGRXSGPCXSPAPGTPLTXRLPXGXGPARARYXPDADPLSAWPEGP

SEQ ID NO: 756314 - protein, 628 aa, Homo sapiens
MEPPDAPAQARGAPRLLLLAVLLAAHPDAQAEVRLSVPPLVEVMRGKSVILDCTPTGTHDHYMLEWFLTDRSGARPRLASAEMQGSELQVTMHDTRGRSPPYQLDSQGRLVLAEAQVGDERDYVCVVRAGAAGTAEATARLNVFAKPEATEVSPNKGTLSVMEDSAQEIATCNSRNGNPAPKITWYRNGQRLEVPVEMNPEGYMTSRTVREASGLLSLTSTLYLRLRKDDRDASFHCAAHYSLPEGRHGRLDSPTFHLTLHYPTEHVQFWVGSPSTPAGWVREGDTVQLLCRGDGSPSPEYTLFRLQDEQEEVLNVNLEGNLTLEGVTRGQSGTYGCRVEDYDAADDVQLSKTLELRVAYLDPLELSEGKVLSLPLNSSAVVNCSVHGLPTPALRWTKDSTPLGDGPMLSLSSITFDSNGTYVCEASLPTVPVLSRTQNFTLLVQGSPELKTAEIEPKADGSWREGDEVTLICSARGHPDPKLSWSQLGGSPAEPIPGRQGWVSSSLTLKVTSALSRDGISCEASNPHGNKRHVFHFGAVSPQTSQAGVAVMAVAVSVGLLLLVVAVFYCVRRKGGPCCRQRREKGAPPPGEPGLSHSGSEQPEQTGLLMGGASGGARGGSGGFGDEC

SEQ ID NO: 756315 - protein, 588 aa, Homo sapiens
MEPPDAPAQARGAPRLLLLAVLLAAHPDAQAEVRLSVPPLVEVMRGKSVILDCTPTGTHDHYMLEWFLTDRSGARPRLASAEMQGSELQVTMHDTRGRSPPYQLDSQGRLVLAEAQVGDERDYVCVVRAGAAGTAEATARLNVFAKPEATEVSPNKGTLSVMEDSAQEIATCNSRNGNPAPKITWYRNGQRLEVPVEMNPEGYMTSRTVREASGLLSLTSTLYLRLRKDDRDASFHCAAHYSLPEGRHGRLDSPTFHLTLHYPTEHVQFWVGSPSTPAGWVREGDTVQLLCRGDGSPSPEYTLFRLQDEQEEVLNVNLEGNLTLEGVTRGQSGTYGCRVEDYDAADDVQLSKTLELRVAYLDPLELSEGKVLSLPLNSSAVVNCSVHGLPTPALRWTKDSTPLGDGPMLSLSSITFDSNGTYVCEASLPTVPVLSRTQNFTLLVQGSPELKTAEIEPKADGSWREGDEVTLICSARGHPDPKLSWSQLGGSPAEPIPGRQGWVSSSLTLKVTSALSRDGISCEASNPHGNKRHVFHFGAVSPQTSQAGVAVMAVAVSVGLLLLVVAVFYCVRRKGGPCCRQRREKGAP

SEQ ID NO: 756316 - protein, 183 aa, Homo sapiens
MNGQLNGFHEAFIEEGTFLFTSESVGEGHPDKICDQISDAVLDAHLQQDPDAKVACETVAKTGMILLAGEITSRAAVDYQKVVREAVKHIGYDDSSKGFDYKTCNVLVALEQQSPDIAQGVHLDRNEEDIGAGDQGLMFGYATDETEECMPLTIVLAHKLNAKLAELRRNGTLPWLRPDSKTQ

SEQ ID NO: 756317 - protein, 326 aa, Homo sapiens [sequence omitted]

SEQ ID NO: 756318 - protein, 375 aa, Homo sapiens
VRPRVYRPRPDKICDQISDAVLDAHLQQDPDAKVACETVAKTGMILLAGEITSRAAVDYQKVVREAVKHIGYDDSSKGFDYKTCNVLVALEQQSPDIAQGVHLDRNEEDIGAGDQGLMFGYATDETEECMPLTIVLAHKLNAKLAELRRNGTLPWLRPDSKTQVTVQYMQDRGAVLPIRVHTIVISVQHDEEVCLDEMRDALKEKVIKAVVPAKYLDEDTIYHLQPSGRFVIGGPQGDAGLTGRKIIVDTYGGWGAHGGGAFSGKDYTKVDRSAAYAARWVAKSLVKGGLCRRVLVQVSYAIGVSHPLSISIFHYGTSQKSERELLEIVKKNFDLRPGVIVRDLDLKKPIYQRTAAYGHFGRDSFPWEVPKKLKY

SEQ ID NO: 756319 - protein, 366 aa, Homo sapiens
MRGWVLIGRGAVLIAHLQQDPDAKVACETVAKTGMILLAGEITSRAAVDYQKVVREAVKHIGYDDSSKGFDYKTCNVLVALEQQSPDIAQGVHLDRNEEDIGAGDQGLMFGYATDETEECMPLTIVLAHKLNAKLAELRRNGTLPWLRPDSKTQVTVQYMQDRGAVLPIRVHTIVISVQHDEEVCLDEMRDALKEKVIKAVVPAKYLDEDTIYHLQPSGRFVIGGPQGDAGLTGRKIIVDTYGGWGAHGGGAFSGKDYTKVDRSAAYAARWVAKSLVKGGLCRRVLVQVSYAIGVSHPLSISIFHYGTSQKSERELLEIVKKNFDLRPGVIVRDLDLKKPIYQRTAAYGHFGRDSFPWEVPKKLKY

SEQ ID NO: 756320 - protein, 254 aa, Homo sapiens
LGGGRCKSDEVTIVLAHKLNAKLAELRRNGTLPWLRPDSKTQVTVQYMQDRGAVLPIRVHTIVISVQHDEEVCLDEMRDALKEKVIKAVVPAKYLDEDTIYHLQPSGRFVIGGPQGDAGLTGRKIIVDTYGGWGAHGGGAFSGKDYTKVDRSAAYAARWVAKSLVKGGLCRRVLVQVSYAIGVSHPLSISIFHYGTSQKSERELLEIVKKNFDLRPGVIVRDLDLKKPIYQRTAAYGHFGRDSFPWEVPKKLKY

SEQ ID NO: 756321 - protein, 377 aa, Homo sapiens
  misc_feature (16)..(16): Xaa can be any naturally occurring amino acid
KRGTKHKNQVGTTGEXTLNGFHEAFIEEGTFLFTSESVGEGHPDKICDQISDAVLDAHLQQDPDAKVACETVAKTGMILLAGEITSRAAVDYQKVVREAVKHIGYDDSSKGFDYKTCNVLVALEQQSPDIAQGVHLDRNEEDIGAGDQGLMFGYATDETEECMPLTIVLAHKLNAKLAELRRNGTLPWLRPDSKTQVTVQYMQDRGAVLPIRVHTIVISVQHDEEVCLDEMRDALKEKVIKAVVPAKYLDEDTIYHLQPSGRFVIGGPQGDAGLTGRKIIVDTYGGWGAHGGGAFSGKDYTKVDRSAAYAARWVAKSLVKGGLCRRVLVQVSYAIGVSHPLSISIFHYGTSQKSERELLEIVKKNFDLRPGVIVRRW

SEQ ID NO: 756322 - protein, 326 aa, Homo sapiens [sequence omitted]

SEQ ID NO: 756323 - protein, 326 aa, Homo sapiens [sequence omitted]

SEQ ID NO: 756324 - protein, 326 aa, Homo sapiens [sequence omitted]

SEQ ID NO: 756325 - protein, 326 aa, Homo sapiens [sequence omitted]

SEQ ID NO: 756326 - protein, 326 aa, Homo sapiens [sequence omitted]

SEQ ID NO: 756327 - protein, 326 aa, Homo sapiens [sequence omitted]

SEQ ID NO: 756328 - protein, 326 aa, Homo sapiens [sequence omitted]

SEQ ID NO: 756329 - protein, 326 aa, Homo sapiens [sequence omitted]

SEQ ID NO: 756330 - protein, 326 aa, Homo sapiens [sequence omitted]

SEQ ID NO: 756331 - protein, 326 aa, Homo sapiens [sequence omitted]

SEQ ID NO: 756332 - protein, 326 aa, Homo sapiens [sequence omitted]

SEQ ID NO: 756333 - protein, 326 aa, Homo sapiens [sequence omitted]

SEQ ID NO: 756334 - protein, 326 aa, Homo sapiens [sequence omitted]

SEQ ID NO: 756335 - protein, 326 aa, Homo sapiens [sequence omitted]

SEQ ID NO: 756336 - protein, 267 aa, Homo sapiens [sequence omitted]

SEQ ID NO: 756337 - protein, 290 aa, Homo sapiens
  misc_feature (16)..(16): Xaa can be any naturally occurring amino acid
KRGTKHKNQVGTTGEXTLNGFHEAFIEEGTFLFTSESVGEGHPDKICDQISDAVLDAHLQQDPDAKVACETVAKTGMILLAGEITSRAAVDYQKVVREAVKHIGYDDSSKGFDYKTCNVLVALEQQSPDIAQGVHLDRNEEDIGAGDQGLMFGYATDETEECMPLTIVLAHKLNAKLAELRRNGTLPWLRPDSKTQVTVQYMQDRGAVLPIRVHTIVISVQHDEEVCLDEMRDALKEKVIKAVVPAKYLDEDTIYHLQPSGRFVIGGPQGDAGLTGPSRDYTKVDRSCFA

SEQ ID NO: 756338 - protein, 146 aa, Homo sapiens
MNGQLNGFHEAFIEEGTFLFTSESVGEGHPDKICDQISDAVLDAHLQQDPDAKVACETVAKTGMILLAGEITSRAAVDYQKVVREAVKHIGYDDSSKGFDYKTCNVLVALEQQSPDIAQGVHLDRNEEDIGAGDQVSWCRGCFNLF

SEQ ID NO: 756339 - protein, 395 aa, Homo sapiens
MNGQLNGFHEAFIEEGTFLFTSESVGEGHPDKICDQISDAVLDAHLQQDPDAKVACETVAKTGMILLAGEITSRAAVDYQKVVREAVKHIGYDDSSKGFDYKTCNVLVALEQQSPDIAQGVHLDRNEEDIGAGDQGLMFGYATDETEECMPLTIVLAHKLNAKLAELRRNGTLPWLRPDSKTQVTVQYMQDRGAVLPIRVHTIVISVQHDEEVCLDEMRDALKEKVIKAVVPAKYLDEDTIYHLQPSGRFVIGGPQGDAGLTGRKIIVDTYGGWGAHGGGAFSGKDYTKVDRSAAYAARWVAKSLVKGGLCRRVLVQVSYAIGVSHPLSISIFHYGTSQKSERELLEIVKKNFDLRPGVIVRDLDLKKPIYQRTAAYGHFGRDSFPWEVPKKLKY

SEQ ID NO: 756340 - protein, 326 aa, Homo sapiens [sequence omitted]

SEQ ID NO: 756341 - protein, 408 aa, Homo sapiens
  misc_feature (16)..(16): Xaa can be any naturally occurring amino acid
KRGTKHKNQVGTTGEXTLNGFHEAFIEEGTFLFTSESVGEGHPDKICDQISDAVLDAHLQQDPDAKVACETVAKTGMILLAGEITSRAAVDYQKVVREAVKHIGYDDSSKGFDYKTCNVLVALEQQSPDIAQGVHLDRNEEDIGAGDQGLMFGYATDETEECMPLTIVLAHKLNAKLAELRRNGTLPWLRPDSKTQVTVQYMQDRGAVLPIRVHTIVISVQHDEEVCLDEMRDALKEKVIKAVVPAKYLDEDTIYHLQPSGRFVIGGPQGDAGLTGRKIIVDTYGGWGAHGGGAFSGKDYTKVDRSAAYAARWVAKSLVKGGLCRRVLVQVSYAIGVSHPLSISIFHYGTSQKSERELLEIVKKNFDLRPGVIVRDLDLKKPIYQRTAAYGHFGRDSFPWEVPKKLKY

SEQ ID NO: 756342 - protein, 422 aa, Homo sapiens
MNGQLNGFHEAFIEEGTFLFTSESVGEGHPDKICDQISDAVLDAHLQQDPDAKVACETVAKTGMILLAGEITSRAAVDYQKVVREAVKHIGYDDSSKGFDYKTCNVLVALEQQSPDIAQGVHLDRNEEDIGAGDQVSWCRGCFNLFYIKFWSLITLVTFLSLGLMFGYATDETEECMPLTIVLAHKLNAKLAELRRNGTLPWLRPDSKTQVTVQYMQDRGAVLPIRVHTIVISVQHDEEVCLDEMRDALKEKVIKAVVPAKYLDEDTIYHLQPSGRFVIGGPQGDAGLTGRKIIVDTYGGWGAHGGGAFSGKDYTKVDRSAAYAARWVAKSLVKGGLCRRVLVQVSYAIGVSHPLSISIFHYGTSQKSERELLEIVKKNFDLRPGVIVRDLDLKKPIYQRTAAYGHFGRDSFPWEVPKKLKY

SEQ ID NO: 756343 - protein, 360 aa, Homo sapiens
  misc_feature (16)..(16): Xaa can be any naturally occurring amino acid
KRGTKHKNQVGTTGEXTLNGFHEAFIEEGTFLFTSESVGEGHPDKICDQISDAVLDAHLQQDPDAKVACETVAKTGMILLAGEITSRAAVDYQKVVREAVKHIGYDDSSKGFDYKTCNVLVALEQQSPDIAQGVHLDRNEEDIGAGDQVTVQYMQDRGAVLPIRVHTIVISVQHDEEVCLDEMRDALKEKVIKAVVPAKYLDEDTIYHLQPSGRFVIGGPQGDAGLTGRKIIVDTYGGWGAHGGGAFSGKDYTKVDRSAAYAARWVAKSLVKGGLCRRVLVQVSYAIGVSHPLSISIFHYGTSQKSERELLEIVKKNFDLRPGVIVRDLDLKKPIYQRTAAYGHFGRDSFPWEVPKKLKY

SEQ ID NO: 756344 - protein, 291 aa, Homo sapiens
MTKEYQDLQHLDNEESDHHQLRKGPPPPQPLLQRLCSGPRLLLLSLGLSLLLLVVVCVIGSQNSQLQEELRGLRETFSNFTASTEAQVKGLSTQGGNVGRKMKSLESQLEKQQKDLSEDHSSLLLHVKQFVSDLRSLSCQMAALQGNGSERTCCPVNWVEHERSCYWFSRSGKAWADADNYCRLEDAHLVVVTSWEEQKFVQHHIGPVNTWMGLHDQNGPWKWVDGTDYETGFKNWRPEQPDDWYGHGLGGGEDCAHFTDDGRWNDDVCQRPYRWVCETELDKASQEPPLL

SEQ ID NO: 756345 - protein, 190 aa, Homo sapiens
MKSLESQLEKQQKDLSEDHSSLLLHVKQFVSDLRSLSCQMAALQGNGSERTCCPVNWVEHERSCYWFSRSGKAWADADNYCRLEDAHLVVVTSWEEQKFVQHHIGPVNTWMGLHDQNGPWKWVDGTDYETGFKNWRPEQPDDWYGHGLGGGEDCAHFTDDGRWNDDVCQRPYRWVCETELDKASQEPPLL

SEQ ID NO: 756346 - protein, 208 aa, Homo sapiens
MKSLESQLEKQQKDLSEDHSSLLLHVKQFVSDLRSLSCQMAALQGNGSERTCCPVNWVEHERSCYWFSRSGKAWADADNYCRLEDAHLVVVTSWEEQKFVQHHIGPVNTWMGLHDQELEAGAAGRLVRPRARRRRGLCPLHRRRPLERRRLPEALPLGLRDRAGQGQPGATSPLIYFFNASTCRRGPGLGIRPSGGLFCFLGNFHLGF

SEQ ID NO: 756347 - protein, 237 aa, Homo sapiens
MKSLESQLEKQQKDLSEDHSSLLLHVKQFVSDLRSLSCQMAALQGNGSERTCCPVNWVEHERSCYWFSRSGKAWADADNYCRLEDAHLVVVTSWEEQVRTRRVWEAGWPRRDHHPPSLSSEICPAPHRPCEHLDGPPRPRTGGRSSRTTGTATGSEEARTVPTSPTTAAGTTTSARGPTAGSARQSWTRPARSHLSFNLFLQCLDLPQGSGIGNPPIWGPLLLSREFSSRILREGEG

SEQ ID NO: 756348 - protein, 240 aa, Homo sapiens
KQFVSDLRSLSCQMAALQGNGKEASPARSLPPPFSGQRLAPAPRFSRSGSERTCCPVNWVEHERSCYWFSRSGKAWADADNYCRLEDAHLVVVTSWEEQVRTRRVWEAGWPRRDHHPPSLSSEICPAPHRPCEHLDGPPRPKRALEVGGRDGLRDGLQVSARPPSAWVRPPSRPGALGWGVWSDPPADPTSWGPQLALSPGNWRPEQPDDWYGHGLGGGEDCAHFTDDGRWNDDVCQRPY

SEQ ID NO: 756349 - protein, 291 aa, Homo sapiens; identical to SEQ ID NO: 756344

SEQ ID NO: 756350 - protein, 291 aa, Homo sapiens; identical to SEQ ID NO: 756344

SEQ ID NO: 756351 - protein, 248 aa, Homo sapiens
MKSLESQLEKQQKDLSEDHSSLLLHVKQFVSDLRSLSCQMAALQGNGSERTCCPVNWVEHERSCYWFSRSGKAWADADNYCRLEDAHLVVVTSWEEQVRTRRVWEAGWPRRDHHPPSLSSEICPAPHRPCEHLDGPPRPKRALEVGGRDGLRDGLQELEAGAAGRLVRPRARRRRGLCPLHRRRPLERRRLPEALPLGLRDRAGQGQPGATSPLIYFFNASTCRRGPGLGIRPSGGLFCFLGNFHLGF

SEQ ID NO: 756352 - protein, 291 aa, Homo sapiens; identical to SEQ ID NO: 756344

SEQ ID NO: 756353 - protein, 72 aa, Homo sapiens
GFRGLEGSAAAKMQLLQECLCYPKRNRCTKRRNEMLGDILSRKPANRLFPEDLLRLGQAAVYKSRTVLRFEL

SEQ ID NO: 756354 - protein, 415 aa, Homo sapiens
MGGHPQLRLVKALLLLGLNPVSASLQDQHCESLSLASNISGLQCNASVDLIGTCWPRSPAGQLVVRPCPAFFYGVRYNTTNNGYRECLANGSWAARVNYSECQEILNEEKKSKVHYHVAVIINYLGHCISLVALLVAFVLFLRLRSIRCLRNIIHWNLISAFILRNATWFVVQLTMSPEVHQSNVGWCRLVTAAYNYFHVTNFFWMFGEGCYLHTAIVLTYSTDRLRKWMFICIGWGVPFPIIVAWAIGKLYYDNEKCWFGKRPGVYTDYIYQGPMILVLLINFIFLFNIVRILMTKLRASTTSETIQYRKAVKATLVLLPLLGITYMLFFVNPGEDEVSRVVFIYFNSFLESFQGFFVSVFYCFLNSEVRSAIRKRWHRWQDKHSIRARVARAMSIPTSPTRVSFHSIKQSTAV

SEQ ID NO: 756355 - protein, 444 aa, Homo sapiens
MGGHPQLRLVKALLLLGLNPVSASLQDQHCESLSLASNISGLQCNASVDLIGTCWPRSPAGQLVVRPCPAFFYGVRYNTTNNGYRECLANGSWAARVNYSECQEILNEEKKSKVHYHVAVIINYLGHCISLVALLVAFVLFLRLRPGCTHWGDQADGALEVGAPWSGAPFQVRRSIRCLRNIIHWNLISAFILRNATWFVVQLTMSPEVHQSNVGWCRLVTAAYNYFHVTNFFWMFGEGCYLHTAIVLTYSTDRLRKWMFICIGWGVPFPIIVAWAIGKLYYDNEKCWFGKRPGVYTDYIYQGPMILVLLINFIFLFNIVRILMTKLRASTTSETIQYRKAVKATLVLLPLLGITYMLFFVNPGEDEVSRVVFIYFNSFLESFQGFFVSVFYCFLNSEVRSAIRKRWHRWQDKHSIRARVARAMSIPTSPTRVSFHSIKQSTAV

SEQ ID NO: 756356 - protein, 141 aa, Homo sapiens [sequence omitted]

SEQ ID NO: 756357 - protein, 375 aa, Homo sapiens
MGGHPQLRLVKALLLLGLNPVSASLQDQHCESLSLASNISDNGYRECLANGSWAARVNYSECQEILNEEKKSKVHYHVAVIINYLGHCISLVALLVAFVLFLRLRSIRCLRNIIHWNLISAFILRNATWFVVQLTMSPEVHQSNVGWCRLVTAAYNYFHVTNFFWMFGEGCYLHTAIVLTYSTDRLRKWMFICIGWGVPFPIIVAWAIGKLYYDNEKCWFGKRPGVYTDYIYQGPMILVLLINFIFLFNIVRILMTKLRASTTSETIQYRKAVKATLVLLPLLGITYMLFFVNPGEDEVSRVVFIYFNSFLESFQGFFVSVFYCFLNSEVRSAIRKRWHRWQDKHSIRARVARAMSIPTSPTRVSFHSIKQSTAV

SEQ ID NO: 756358 - protein, 401 aa, Homo sapiens
MGGHPQLRLVKALLLLGLNPVSASLQDQHCESLSLASNISGLQCNASVDLIGTCWPRSPAGQLVVRPCPAFFYGVRYNTTNNGYRECLANGSWAARVNYSECQEILNEEKKSKVHYHVAVIINYLGHCISLVALLVAFVLFLRLRSIRCLRNIIHWNLISAFILRNATWFVVQLTMSPEVHQSNVGWCRLVTAAYNYFHVTNFFWMFGEGCYLHTAIVLTYSTDRLRKWMFICIGWGVPFPIIVAWAIGKLYYDNEKCWFGKRPGVYTDYIYQGPMILVLLINFIFLFNIVRILMTKLRASTTSETIQYRKAVKATLVLLPLLGITYMLFFVNPGEDEVSRVVFIYFNSFLESFQVRSAIRKRWHRWQDKHSIRARVARAMSIPTSPTRVSFHSIKQSTAV

SEQ ID NO: 756359 - protein, 475 aa, Homo sapiens
MQKSTNSDTSVETLNSTRQGTGAVQMRIKNANSHHDRLSQSKSMILTDVGKVTEPISRHRRNHSQHILKDVIPPLEQLMVEKEGYLQKAKIADGGKKLRKNWSTSWIVLSSRRIEFYKESKQQALSNMKTGHKPESVDLCGAHIEWAKEKSSRKNVFQITTVSGNEFLLQSDIDFIILDWFHAIKNAIDRLPKDSSCPSRNLELFKIQRSSSTELLSHYDSDIKEQKPEHRKSLMFRLHHSASDTSDKNRVKSRLKKFITRRPSLKTLQEKGLIKDQIFGSHLHKVCERENSTVPWFVKQCIEAVEKRGLDVDGIYRVSGNLATIQKLRFIVNQEEKLNLDDSQWEDIHVVTGALKMFFRELPEPLFPYSFFEQFVEAIKKQDNNTRIEAVKSLVQKLPPPNRDTMKVLFGHLTKIVAKASKNLMSTQSLGIVFGPTLLRAENETGNMAIHMVYQNQIAELMLSEYSKIFGSEED

SEQ ID NO: 756360 - protein, 152 aa, Homo sapiens
WGTGRLVLCKQEEKLNLDDSQWEDIHVVTGALKMFFRELPEPLFPYSFFEQFVEAIKKQDNNTRIEAVKSLVQKLPPPNRDTMKVLFGHLTKIVAKASKNLMSTQSLGIVFGPTLLRAENETGNMAIHMVYQNQIAELMLSEYSKIFGSEED

SEQ ID NO: 756361 - protein, 274 aa, Homo sapiens
MQKSTNSDTSVETLNSTRQGTGAVQMRIKNANSHHDRLSQSKSMILTDVGKVTEPISRHRRNHSQHILKDVIPPLEQLMVEKEGYLQKAKIADGGKKLRKNWSTSWIVLSSRRIEFYKESKQQALSNMKTGHKPESVDLCGAHIEWAKEKSSRKNVFQITTVSGNEFLLQSDIDFIILDWFHAIKNAIDRLPKDSSCPSRNLELFKIQRSSSTELLSHYDSDIKEQKPEHRKSLMFRLHHSASDTSDKNRVKSRLKKFITPKTFPENSARKRTY

SEQ ID NO: 756362 - protein, 348 aa, Homo sapiens
MKTGHKPESVDLCGAHIEWAKEKSSRKNVFQITTVSGNEFLLQSDIDFIILDWFHAIKNAIDRLPKDSSCPSRNLELFKIQRSSSTELLSHYDSDIKEQKPEHRKSLMFRLHHSASDTSDKNRVKSRLKKFITRRPSLKTLQEKGLIKDQIFGSHLHKVCERENSTVPWFVKQCIEAVEKRGLDVDGIYRVSGNLATIQKLRFIVNQEEKLNLDDSQWEDIHVVTGALKMFFRELPEPLFPYSFFEQFVEAIKKQDNNTRIEAVKSLVQKLPPPNRDTMKVLFGHLTKIVAKASKNLMSTQSLGIVFGPTLLRAENETGNMAIHMVYQNQIAELMLSEYSKIFGSEED

SEQ ID NO: 756363 - protein, 404 aa, Homo sapiens
MEEMKNEAETTSMVSMPLYAVMYPVFNEKNWSTSWIVLSSRRIEFYKESKQQALSNMKTGHKPESVDLCGAHIEWAKEKSSRKNVFQITTVSGNEFLLQSDIDFIILDWFHAIKNAIDRLPKDSSCPSRNLELFKIQRSSSTELLSHYDSDIKEQKPEHRKSLMFRLHHSASDTSDKNRVKSRLKKFITRRPSLKTLQEKGLIKDQIFGSHLHKVCERENSTVPWFVKQCIEAVEKRGLDVDGIYRVSGNLATIQKLRFIVNQEEKLNLDDSQWEDIHVVTGALKMFFRELPEPLFPYSFFEQFVEAIKKQDNNTRIEAVKSLVQKLPPPNRDTMKVLFGHLTKIVAKASKNLMSTQSLGIVFGPTLLRAENETGNMAIHMVYQNQIAELMLSEYSKIFGSEED

SEQ ID NO: 756364 - protein, 119 aa, Homo sapiens
MFFRELPEPLFPYSFFEQFVEAIKKQDNNTRIEAVKSLVQKLPPPNRDTMKVLFGHLTKIVAKASKNLMSTQSLGIVFGPTLLRAENETGNMAIHMVYQNQIAELMLSEYSKIFGSEED

SEQ ID NO: 756365 - protein, 119 aa, Homo sapiens; identical to SEQ ID NO: 756364

SEQ ID NO: 756366 - protein, 475 aa, Homo sapiens; identical to SEQ ID NO: 756359

SEQ ID NO: 756367 - protein, 274 aa, Homo sapiens; identical to SEQ ID NO: 756361

SEQ ID NO: 756368 - protein, 274 aa, Homo sapiens; identical to SEQ ID NO: 756361

SEQ ID NO: 756369 - protein, 239 aa, Homo sapiens
MQKSTNSDTSVETLNSTRQGTGAVQMRIKNANSHHDRLSQSKSMILTDVGKVTEPISRHRRNHSQHILKDVIPPLEQLMVEKEGYLQKAKIADGGKKLRKNWSTSWIVLSSRRIEFYKESKQQALSNMKTGHKPESVDLCGAHIEWAKEKSSRKNVFQITTVSGNEFLLQSDIDFIILDWFHAIKNAIDRLPKDSSCPSRNLELFKIQRSSSTELLSHYDSDIKEQKPEHRKSLSEYFL

SEQ ID NO: 756370 - protein, 153 aa, Homo sapiens
MRPGTALQAVLLAVLLVGLRAATGRLLSGECARWGGGWCRGGLTAPQLLLTLFWVATYGTRRPSHAPLPDAALRSLLRSGGSRTASETHASSRSCAVPCASWNARSPFPVQSYGGGLENVGEVGQWANLPQWVPLRPAPLHASNQSLGPPPRG

SEQ ID NO: 756371 - protein, 374 aa, Homo sapiens
MRPGTALQAVLLAVLLVGLRAATGRLLSGQPVCRGGTQRPCYKVIYFHDTSRRLNFEEAKEACRRDGGQLVSIESEDEQKLIEKFIENLLPSDGDFWIGLRRREEKQSNSTACQDLYAWTDGSISQFRNWYVDEPSCGSEVCVVMYHQPSAPAGIGGPYMFQWNDDRCNMKNNFICKYSDEKPAVPSREAEGEETELTTPVLPEETQEEDAKKTFKESREAALNLAYILIPSIPLLLLLVVTTVVCWVWICRKRKREQPDPSTKKQHTIWPSPHQGNSPDLEVYNVIRKQSEADLAETRPDLKNISFRVCSGEATPDDMSCDYDNMAVNPSESGFVTLVSVESGFVTNDIYEFSPDQMGRSKESGWVENEIYGY

SEQ ID NO: 756372 - protein, 348 aa, Homo sapiens
MRPGTALQAVLLAVLLVGLRAATGRLLSGQPVCRGGTQRPCYKVIYFHDTSRRLNFEEAKEACRRDGGQLVSIESEDEQKLIEKFIENLLPSDGDFWIGLRRREEKQSNSTACQDLYAWTDGSISQFRNWYVDEPSCGSEVCVVMYHQPSAPAGIGGPYMFQWNDDRCNMKNNFICKYSDEKPAVPSREAEGEETELTTPVLPEETQEEDAKKTFKESREAALNLAYILIPSIPLLLLLVVTTVVCWVWICRKRKREQPDPSTKKQHTIWPSPHQGNSPDLEVYNVIRKQSEADLAETRPDLKNISFRVCSGEATPDDMSCDYDNMAVNPSESGFVTLVSVENEIYGY

SEQ ID NO: 756373 - protein, 382 aa, Homo sapiens
MRPGTALQAVLLAVLLVGLRAATGRLLSASDLDLRGGQPVCRGGTQRPCYKVIYFHDTSRRLNFEEAKEACRRDGGQLVSIESEDEQKLIEKFIENLLPSDGDFWIGLRRREEKQSNSTACQDLYAWTDGSISQFRNWYVDEPSCGSEVCVVMYHQPSAPAGIGGPYMFQWNDDRCNMKNNFICKYSDEKPAVPSREAEGEETELTTPVLPEETQEEDAKKTFKESREAALNLAYILIPSIPLLLLLVVTTVVCWVWICRKRKREQPDPSTKKQHTIWPSPHQGNSPDLEVYNVIRKQSEADLAETRPDLKNISFRVCSGEATPDDMSCDYDNMAVNPSESGFVTLVSVESGFVTNDIYEFSPDQMGRSKESGWVENEIYGY

SEQ ID NO: 756374 - protein, 229 aa, Homo sapiens
MVTSGLGSGGVRRNKAIAQPARTFMLGLMAAYHNLEKPAVPSREAEGEETELTTPVLPEETQEEDAKKTFKESREAALNLAYILIPSIPLLLLLVVTTVVCWVWICRKRKREQPDPSTKKQHTIWPSPHQGNSPDLEVYNVIRKQSEADLAETRPDLKNISFRVCSGEATPDDMSCDYDNMAVNPSESGFVTLVSVESGFVTNDIYEFSPDQMGRSKESGWVENEIYGY

SEQ ID NO: 756375 - protein, 374 aa, Homo sapiens; identical to SEQ ID NO: 756371

SEQ ID NO: 756376 - protein, 536 aa, Homo sapiens
MSRPPREAVVKSWLAASSPPRARVRHEARATPPHPSPGDWPCVGHFLTAGPPGRAGQPGGRAAWQSLRMDPLGDTLRRLREAFHAGRTRPAEFRAAQLQGLGRFLQENKQLLHDALAQDLHKSAFESEVSEVAISQGEVTLALRNLRAWMKDERVPKNLATQLDSAFIRKEPFGLVLIIAPWNYPLNLTLVPLVGALAAGNCVVLKPSEISKNVEKILAEVLPQYVDQSCFAVVLGGPQETGQLLEHRFDYIFFTGSPRVGKIVMTAAAKHLTPVTLELGGKNPCYVDDNCDPQTVANRVAWFRYFNAGQTCVAPDYVLCSPEMQERLLPALQSTITRFYGDDPQSSPNLGRIINQKQFQRLRALLGCGRVAIGGQSDESDRYIAPTVLVDVQEMEPVMQEEIFGPILPIVNVQSLDEAIEFINRREKPLALYAFSNSSQVVKRVLTQTSSGGFCGNDGFMHMTLASLPFGGVGASGMGRYHGKFSFDTFSHHRACLLRSPGMEKLNALRYPPQSPRRLRMLLVAMEAQGCSCTLL

SEQ ID NO: 756377 - protein, 831 aa, Homo sapiens
MSAPFLPTLFPEPVGTHSEHPGWHSAQHMGTCVLFLEARGLERKWLVLPWPPGQRKQPLSSSPNDVATPPHPRSCRSGPNAPQPVMGGHAPETLGPISPWTSVAQPQEARGSLRPHNLSSVGSGSNSEEGGRGNGIQTARDLPSPVTPPTAGLPESTQPWVLPSRPQPSVPSPKDLAAHPQGTVREVGAEVDSLLLFWIWVFQCEELGGIRQALALSEASASISFSGVNSGPSVGGRGGEMSEGRHGDHTPYNLTLWDECRWGWAWGTPAQCLIQEFPILCVHNGCPAPSGDNRPRIPPISGRRRPWLLRLPGSCPGHSLGASVQSELTRRGNARAGCPVGEMCPVALVSWFQQLLGGLLECSLQNSIPHRAPGPQSTIHVTCLAFLWFLQRFLQRVREAQAWFAFDHWQKSEGESRMEKDPGECGVEGDKYLQATYKTPRADLCRVLSVGTTANVLCSVMSFNPHNDTRCHYHPHFTDEETEAEKVSDLPKVPQPVRGRALETGLMVAREARSWLLGLSPAPVTSHPLWGPWCLSCVRATAQLLPIRAGRWWVQPGPTITPAEGWPGAPDQALSSTLVQQGHPADRSRSRPQGGHLTITHSLALTDAGPWAQNRLCGLIISWQVPSLHREHERLQALGLKEVGTEGPASQSNEGEIREMWTGLGGGKSVTRHLSHGTTQNAGEQSQGATVTVDEGIIWVGCLEEASAKLDLEERDSEREGGKGHHGSLAPGRGTSASECSSDELQVNRQGSGECLGPYPACQLWLAPARRQERPLPSALIPPPAFPSQLQERGPTKAAVAQNIQPGPSLWTWSPPCPHPQQAASAQRHVH

SEQ ID NO: 756378 - protein, 115 aa, Homo sapiens
MKDERVPKNLATQLDSAFIRKEPFGLVLIIAPWNYPLNLTLVPLVGALAAGNCVVLKPSEISKNVEKILAEVLPQYVDQSCFAVVLGGPQETGQLLEHRFDYIFFTALPWLLLSF

SEQ ID NO: 756379 - protein, 499 aa, Homo sapiens
MSRPPREAVVKSWLAASSPPRARVRHEARATPPHPSPGDWPCVGHFLTAGPPGRAGQPGGRAAWQSLRMDPLGDTLRRLREAFHAGRTRPAEFRAAQLQGLGRFLQENKQLLHDALAQDLHKATQLDSAFIRKEPFGLVLIIAPWNYPLNLTLVPLVGALAAGNCVVLKPSEISKNVEKILAEVLPQYVDQSCFAVVLGGPQETGQLLEHRFDYIFFTGSPRVGKIVMTAAAKHLTPVTLELGGKNPCYVDDNCDPQTVANRVAWFRYFNAGQTCVAPDYVLCSPEMQERLLPALQSTITRFYGDDPQSSPNLGRIINQKQFQRLRALLGCGRVAIGGQSDESDRYIAPTVLVDVQEMEPVMQEEIFGPILPIVNVQSLDEAIEFINRREKPLALYAFSNSSQVVKRVLTQTSSGGFCGNDGFMHMTLASLPFGGVGASGMGRYHGKFSFDTFSHHRACLLRSPGMEKLNALRYPPQSPRRLRMLLVAMEAQGCSCTLL

SEQ ID NO: 756380 - protein, 431 aa, Homo sapiens
MDPLGDTLRRLREAFHAGRTRPAEFRAAQLQGLGRFLQENKQLLHDALAQDLHKATQLDSAFIRKEPFGLVLIIAPWNYPLNLTLVPLVGALAAGNCVVLKPSEISKNVEKILAEVLPQYVDQSCFAVVLGGPQETGQLLEHRFDYIFFTGSPRVGKIVMTAAAKHLTPVTLELGGKNPCYVDDNCDPQTVANRVAWFRYFNAGQTCVAPDYVLCSPEMQERLLPALQSTITRFYGDDPQSSPNLGRIINQKQFQRLRALLGCGRVAIGGQSDESDRYIAPTVLVDVQEMEPVMQEEIFGPILPIVNVQSLDEAIEFINRREKPLALYAFSNSSQVVKRVLTQTSSGGFCGNDGFMHMTLASLPFGGVGASGMGRYHGKFSFDTFSHHRACLLRSPGMEKLNALRYPPQSPRRLRMLLVAMEAQGCSCTLL

SEQ ID NO: 756381 - protein, 536 aa, Homo sapiens; identical to SEQ ID NO: 756376

SEQ ID NO: 756382 - protein, 272 aa, Homo sapiens
MTAAAKHLTPVTLELGGKNPCYVDDNCDPQTVANRVAWFRYFNAGQTCVAPDYVLCSPEMQERLLPALQSTITRFYGDDPQSSPNLGRIINQKQFQRLRALLGCGRVAIGGQSDESDRYIAPTVLVDVQEMEPVMQEEIFGPILPIVNVQSLDEAIEFINRREKPLALYAFSNSSQVVKRVLTQTSSGGFCGNDGFMHMTLASLPFGGVGASGMGRYHGKFSFDTFSHHRACLLRSPGMEKLNALRYPPQSPRRLRMLLVAMEAQGCSCTLL

SEQ ID NO: 756383 - protein, 298 aa, Homo sapiens
MSRPPREAVVKSWLAASSPPRARVRHEARATPPHPSPGDWPCVGHFLTAGPPGRAGQPGGRAAWQSLRMDPLGDTLRRLREAFHAGRTRPAEFRAAQLQGLGRFLQENKQLLHDALAQDLHKSAFESEVSEVAISQGEVTLALRNLRAWMKDERVPKNLATQLDSAFIRKEPFGLVLIIAPWNYPLNLTLVPLVGALAAGNCVVLKPSEISKNVEKILAEVLPQYVDQSCFAVVLGGPQETGQLLEHRFDYIFFTGSPRVGKIVMTAAAKHPSKQRLPPPSWVFPLPASASSLSRSQP

SEQ ID NO: 756384 - protein, 536 aa, Homo sapiens; identical to SEQ ID NO: 756376

SEQ ID NO: 756385 - protein, 123 aa, Homo sapiens
MTAVACGWWRRGLGSRARGGKGLPRLQGTPQSSACLLPPGSSLSLPQPPPSAAPNHESRGGRHGKQCSDSPPAPAPTTHIQEKRTDTAPLSHPSPVERASEGPWHLTQATPWNHCIQGHSCPL

SEQ ID NO: 756386 - protein, 136 aa, Homo sapiens [sequence omitted]

SEQ ID NO: 756387 - protein, 136 aa, Homo sapiens [sequence omitted]

SEQ ID NO: 756388 - protein, 409 aa, Homo sapiens
MSLHAWEWEEDPASIEPISSITSFYQSTSECDVEEHLKAKARAQESDSDRPCSSIESSSEPASTFSSDVPHVVPCKFTISLAFPVNMGQKGKYASLIEKYKKHPKTDSSVTKMRRFYHIEYFLLPDDEEPKKVDILLFPMVAKVFLESGVKTVKPWHEGDKAWVSWEQTFNITVTKELLKKINFHKITLRLWNTKDKMSRKVRYYRLKTAGFTDDVGAFHKSEVRHLVLNQRKLSEQGIENTNIVREESNQEHPPGKQEKTEKHPKSLQGSHQAEPETSSKNSEEYEKSLKMDDSSTIQWSVSRTPTISLAGASMMEIKELIESESLSSLTNILDRQRSQIKGKDSEGRRKIQRRHKKPLAEEEADPTLTGPRKQSAFSIQLAVMPLLAGTHCLPCSQQLLLVLWPERP

SEQ ID NO: 756389 - protein, 297 aa, Homo sapiens
MRRFYHIEYFLLPDDEEPKKVDILLFPMVAKVFLESGVKTVKPWHEGDKAWVSWEQTFNITVTKELLKKINFHKITLRLWNTKDKMSRKVRYYRLKTAGFTDDVGAFHKSEVRHLVLNQRKLSEQGIENTNIVREESNQEHPPGKQEKTEKHPKSLQGSHQAEPETSSKNSEEYEKSLKMDDSSTIQWSVSRTPTISLAGASMMEIKELIESESLSSLTNILDRQRSQIKGKDSEGRRKIQRRHKKPLAEEEADPTLTGPRKQSAFSIQLAVMPLLAGTHCLPCSQQLLLVLWPERP

SEQ ID NO: 756390 - protein, 109 aa, Homo sapiens
MGLRPSLHRRTLLSVLESLRPGGCGSGTGVAAAVQLPAAAQRIRSSSLPVPTACPVPSSSCLSCGQNGHKRMLLMTTLLRATSFHPHSHLRKLRGIGFIVQGETKAQRG

SEQ ID NO: 756391 - protein, 152 aa, Homo sapiens
IVAGQRCIKKLTDNQTSTMIRATARSAPDRQEEISKLMRSASFNTDPYVREFGIMVKDEMTDVTGRVLQPPSILYGGRNKAIATPVQGVWDMRNKQFHTGIEIKVWAIACFAPQRQCTEVHLKSFTEQLRKISRDAGMPIQGQPCFCKYAQG

SEQ ID NO: 756392 - protein, 149 aa, Homo sapiens
LSGWGGRLNSHSESSPPKLRGFLTFLFREPQKYNADYDLSAQQGADTLAFMSLLEEKLIPVLVHTFWIDTKNYVEVTRKWYAEAMPFPLNFFLPGRMQRQYMERLQLLTGEHRPEDEEELEKELYREARECLTLLSQRLGSQKFFFGDA

SEQ ID NO: 756393 - protein, 87 aa, Homo sapiens
WGWLQRALGTIEMAASQLPSLLQPGTAALAQACGMFQKLKCPLSGPYPSLEHNGLCLKGSGFVIPQVSQRINSFRGCPSAAPIHGYF

SEQ ID NO: 756394 - protein, 917 aa, Homo sapiens
MIASHLLAYFFTELNHDQVQKVDQYLYHMRLSDETLLEISKRFRKEMEKGLGATTHPTAAVKMLPTFVRSTPDGTEHGEFLALDLGGTNFRVLWVKVTDNGLQKVEMENQIYAIPEDIMRGSGTQLFDHIAECLANFMDKLQIKDKKLPLGFTFSFPCHQTKLDESFLVSWTKGFKSSGVEGRDVVALIRKAIQRRGDFDIDIVAVVNDTVGTMMTCGYDDHNCEIGLIVGTGSNACYMEEMRHIDMVEGDEGRMCINMEWGAFGDDGSLNDIRTEFDQEIDMGSLNPGKQLFEKMISGMYMGELVRLILVKMAKEELLFGGKLSPELLNTGRFETKDISDIEGEKDGIRKAREVLMRLGLDPTQEDCVATHRICQIVSTRSASLCAATLAAVLQRIKENKGEERLRSTIGVDGSVYKKHPHFAKRLHKTVRRLVPGCDVRFLRSEDGSGKGAAMVTAVAYRLADQHRARQKTLEHLQLSHDQLLEVKRRMKVEMERGLSKETHASAPVKMLPTYVCATPDGTEKGDFLALDLGGTNFRVLLVRVRNGKWGGVEMHNKIYAIPQEVMHGTGDELFDHIVQCIADFLEYMGMKGVSLPLGFTFSFPCQQNSLDESILLKWTKGFKASGCEGEDVVTLLKEAIHRREEFDLDVVAVVNDTVGTMMTCGFEDPHCEVGLIVGTGSNACYMEEMRNVELVEGEEGRMCVNMEWGAFGDNGCLDDFRTEFDVAVDELSLNPGKQRFEKMISGMYLGEIVRNILIDFTKRGLLFRGRISERLKTRGIFETKFLSQIESDCLALLQVRAILQHLGLESTCDDSIIVKEVCTVVARRAAQLCGAGMAAVVDRIRENRGLDALKVTVGVDGTLYKLHPHFAKVMHETVKDLAPKCDVSFLQSEDGSGKGAALITAVACRIREAGQR

SEQ ID NO: 756395 - protein, 917 aa, Homo sapiens; identical to SEQ ID NO: 756394

SEQ ID NO: 756396 - protein, 653 aa, Homo sapiens
MIASHLLAYFFTELNHDQVQKVDQYLYHMRLSDETLLEISKRFRKEMEKGLGATTHPTAAVKMLPTFVRSTPDGTEHGEFLALDLGGTNFRVLWVKVTDNGLQKVEMENQIYAIPEDIMRGSGTQLFDHIAECLANFMDKLQIKDKKLPLGFTFSFPCHQTKLDESFLVSWTKGFKSSGVEGRDVVALIRKAIQRRGDFDIDIVAVVNDTVGTMMTCGYDDHNCEIGLIVGTGSNACYMEEMRHIDMVEGDEGRMCINMEWGAFGDDGSLNDIRTEFDQEIDMGSLNPGKQLFEKMISGMYMGELVRLILVKMAKEELLFGGKLSPELLNTGRFETKDISDIEGEKDGIRKAREVLMRLGLDPTQEDCVATHRICQIVSTRSASLCAATLAAVLQRIKENKGEERLRSTIGVDGSVYKKHPHFAKRLHKTVRRLVPGCDVRFLRSEDGSGKGAAMVTAVAYRLADQHRARQKTLEHLQLSHDQLLEVKRRMKVEMERGLSKETHASAPVKMLPTYVCATPDGTEKGDFLALDLGGTNFRVLLVRVRNGKWGGVEMHNKIYAIPQEVMHGTGDELFDHIVQCIADFLEYMGMKGVSLPLGFTFSFPCQQNSLDESILLKWTKGFKASGCEGEDVVTLLKEAIHRREVGDTWHEV

SEQ ID NO: 756397 - protein, 917 aa, Homo sapiens; identical to SEQ ID NO: 756394

SEQ ID NO: 756398 - protein, 134 aa, Homo sapiens
LYCPGEYRDDCLALLQVRAILQHLGLESTCDDSIIVKEVCTVVARRAAQLCGAGMAAVVDRIRENRGLDALKVTVGVDGTLYKLHPHFAKVMHETVKDLAPKCDVSFLQSEDGSGKGAALITAVACRIREAGQR

SEQ ID NO: 756399 - protein, 917 aa, Homo sapiens; identical to SEQ ID NO: 756394

SEQ ID NO: 756400 - protein, 917 aa, Homo sapiens; identical to SEQ ID NO: 756394

SEQ ID NO: 756401 - protein, 256 aa, Homo sapiens
MMTCGFEDPHCEVGLIVGTGSNACYMEEMRNVELVEGEEGRMCVNMEWGAFGDNGCLDDFRTEFDVAVDELSLNPGKQRFEKMISGMYLGEIVRNILIDFTKRGLLFRGRISERLKTRGIFETKFLSQIESDCLALLQVRAILQHLGLESTCDDSIIVKEVCTVVARRAAQLCGAGMAAVVDRIRENRGLDALKVTVGVDGTLYKLHPHFAKVMHETVKDLAPKCDVSFLQSEDGSGKGAALITAVACRIREAGQR

SEQ ID NO: 756402 - protein, 917 aa, Homo sapiens; identical to SEQ ID NO: 756394

SEQ ID NO: 756403 - protein, 108 aa, Homo sapiens
SPKLEYCGIIPAHCSLDLLGSDDLPVSASQVAGTTGTHLAKFLEIQVLPYCPGWSQTPEFKRSSQLGFPKCWGYRHEPPCPARKYLLNCIGTSRNISQTKQDLMKRTP

SEQ ID NO: 756404 - protein, 480 aa, Homo sapiens [sequence omitted]

SEQ ID NO: 756405 - protein, 452 aa, Homo sapiens
MAGGGGDLSTRRLNECISPVANEMNHLPAHSHDLQRMFTEDQGVDDRLLYDIVFKHFKRNKVEISNAIKKTFPFLEGLRDRDLITNKMFEDSQDSCRNLVPVQRVVYNVLSELEKTFNLPVLEALFSDVNMQEYPDLIHIYKGFENVIHDKLPLQESEEEEREERSGLQLSLEQGTGENSFRSLTWPPSGSPSHAGTTPPENGLSEHPCETEQINAKRKDTTSDKDDSLGSQQTNEQCAQKAEPTESCEQIAVQVNNGDAGREMPCPLPCDEESPEAELHNHGIQINSCSVRLVDIKKEKPFSNSKVECQAQARTHHNQASDIIVISSEDSEGSTDVDEPLEVFISAPRSEPVINNDNPLESNDEKEGQEATCSRPQIVPEPMDFRKLSTFRESFKKRVIGQDHDFSESSEEEAPAEASSGALRSKHGEKAPVTSRSTSTWRIPSRKRRKSN

SEQ ID NO: 756406 - protein, 522 aa, Homo sapiens
MAGGGGDLSTRRLNECISPVANEMNHLPAHSHDLQRMFTEDQGVDDRLLYDIVFKHFKRNKVEISNAIKKTFPFLEGLRDRDLITNKMFEDSQDSCRNLVPVQRVVYNVLSELEKTFNLPVLEALFSDVNMQEYPDLIHIYKGFENVIHDKLPLQESEEEEREERSGLQLSLEQGTGENSFRSLTWPPSGSPSHAGTTPPENGLSEHPCETEQINAKRKDTTSDKDDSLGSQQTNEQCAQKAEPTESCEQIAVQVNNGDAGREMPCPLPCDEESPEAELHNHGIQINSCSVRLVDIKKEKPFSNSKVECQAQARTHHNQASDIIVISSEDSEGSTDVDEPLEVFISAPRSEPVINNDNPLESNDEKEGQEATCSRPQIVPEPMDFRKLSTFRESFKKRVIGQDHDFSESSEEEAPAEASSGALRSKHGEKAPVTSRSTSTWRIPSRKRRFSSSDFSDLSNGEELQETCSSSLRRGSGVPRSQEARTESSQASDMMDTMDVENNSTLEKHSGKRNGVLLRGPD

SEQ ID NO: 756407 - protein, 452 aa, Homo sapiens; identical to SEQ ID NO: 756405

SEQ ID NO: 756408 - protein, 211 aa, Homo sapiens
FRTHASDQASDIIVISSEDSEGSTDVDEPLEVFISAPRSEPVINNDNPLESNDEKEGQEATCSRPQIVPEPMDFRKLSTFRESFKKRVIGQDHDFSESSEEEAPAEASSGALRSKHGEKAPVTSRSTSTWRIPSRKRRFSSSDFSDLSNGEELQETCSSSLRRGSGVPRSQEARTESSQASDMMDTMDVENNSTLEKHSGKRNGVLLRGPD

SEQ ID NO: 756409 - protein, 452 aa, Homo sapiens
MAGGGGDLSTRRLNECISPVANEMNHLPAHSHDLQRMFTEDQGVDDRLLYDIVFKHFKRNKVEISNAIKKTFPFLEGLRDRDLITNKMFEDSQDSCRNLVPVQRVVYNVLSELEKTFNLPVLEALFSDVNMQEYPDLIHIYKGFENVIHDKLPLQESEEEEREERSGLQLSLEQGTGENSFRSLTWPPSGSPSHAGTTPPENGLSEHPCETEQINAKRKDTTSDKDDSLGSQQTNEQCAQKAEPTGPEAELHNHGIQINSCSVRLVDIKKEKPFSNSKVECQAQARTHHNQASDIIVISSEDSEGSTDVDEPLEVFISAPRSEPVINNDNPLESNDEKEGQEATCSRPQIVPEPMDFRKLSTFRESFKKRVIGQDHDFSESSEEEAPAEASSGALRSKHGEKAPVTSRSTSTWRIPSRKRRFSSSDFSDLSNGEELQETCSSSLRRGSGKED

SEQ ID NO: 756410 - protein, 542 aa, Homo sapiens
MAGGGGDLSTRRLNECISPVANEMNHLPAHSHDLQRMFTEDQGVDDRLLYDIVFKHFKRNKVEISNAIKKTFPFLEGLRDRDLITNKMFEDSQDSCRNLVPVQRVVYNVLSELEKTFNLPVLEALFSDVNMQEYPDLIHIYKGFENVIHDKLPLQESEEEEREERSGLQLSLEQGTGENSFRSLTWPPSGSPSHAGTTPPENGLSEHPCETEQINAKRKDTTSDKDDSLGSQQTNEQCAQKAEPTESCEQIAVQVNNGDAGREMPCPLPCDEESPEAELHNHGIQINSCSVRLVDIKKEKPFSNSKVECQAQARTHHNQASDIIVISSEDSEGSTDVDEPLEVFISAPRSEPVINNDNPLESNDEKEGQEATCSRPQIVPEPMDFRKLSTFRESFKKRVIGQDHDFSESSEEEAPAEASSGALRSKHGEKAPVTSRSTSTWRIPSRKRRFSSSDFSDLSNGEELQETCSSSLRRGSGSQPQEPENKKCSCVMCFPKGVPRSQEARTESSQASDMMDTMDVENNSTLEKHSGKRNGVLLRGPD

SEQ ID NO: 756411 - protein, 240 aa, Homo sapiens
STSIVECPDHARSHHIQACDMIVISSEDSEGSTDVDEPLEVFISAPRSEPVINNDNPLESNDEKEGQEATCSRPQIVPEPMDFRKLSTFRESFKKRVIGQDHDFSESSEEEAPAEASSGALRSKHGEKAPVTSRSTSTWRIPSRKRRFSSSDFSDLSNGEELQETCSSSLRRGSGSQPQEPENKKCSCVMCFPKGVPRSQEARTESSQASDMMDTMDVENNSTLEKHSGKRNGVLLRGPD

SEQ ID NO: 756412 - protein, 428 aa, Homo sapiens
MQELHLLWWALLLGLAQACPEPCDCGEKYGFQIADCAYRDLESVPPGFPANVTTLSLSANRLPGLPEGAFREVPLLQSLWLAHNEIRTVAAGALASLSHLKSLDLSHNLISDFAWSDLHNLSALQLLKMDSNELTFIPRDAFRSLRALRSLQLNHNRLHTLAEGTFTPLTALSHLQINENPFDCTCGIVWLKTWALTTAVSIPEQDNIACTSPHVLKGTPLSRLPPLPCSAPSVQLSYQPSQDGAELRPGFVLALHCDVDGQPAPQLHWHIQIPSGIVEITSPNVGTDGRALPGTPVASSQPRFQAFANGSLLIPDFGKLEEGTYSCLATNELGSAESSVDVALATPGEGGEDTLGRRFHGKAVEGKGCYTVDNEVQPSGPEDNVVIIYLSRAGNPEAAVAEGVPGQLPPGLLLLGQSLLLFFFLTSF

SEQ ID NO: 756413 - protein, 428 aa, Homo sapiens; identical to SEQ ID NO: 756412

SEQ ID NO: 756414 - protein, 428 aa, Homo sapiens; identical to SEQ ID NO: 756412

SEQ ID NO: 756415 - protein, 492 aa, Homo sapiens
MQELHLLWWALLLGLAQACPEPCDCGEKYGFQIADCAYRDLESVPPGFPANVTTLSLSANRLPGLPEGAFREVPLLQSLWLAHNEIRTVAAGALASLSHLKSLDLSHNLISDFAWSDLHNLSALQLLKMDSNELTFIPRDAFRSLRALRSLQLNHNRLHTLAEGTFTPLTALSHLQINENPFDCTCGIVWLKTWALTTAVSIPEQDNIACTSPHVLKGTPLSRLPPLPCSAPSVQLSYQPSQDGAELRPGFVLALHCDVDGQPAPQLHWHIQIPSGIVEITSPNVGTDGRALPGTPVASSQPRFQAFANGSLLIPDFGKLEEGTYSCLATNELGSAESSVDVALATPGEGGEDTLGRRFHGKAVEGKGCYTVDNEVQPSGPEDNVVIIYLSRAGNPEAAVAEGVPGQLPPGLLLLGQSLLLFFFLLPPLCCPPLCCPSTEEVWGIGSGGMWVSTHREAHRDEPLGIPCWRLVEGCAHLPCFPSSVPPLWYLR

SEQ ID NO: 756416 - protein, 268 aa, Homo sapiens
MQELHLLWWALLLGLAQACPEPCDCGEKYGFQIADCAYRDLESVPPGFPANVTTLSLSANRLPGLPEGAFREVPLLQSLWLAHNEIRTVAAGALASLSHLKSLDLSHNLISDFAWSDLHNLSALQLLKMDSNELTFIPRDAFRSLRALRSLQLNHNRLHTLAEGTFTPLTALSHLQINENPFDCTCGIVWLKTWALTTAVSIPEQDNIACTSPHVLKGTPLSRLPPLPCSAPSVQLSYQPSQDGAERTGPLGRDCTDCFKKMADKPDM

SEQ ID NO: 756417 - protein, 149 aa, Homo sapiens
MQELHLLWWALLLGLAQACPEPCDCGEKYGFQIADCAYRDLESVPPGFPANVTTLSLSANRLPGLPEGAFREVPLLQSLWLAHNEIRTVAAGALASLSHLKSLDLSHNLISDFAWSDLHNLSALQLLKMDSNELTFIPRDAEQKVDAEQ

SEQ ID NO: 756418 - protein, 81 aa, Homo sapiens
VPGLRVFTIITGHPQETLNLEYFRGRSSASSFQGILTTRWVLAFQVLEGGSRATRGRNLTPETFQRLISWWNFRGRQSRST

SEQ ID NO: 756419 - protein, 531 aa, Homo sapiens
GAAAATAAATAVLEPRAGELAGGSTDRRTHAEALRPQPRAGATAARPRPPVQPPLARCLGARPHTASCSAPGSAMRSAAVLALLLCAGQVTALPVNSPMNKGDTEVMKCIVEVISDTLSKPSPMPVSQECFETLRGDERILSILRHQNLLKELQDLALQGAKERAHQQKKHSGFEDELSEVLENQSSQAELKEAVEEPSSKDVMEKREDSKEAEKSGEATDGARPQALPEPMQESKAEGNNQAPGEEEEEEEEATNTHPPASLPSQKYPGPQAEGDSEGLSQGLVDREKGLSAEPGWQAKREEEEEEEEEAEAGEEAVPEEEGPTVVLNPHPSLGYKEIRKGESRSEALAVDGAGKPGAEEAQDPEGKGEQEHSQQKEEEEEMAVVPQGLFRGGKSGELEQEEERLSKEWEDSKRWSKMDQLAKELTAEKRLEGQEEEEDNRDSSMKLSFRARAYGFRGPGPQLRRGWRPSSREDSLEAGLPLQVRGYPEEKKEEEGSANRRPEDQELESLSAIEAELEKVAHQLQALRRG

SEQ ID NO: 756420 - protein, 451 aa, Homo sapiens
DPSTLFFFPVTALPVNSPMNKGDTEVMKCIVEVISDTLSKPSPMPVSQECFETLRGDERILSILRHQNLLKELQDLALQGAKERAHQQKKHSGFEDELSEVLENQSSQAELKEAVEEPSSKDVMEKREDSKEAEKSGEATDGARPQALPEPMQESKAEGNNQAPGEEEEEEEEATNTHPPASLPSQKYPGPQAEGDSEGLSQGLVDREKGLSAEPGWQAKREEEEEEEEEAEAGEEAVPEEEGPTVVLNPHPSLGYKEIRKGESRSEALAVDGAGKPGAEEAQDPEGKGEQEHSQQKEEEEEMAVVPQGLFRGGKSGELEQEEERLSKEWEDSKRWSKMDQLAKELTAEKRLEGQEEEEDNRDSSMKLSFRARAYGFRGPGPQLRRGWRPSSREDSLEAGLPLQVRGYPEEKKEEEGSANRRPEDQELESLSAIEAELEKVAHQLQALRRG

SEQ ID NO: 756421 - protein, 328 aa, Homo sapiens [sequence omitted]

SEQ ID NO: 756422 - protein, 531 aa, Homo sapiens; identical to SEQ ID NO: 756419

SEQ ID NO: 756423 - protein, 531 aa, Homo sapiens; identical to SEQ ID NO: 756419

SEQ ID NO: 756424 - protein, 329 aa, Homo sapiens
GAAAATAAATAVLEPRAGELAGGSTDRRTHAEALRPQPRAGATAARPRPPVQPPLARCLGARPHTASCSAPGSAMRSAAVLALLLCAGQVTALPVNSPMNKGDTEVMKCIVEVISDTLSKPSPMPVSQECFETLRGDERILSILRHQNLLKELQDLALQGAKERAHQQKKHSGFEDELSEVLENQSSQAELKEAVEEPSSKDVMEKREDSKEAEKSGEATDGARPQALPEPMQESKAEGNNQAPGEEEEEEEEATNTHPPASLPSQKYPGPQAEGDSEGLSQGLVDREKGLSAEPGWQAKRAGGGAALQGVGGLQTLEQDGPAGQGADG

SEQ ID NO: 756425 - protein, 380 aa, Homo sapiens
GAAAATAAATAVLEPRAGELAGGSTDRRTHAEALRPQPRAGATAARPRPPVQPPLARCLGARPHTASCSAPGSAMRSAAVLALLLCAGQVTALPVNSPMNKGDTEVMKCIVEVISDTLSKPSPMPVSQECFETLRGDERILSILRHQNLLKELQDLALQGAKERAHQQKKHSGFEDELSEVLENQSSQAELKGRSEALAVDGAGKPGAEEAQDPEGKGEQEHSQQKEEEEEMAVVPQGLFRGGKSGELEQEEERLSKEWEDSKRWSKMDQLAKELTAEKRLEGQEEEEDNRDSSMKLSFRARAYGFRGPGPQLRRGWRPSSREDSLEAGLPLQVRGYPEEKKEEEGSANRRPEDQELESLSAIEAELEKVAHQLQALRRG

SEQ ID NO: 756426 - protein, 440 aa, Homo sapiens
GAAAATAAATAVLEPRAGELAGGSTDRRTHAEALRPQPRAGATAARPRPPVQPPLARCLGARPHTASCSAPGSAMRSAAVLALLLCAGQVTALPVNSPMNKGDTEVMKCIVEVISDTLSKPSPMPVSQECFETLRGDERILSILRHQNLLKELQDLALQGAKERAHQQKKHSGFEDELSEVLENQSSQAELKEAVEEPSSKDVMEKREDSKEAEKSGEATDGARPQALPEPMQESKAEGNNQAPGEEEEEEEEATNTHPPASLPSQKYPGPQAEGDSEGLSQGLVDREKGLSAEPGWQAKREEEEEEEEEAEAGEEAVPEEEGPTVVLNPHPSLGYKEIRKGESRSEALAVDGAGKPGAEEAQDPEGKGEQEHSQQKEEEEEMAVVPQGLFRGGKSGELEKKEEEGSANRRPEDQELESLSAIEAELEKVAHQLQALRRG

SEQ ID NO: 756427 - protein, 531 aa, Homo sapiens; identical to SEQ ID NO: 756419

SEQ ID NO: 756428 - protein, 498 aa, Homo sapiens
GAAAATAAATAVLEPRAGELAGGSTDRRTHAEALRPQPRAGATAARPRPPVQPPLARCLGARPHTASCSAPGSAMRSAAVLALLLCAGQVTALPVNSPMNKGDTEVMKCIVEVISDTLSKPSPMPVSQECFETLRGDERILSILRHQNLLKELQDLALQGAKERAHQQKKHSGFEDELSEVLENQSSQAELKEAVEEPSSKDVMEKREDSKEAEKSGEATDGARPQALPEPMQESKAEGNNQAPGEEEEEEEEATNTHPPASLPSQKYPGPQAEGDSEGLSQGLVDREKGLSAEPGWQAKREEEEEEEEEAEAGEEAVPEEEGPTVVLNPHPSLGYKEIRKGESRSEALAVDGAGKPGAEEAQDPEGKGEQEHSQQKEEEEEMAVVPQGLFRGGKSGELEQEEERLSKEWEDSKRWSKMDQLAKELTAEKRLEGQEEEEDNRDSSMKLSFRARAYGFRGPGPQSLPKPRPPYRPLRALSPTPDSYLPWNILCRAAPQL

SEQ ID NO: 756429 - protein, 120 aa, Homo sapiens
FFRGKSPEQIYFSLDKVHTEYVTVRSSQLSPKGQKLLQLCPVDRKKEGKLLESCLCSEKECQCLKFEAGLPLQVRGYPEEKKEEEGSANRRPEDQELESLSAIEAELEKVAHQLQALRRG

SEQ ID NO: 756430 - protein, 330 aa, Homo sapiens
GAAAATAAATAVLEPRAGELAGGSTDRRTHAEALRPQPRAGATAARPRPPVQPPLARCLGARPHTASCSAPGSAMRSAAVLALLLCAGQVTALPVNSPMNKGDTEVMKCIVEVISDTLSKPSPMPVSQECFETLRGDERILSILRHQNLLKELQDLALQGAKERAHQQKKHSGFEDELSEVLENQSSQAELKEAVEEPSSKDVMEKREDSKEAEKSGEATDGARPQALPEPMQESKAEGNNQAPGALASSPQILSGFSLGFPGFVDGSCVSRYKPDIIFPPGLPPPDLPSSGSIFYLQLLWFSWSLAGITGVWTLVIIFKLGLLPSFPTS

SEQ ID NO: 756431 - protein, 69 aa, Homo sapiens
MPLARLARVNPNVSPRTRSWRACRPLRQSWRKWPTSCRHYGGAETPAGRAGPRAPCGPGSAVPLAGPGQ

SEQ ID NO: 756432 - protein, 102 aa, Homo sapiens
SSGVGRAESWSSEGLSQGLVDREKGLSAEPGWQAKREEEEEEEEEAEAGEEAVPEEEGPTVVLNPHPSLGYKEIRKGESRSEALAVDGAGTSFAGQPHNFKH

SEQ ID NO: 756433 - protein, 531 aa, Homo sapiens; identical to SEQ ID NO: 756419

SEQ ID NO: 756434 - protein, 149 aa, Homo sapiens
MAVVPQGLFRGGKSGELEQEEERLSKEWEDSKRWSKMDQLAKELTAEKRLEGQEEEEDNRDSSMKLSFRARAYGFRGPGPQLRRGWRPSSREDSLEAGLPLQVRGYPEEKKEEEGSANRRPEDQELESLSAIEAELEKVAHQLQALRRG

SEQ ID NO: 756435 - protein, 250 aa, Homo sapiens
MLQSGVLSFHQKVRSYCSCAQEEEEEEEEAEAGEEAVPEEEGPTVVLNPHPSLGYKEIRKGESRSEALAVDGAGKPGAEEAQDPEGKGEQEHSQQKEEEEEMAVVPQGLFRGGKSGELEQEEERLSKEWEDSKRWSKMDQLAKELTAEKRLEGQEEEEDNRDSSMKLSFRARAYGFRGPGPQLRRGWRPSSREDSLEAGLPLQVRGYPEEKKEEEGSANRRPEDQELESLSAIEAELEKVAHQLQALRRG

SEQ ID NO: 756436 - protein, 457 aa, Homo sapiens
GAAAATAAATAVLEPRAGELAGGSTDRRTHAEALRPQPRAGATAARPRPPVQPPLARCLGARPHTASCSAPGSAMRSAAVLALLLCAGQVTALPVNSPMNKGDTEVMKCIVEVISDTLSKPSPMPVSQECFETLRGDERILSILRHQNLLKELQDLALQGAKERAHQQKKHSGFEDELSEVLENQSSQAELKEAVEEPSSKDVMEKREDSKEAEKSGEATDGARPQALPEPMQESKAEGNNQAPGEEEEEEEEATNTHPPASLPSQKYPGPQAEGDSEGLSQGLVDREKGLSAEPGWQAKREEEEEEEEEAEAGEEAVPEEEGPTVVLNPHPSLGYKEIRKGESRSEALAVDGAGKPGAEEAQDPEGKGEQEHSQQKEEEEEMAVVPQGLFRGGKSGELEQEEERLSKEWEDSKRWSKKEEEGSANRRPEDQELESLSAIEAELEKVAHQLQALRRG

SEQ ID NO: 756437 - protein, 531 aa, Homo sapiens; identical to SEQ ID NO: 756419

SEQ ID NO: 756438 - protein, 554 aa, Homo sapiens
GAAAATAAATAVLEPRAGELAGGSTDRRTHAEALRPQPRAGATAARPRPPVQPPLARCLGARPHTASCSAPGSAMRSAAVLALLLCAGQVTALPVNSPMNKGDTEVMKCIVEVISDTLSKPSPMPVSQECFETLRGDERILSILRHQNLLKELQDLALQGAKERAHQQKKHSGFEDELSEVLENQSSQAELKEAVEEPSSKDVMEKREDSKEAEKSGEATDGARPQALPEPMQESKAEGNNQAPGEEEEEEEEATNTHPPASLPSQKYPGPQAEGDSEGLSQGLVDREKGLSAEPGWQAKREEEEEEEEEAEAGEEAVPEEEGPTVVLNPHPSLGYKEIRKGESRSEALAVDGAGKPGAEEAQDPEGKGEQEHSQQKEEEEEMAVVPQGLFRGGKSGELEQEEERLSKEWEDSKRWSKMDQLAKELTAEKRLEGQEEEEDNRDSSMKLSFRARAYGFRGPGPQLRRGWRPSSREDSLEAGLPLQVRGYPEEKKEEEGSANRRPEMARTLLPVGRQPPACPSPGHPIAPYAPCLLLLTPTCPGTSFAGQPHNFKH

SEQ ID NO: 756439 - protein, 74 aa, Homo sapiens
EEGGSANRRPEDQELESLLGEAGLPLQVRGYPEEKKEEEGSANRRPEDQELESLSAIEAELEKVAHQLQALRRG

SEQ ID NO: 756440 - protein, 533 aa, Homo sapiens
  misc_feature (414)..(414): Xaa can be any naturally occurring amino acid
GAAAATAAATAVLEPRAGELAGGSTDRRTHAEALRPQPRAGATAARPRPPVQPPLARCLGARPHTASCSAPGSAMRSAAVLALLLCAGQVTALPVNSPMNKGDTEVMKCIVEVISDTLSKPSPMPVSQECFETLRGDERILSILRHQNLLKELQDLALQGAKERAHQQKKHSGFEDELSEVLENQSSQAELKEAVEEPSSKDVMEKREDSKEAEKSGEATDGARPQALPEPMQESKAEGNNQAPGEEEEEEEEATNTHPPASLPSQKYPGPQAEGDSEGLSQGLVDREKGLSAEPGWQAKREEEEEEEEEAEAGEEAVPEEEGPTVVLNPHPSLGYKEIRKGESRSEALAVDGAGKPGAEEAQDPEGKGEQEHSQQKEEEEEMAVVPQGLFLVVGEVMLDDAVDAVSDVMLCSXNGCWCDDDSITAWMQDWTMLCQMELDWLEEGCAWDVCARDVTCRDVTYLWNIVPLKASFLGALGPTVLHVCALVACWLADEGLDGHPSPGDGSAFEAVACPLQVRGLPPEEKTDGVVAV

SEQ ID NO: 756441 - protein, 82 aa, Homo sapiens
RHYGGAETPAGRAGPRAPCGPGSAVPLAGPGQMARTLLPVGRQPPACPSPGHPIAPYAPCLLLLTPTCPGTSFAGQPHNFKH

SEQ ID NO: 756442 - protein, 350 aa, Homo sapiens
MNSFNYTTPDYGHYDDKDTLDLNTPVDKTSNTLRVPDILALVIFAVVFLVGVLGNALVVWVTAFEAKRTINAIWFLNLAVADFLSCLALPILFTSIVQHHHWPFGGAACSILPSLILLNMYASILLLATISADRFLLVFKPIWCQNFRGAGLAWIACAVAWGLALLLTIPSFLYRVVREEYFPPKVLCGVDYSHDKRRERAVAIVRLVLGFLWPLLTLTICYTFILLRTWSRRATRSTKTLKVVVAVVASFFIFWLPYQVTGIMMSFLEPSSPTFLLLNKLDSLCVSFAYINCCINPIIYVVAGQGFQGRLRKSLPSLLRNVLTEESVVRESKSFTRSTVDTMAQKTQAV

SEQ ID NO: 756443 - protein, 304 aa, Homo sapiens
KCWLSCPRGTSLTGIQSSGRRIRLRSGTVRGSPLDSTRSCLRLPILFTSIVQHHHWPFGGAACSILPSLILLNMYASILLLATISADRFLLVFKPIWCQNFRGAGLAWIACAVAWGLALLLTIPSFLYRVVREEYFPPKVLCGVDYSHDKRRERAVAIVRLVLGFLWPLLTLTICYTFILLRTWSRRATRSTKTLKVVVAVVASFFIFWLPYQVTGIMMSFLEPSSPTFLLLNKLDSLCVSFAYINCCINPIIYVVAGQGFQGRLRKSLPSLLRNVLTEESVVRESKSFTRSTVDTMAQKTQAV

SEQ ID NO: 756444 - protein, 122 aa, Homo sapiens
SWDYRQVQPRLANFCIFSRDGVLPCCPGYSQTPGLKQSARLGLPKCWDDRRELRHLPQYFNKWCDTLVDSQPSASPFPSEKKPHRGKATCLSQDAPYPGTCLQTHPLCSLRFPLELLQLYHP

SEQ ID NO: 756445 - protein, 350 aa, Homo sapiens; identical to SEQ ID NO: 756442

SEQ ID NO: 756446 - protein, 108 aa, Homo sapiens
MREIVHIQAGQRGNQIGAKFWEVISDEHGIDPTGTYHGDSDLQLDRISVYYSEATDGKYVPRAILVDLEPGTMDSVRSGPFGQIFRPDNFVFGQSGAEPPSPQASQFP

SEQ ID NO: 756447 - protein, 125 aa, Homo sapiens
MREIVHIQAGQRGNQIGAKFWEVISDEHGIDPTGTYHGDSDLQLDRISVYYSEATDGKYVPRAILVDLEPGTMDSVRSGPFGQIFRPDNFVFGQSGAGNNWAKGHYTEGAELVSVATRSVPSSGR

SEQ ID NO: 756448 - protein, 222 aa, Homo sapiens
  misc_feature (22)..(22): Xaa can be any naturally occurring amino acid
  misc_feature (30)..(30): Xaa can be any naturally occurring amino acid
  misc_feature (34)..(34): Xaa can be any naturally occurring amino acid
  misc_feature (37)..(37): Xaa can be any naturally occurring amino acid
  misc_feature (40)..(40): Xaa can be any naturally occurring amino acid
SSRTNLPDTFRRETTSSHILSXQAAPPQGXENWXNPXEKXRAGGRSRIEDPPGCRLWSMTSDIFFDNFIICADRRIVDDWANDGWGLKKAADGAAEPGVVGQMIEAAEERPWLWVVYILTVALPVFLVILFCCSGKKQTSGMEYKKTDAPQPDVKEEEEEKEEEKDKGDEEEEGEEKLEEKQKSDAEEDGGTVSQEEEDRKPKAEEDEILNRSPRNRKPRRE

SEQ ID NO: 756449 - protein, 592 aa, Homo sapiens
MEGKWLLCMLLVLGTAIVEAHDGHDDDVIDIEDDLDDVIEEVEDSKPDTTAPPSSPKVTYKAPVPTGEVYFADSFDRGTLSGWILSKAKKDDTDDEIAKYDGKWEVEEMKESKLPGDKGLVLMSRAKHHAISAKLNKPFLFDTKPLIVQYEVNFQNGIECGGAYVKLLSKTPELNLDQFHDKTPYTIMFGPDKCGEDYKLHFIFRHKNPKTGIYEEKHAKRPDADLKTYFTDKKTHLYTLILNPDNSFEILVDQSVVNSGNLLNDMTPPVNPSREIEDPEDRKPEDWDERPKIPDPEAVKPDDWDEDAPAKIPDEEATKPEGWLDDEPEYVPDPDAEKPEDWDEDMDGEWEAPQIANPRCESAPGCGVWQRPVIDNPNYKGKWKPPMIDNPSYQGIWKPRKIPNPDFFEDLEPFRMTPFSAIGLELWSMTSDIFFDNFIICADRRIVDDWANDGWGLKKAADGAAEPGVVGQMIEAAEERPWLWVVYILTVALPVFLVILFCCSGKKQTSGMEYKKTDAPQPDVKEEEEEKEEEKDKGDEEEEGEEKLEEKQKSDAEEDGGTVSQEEEDRKPKAEEDEILNRSPRNRKPRRE

SEQ ID NO: 756450 - protein, 308 aa, Homo sapiens
RSSSYPTLLHLRHKNPKTGIYEEKHAKRPDEEATKPEGWLDDEPEYVPDPDAEKPEDWDEDMDGEWEAPQIANPRCESAPGCGVWQRPVIDNPNYKGKWKPPMIDNPSYQGIWKPRKIPNPDFFEDLEPFRMTPFSAIGLELWSMTSDIFFDNFIICADRRIVDDWANDGWGLKKAADGAAEPGVVGQMIEAAEERPWLWVVYILTVALPVFLVILFCCSGKKQTSGMEYKKTDAPQPDVKEEEEEKEEEKDKGDEEEEGEEKLEEKQKSDAEEDGGTVSQEEEDRKPKAEEDEILNRSPRNRKPRRE

SEQ ID NO: 756451 - protein, 592 aa, Homo sapiens; identical to SEQ ID NO: 756449

SEQ ID NO: 756452 - protein, 262 aa, Homo sapiens
PSDMAQGMDSERDEDMDGEWEAPQIANPRCESAPGCGVWQRPVIDNPNYKGKWKPPMIDNPSYQGIWKPRKIPNPDFFEDLEPFRMTPFSAIGLELWSMTSDIFFDNFIICADRRIVDDWANDGWGLKKAADGAAEPGVVGQMIEAAEERPWLWVVYILTVALPVFLVILFCCSGKKQTSGMEYKKTDAPQPDVKEEEEEKEEEKDKGDEEEEGEEKLEEKQKSDAEEDGGTVSQEEEDRKPKAEEDEILNRSPRNRKPRRE

SEQ ID NO: 756453 - protein, 396 aa, Homo sapiens
RSSSYPTLLHLRHKNPKTGIYEEKHAKRPDADLKTYFTDKKTHLYTLILNPDNSFEILVDQSVVNSGNLLNDMTPPVNPSREIEDPEDRKPEDWDERPKIPDPEAVKPDDWDEDAPAKIPDEEATKPEGWLDDEPEYVPDPDAEKPEDWDEDMDGEWEAPQIANPRCESAPGCGVWQRPVIDNPNYKGKWKPPMIDNPSYQGIWKPRKIPNPDFFEDLEPFRMTPFSAIGLELWSMTSDIFFDNFIICADRRIVDDWANDGWGLKKAADGAAEPGVVGQMIEAAEERPWLWVVYILTVALPVFLVILFCCSGKKQTSGMEYKKTDAPQPDVKEEEEEKEEEKDKGDEEEEGEEKLEEKQKSDAEEDGGTVSQEEEDRKPKAEEDEILNRSPRNRSL

SEQ ID NO: 756454 - protein, 120 aa, Homo sapiens [sequence omitted]

SEQ ID NO: 756455 - protein, 304 aa, Homo sapiens
RSSSYPTLLHLRHKNPKTGIYEEKHAKRPDADLKTYFTDKKTHLYTLILNPDNSFEILVDQSVVNSGNLLNDMTPPVNPSREIEDPEDRKPEDWDERPKIPDPEAVKPDDWDEDAPAKIPDEEATKPEGWLDDEPEYVPDPDAEKPEDWDEDMDGEWEAPQIANPRCESAPGCGVWQRPVIDNPNYKGKWKPPMIDNPSYQGIWKPRKIPNPDFFEDLEPFRMTPFSAIGLELWSMTSDIFFDNFIICADRRIVDDWANDGWGLKKAADGAAEPGVVGQMIEAAEERPWLWVVYILKTDQWYGV

SEQ ID NO: 756456 - protein, 319 aa, Homo sapiens
RSSSYPTLLHLRHKNPKTGIYEEKHAKRPDADLKTYFTDKKTHLYTLILNPDNSFEILVDQSVVNSGNLLNDMTPPVNPSREIEDPEDRKPEDWDERPKIPDPEAVKPDDWDEDAPAKIPDEEATKPEGWLDDEPEYVPDPDAEKPEDWDEDMDGEWEAPQIANPRCESAPGCGVWQRPVIDNPNYKGKWKPPMIDNPSYQGIWKPRKIPNPDFFEDLEPFRMTPFSAIGLELWSMTSDIFFDNFIICADRRIVDDWANDGWGLKKAADGAAEPGVVGQMIEAAEERPWLWVVYILTVALPVFLVILFCCSGKVGSFFF

SEQ ID NO: 756457 - protein, 81 aa, Homo sapiens
VDSKIPLVCRSDVKEEEEEKEEEKDKGDEEEEGEEKLEEKQKSDAEEDGGTVSQEEEDRKPKAEEDEILNRSPRNRKPRRE

SEQ ID NO: 756458 - protein, 592 aa, Homo sapiens; identical to SEQ ID NO: 756449

SEQ ID NO: 756459 - protein, 78 aa, Homo sapiens
VVVIRGSGAKQLPKTDAPQPDVKEEEEEKEEEKDKGDEEEEGEEKLEEKQKSDAEEDGGTVSQEEKDKGDEEEEVAKG

SEQ ID NO: 756460 - protein, 287 aa, Homo sapiens
GTRPAKIPDEEATKPEGWLDDEPEYVPDPDAEKPEDWDEDMDGEWEAPQIANPRCESAPGCGVWQRPVIDNPNYKGKWKPPMIDNPSYQGIWKPRKIPNPDFFEDLEPFRMTPFSAIGLELWSMTSDIFFDNFIICADRRIVDDWANDGWGLKKAADGAAEPGVVGQMIEAAEERPWLWVVYILTVALPVFLVILFCCSGKKQTSGMEYKKTDAPQPDVKEEEEEKEEEKDKGDEEEEGEEKLEEKQKSDAEEDGGTVSQEEEDRKPKAEEDEILNRSPRNRKPRRE

SEQ ID NO: 756461 - protein, 592 aa, Homo sapiens; identical to SEQ ID NO: 756449

SEQ ID NO: 756462 - protein, 240 aa, Homo sapiens
RSSSYPTLLHLRHKNPKTGIYEEKHAKRPDEEATKPEGWLDDEPEYVPDPDAEKPEDYLEPFRMTPFSAIGLELWSMTSDIFFDNFIICADRRIVDDWANDGWGLKKAADGAAEPGVVGQMIEAAEERPWLWVVYILTVALPVFLVILFCCSGKKQTSGMEYKKTDAPQPDVKEEEEEKEEEKDKGDEEEEGEEKLEEKQKSDAEEDGGTVSQEEEDRKPKAEEDEILNRSPRNRKPRRE

SEQ ID NO: 756463 - protein, 356 aa, Homo sapiens
RSSSYPTLLHLRHKNPKTGIYEEKHAKRPDADLKTYFTDKKTHLYTLILNPDNSFEILVDQSVVNSGNLLNDMTPPVNPSREIEDPEDRKPEDWDERPKIPDPEAVKPDDWDEDAPAKIPDEEATKPEGWLDDEPEYVPDPDAEKPEDWDEDMDGEWEAPQIANPRCESAPGCGVWQRPVIDNPNYKGKWKPPMIDNPSYQGIWKPRKIPNPDFFEDLEPFRMTPFSAIGLELWSMTSDIFFDNFIICADRRIVDDWANDGWGLKKAADGAAEPGVVGQMIEAAEERPWLWVVYILTVALPVFLVILFCCSGKKQTSGMGARRVHAHAECPNTHTLPILQGFSVAFIPASPRPLFN

SEQ ID NO: 756464 - protein, 375 aa, Homo sapiens
RSSSYPTLLHLRHKNPKTGIYEEKHAKRPDADLKTYFTDKKTHLYTLILNPDNSFEILVDQSVVNSGNLLNDMTPPVNPSREIEDPEDRKPEDWDERPKIPDPEAVKPDDWDEDAPAKIPDEEATKPEGWLDDEPEYVPDPDAEKPEDWDEDMDGEWEAPQIANPRCESAPGCGVWQRPVIDNPNYKGKWKPPMIDNPSYQGIWKPRKIPNPDFFEDLEPFRMTPFSAIGLELWSMTSDIFFDNFIICADRRIVDDWANDGWGLKKAADGAAEPGVVGQMIEAAEERPWLWVVYILTVALPVFLVILFCCSGKKQTSGMEHNKILRHLNRIRRTTQRRAGDETGGLDEDGSRENLGVRDDSGAREGILKNTAMRD

SEQ ID NO: 756465 - protein, 281 aa, Homo sapiens
RSSSYPTLLHLRHKNPKTGIYEEKHAKRPDADLKTYFTDKKTHLYTLILNPDNSFEILVDQSVVNSGNLLNDMTPPVNPSREIEDPEDRKPEDWDERPKIPDPEAVKPDDWDEDAPAKIPDEEATKPEGWLDDEPEYVPDPDAEKPEDWDEDMDGEWEAPQIANPRCESAPGCGVWQRPVIDNPNYKGKWKPPMIDNPSYQGIWKPRKIPNPDFFEDLEPFRMTPFSAIGLELWSMTSDIFFDNFIICADRRIVDDWANDTQGTTKTMMGIRARTPRADVT

SEQ ID NO: 756466 - protein, 255 aa, Homo sapiens
MEDEQPDSLEGWVPVREGLFAEPERHRLRFLVAWNGAEGKFAVTCHDRTAQQRRLREGARLGPEPEPKPEAAVSPSSWAGLLSAAGLRGAHRQLAALWPPLERCFPRLPPELDVGGGGAWGLGLGLWALLWPTRAGPGEAALQELCGQLERYLGAAADGCGGATVRDALFPAEGGAADCESPREFRERALRARWVEADARLRQVIQGHGKANTMVALMNVYQEEDEAYQELVTVATMFFQYLLQPFRAMREVATL

SEQ ID NO: 756467 - protein, 626 aa, Homo sapiens
MADQRMDISSTISDFMSPGPTDLLSSSLGTSGVDCNRKRKGSSTDYQESMDTDKDDPHGRLEYTEHQGRIKNAREAHSQIEKRRRDKMNSFIDELASLVPTCNAMSRKLDKLTVLRMAVQHMKTLRGATNPYTEANYKPTFLSDDELKHLILRAADGFLFVVGCDRGKILFVSESVFKILNYSQNDLIGQSLFDYLHPKDIAKVKEQLSSSDTAPRERLIDAKTGLPVKTDITPGPSRLCSGARRSFFCRMKCNRPSVKVEDKDFPSTCSKKKADRKSFCTIHSTGYLKSWPPTKMGLDEDNEPDNEGCNLSCLVAIGRLHSHVVPQPVNGEIRVKSMEYVSRHAIDGKFVFVDQRATAILAYLPQELLGTSCYEYFHQDDIGHLAECHRQVLQTREKITTNCYKFKIKDGSFITLRSRWFSFMNPWTKEVEYIVSTNTVVLANVLEGGDPTFPQLTASPHSMDSMLPSGEGGPKRTHPTVPGIPGGTRAGAGKIGRMIAEEIMEIHRIRGSSPSSCGSSPLNITSTPPPDASSPGGKKILNGGTPDIPSSGLLSGQAQENPGYPYSDSSSILGENPHIGIDMIDNDQGSSSPSNDEAAMAVIMSLLEADAGLGGPVDFSDLPWPL

SEQ ID NO: 756468 - protein, 624 aa, Homo sapiens
MSKEAVSLWALTVSLQPPVPLCVCREMTGSGRRKQQCVTLPFISRELCFYLLLFPPPRLEYTEHQGRIKNAREAHSQIEKRRRDKMNSFIDELASLVPTCNAMSRKLDKLTVLRMAVQHMKTLRGATNPYTEANYKPTFLSDDELKHLILRAADGFLFVVGCDRGKILFVSESVFKILNYSQNDLIGQSLFDYLHPKDIAKVKEQLSSSDTAPRERLIDAKTGLPVKTDITPGPSRLCSGARRSFFCRMKCNRPSVKVEDKDFPSTCSKKKADRKSFCTIHSTGYLKSWPPTKMGLDEDNEPDNEGCNLSCLVAIGRLHSHVVPQPVNGEIRVKSMEYVSRHAIDGKFVFVDQRATAILAYLPQELLGTSCYEYFHQDDIGHLAECHRQVLQTREKITTNCYKFKIKDGSFITLRSRWFSFMNPWTKEVEYIVSTNTVVLANVLEGGDPTFPQLTASPHSMDSMLPSGEGGPKRTHPTVPGIPGGTRAGAGKIGRMIAEEIMEIHRIRGSSPSSCGSSPLNITSTPPPDASSPGGKKILNGGTPDIPSSGLLSGQAQENPGYPYSDSSSILGENPHIGIDMIDNDQGSSSPSNDEAAMAVIMSLLEADAGLGGPVDFSDLPWPL

SEQ ID NO: 756469 - protein, 583 aa, Homo sapiens
MINIESMDTDKDDPHGRLEYTEHQGRIKNAREAHSQIEKRRRDKMNSFIDELASLVPTCNAMSRKLDKLTVLRMAVQHMKTLRGATNPYTEANYKPTFLSDDELKHLILRAADGFLFVVGCDRGKILFVSESVFKILNYSQNDLIGQSLFDYLHPKDIAKVKEQLSSSDTAPRERLIDAKTGLPVKTDITPGPSRLCSGARRSFFCRMKCNRPSVKVEDKDFPSTCSKKKADRKSFCTIHSTGYLKSWPPTKMGLDEDNEPDNEGCNLSCLVAIGRLHSHVVPQPVNGEIRVKSMEYVSRHAIDGKFVFVDQRATAILAYLPQELLGTSCYEYFHQDDIGHLAECHRQVLQTREKITTNCYKFKIKDGSFITLRSRWFSFMNPWTKEVEYIVSTNTVVLANVLEGGDPTFPQLTASPHSMDSMLPSGEGGPKRTHPTVPGIPGGTRAGAGKIGRMIAEEIMEIHRIRGSSPSSCGSSPLNITSTPPPDASSPGGKKILNGGTPDIPSSGLLSGQAQENPGYPYSDSSSILGENPHIGIDMIDNDQGSSSPSNDEAAMAVIMSLLEADAGLGGPVDFSDLPWPL

SEQ ID NO: 756470 - protein, 545 aa, Homo sapiens
MINIESMDTDKDDPHGRLEYTEHQGRIKNAREAHSQIEKRRRDKMNSFIDELASLVPTCNAMSRKLDKLTVLRMAVQHMKTLRGATNPYTEANYKPTFLSDDELKHLILRAADGFLFVVGCDRGKILFVSESVFKILNYSQNDLIGQSLFDYLHPKDIAKVKEQLSSSDTAPRERLIDAKTGLPVKTDITPGPSRLCSGARRSFFCRMKCNRPSVKVEDKDFPSTCSKKKADRKSFCTIHSTGATAILAYLPQELLGTSCYEYFHQDDIGHLAECHRQVLQTREKITTNCYKFKIKDGSFITLRSRWFSFMNPWTKEVEYIVSTNTVVLSRVDTGHLGQVERCTVLSRPDSRFLIAGDVHRANVLEGGDPTFPQLTASPHSMDSMLPSGEGGPKRTHPTVPGIPGGTRAGAGKIGRMIAEEIMEIHRIRGSSPSSCGSSPLNITSTPPPDASSPGGKKILNGGTPDIPSSGLLSGQAQENPGYPYSDSSSILGENPHIGIDMIDNDQGSSSPSNDEAAMAVIMSLLEADAGLGGPVDFSDLPWPL

SEQ ID NO: 756471 - protein, 497 aa, Homo sapiens
MINIESMDTDKDDPHGRLEYTEHQGRIKNAREAHSQIEKRRRDKMNSFIDELASLVPTCNAMSRKLDKLTVLRMAVQHMKTLRGATNPYTEANYKPTFLSDDELKHLILRAADGFLFVVGCDRGKILFVSESVFKILNYSQNDLIGQSLFDYLHPKDIAKVKEQLSSSDTAPRERLIDAKTGLPVKTDITPGPSRLCSGARRSFFCRMKCNRPSVKVEDKDFPSTCSKKKVLQTREKITTNCYKFKIKDGSFITLRSRWFSFMNPWTKEVEYIVSTNTVVLSRVDTGHLGQVERCTVLSRPDSRFLIAGDVHRANVLEGGDPTFPQLTASPHSMDSMLPSGEGGPKRTHPTVPGIPGGTRAGAGKIGRMIAEEIMEIHRIRGSSPSSCGSSPLNITSTPPPDASSPGGKKILNGGTPDIPSSGLLSGQAQENPGYPYSDSSSILGENPHIGIDMIDNDQGSSSPSNDEAAMAVIMSLLEADAGLGGPVDFSDLPWPL

SEQ ID NO: 756472 - protein, 408 aa, Homo sapiens
MKCNRPSVKVEDKDFPSTCSKKKADRKSFCTIHSTGYLKSWPPTKMGLDEDNEPDNEGCNLSCLVAIGRLHSHVVPQPVNGEIRVKSMEYVSRHAIDGKFVFVDQRATAILAYLPQELLGTSCYEYFHQDDIGHLAECHRQVLQTREKITTNCYKFKIKDGSFITLRSRWFSFMNPWTKEVEYIVSTNTVVLSRVDTGHLGQVERCTVLSRPDSRFLIAGDVHRANVLEGGDPTFPQLTASPHSMDSMLPSGEGGPKRTHPTVPGIPGGTRAGAGKIGRMIAEEIMEIHRIRGSSPSSCGSSPLNITSTPPPDASSPGGKKILNGGTPDIPSSGLLSGQAQENPGYPYSDSSSILGENPHIGIDMIDNDQGSSSPSNDEAAMAVIMSLLEADAGLGGPVDFSDLPWPL

SEQ ID NO: 756473 - protein, 224 aa, Homo sapiens
MADQRMDISSTISDFMSPGPTDLLSSSLGTSGVDCNRKRKGSSTDYQESMDTDKDDPHGRLEYTEHQGRIKNAREAHSQIEKRRRDKMNSFIDELASLVPTCNAMSRKLDKLTVLRMAVQHMKTLRGATNPYTEANYKPTFLSDDELKHLILRAADGFLFVVGCDRGKILFVSESVFKILNYSQNDLIGQSLFDYLHPKDIAKVKEQLSSSDTAPRERLIDAKR

SEQ ID NO: 756474 - protein, 626 aa, Homo sapiens; identical to SEQ ID NO: 756467

SEQ ID NO: 756475 - protein, 583 aa, Homo sapiens; identical to SEQ ID NO: 756469

SEQ ID NO: 756476 - protein, 626 aa, Homo sapiens; identical to SEQ ID NO: 756467

SEQ ID NO: 756477 - protein, 408 aa, Homo sapiens; identical to SEQ ID NO: 756472

SEQ ID NO: 756478 - protein, 291 aa, Homo sapiens
MADQRMDISSTISDFMSPGPTDLLSSSLGTSGVDCNRKRKGSSTDYQESMDTDKDDPHGRLEYTEHQGRIKNAREAHSQIEKRRRDKMNSFIDELASLVPTCNAMSRKLDKLTVLRMAVQHMKTLRGATNPYTEANYKPTFLSDDELKHLILRAADGFLFVVGCDRGKILFVSESVFKILNYSQNDLIGQSLFDYLHPKDIAKVKEQLSSSDTAPRERLIDAKTGLPVKTDITPGPSRLCSGARRSFFCRMKCNRPSVKVEDKDFPSTCSKKKADAGLGGPVDFSDLPWPL

SEQ ID NO: 756479 - protein, 322 aa, Homo sapiens
MSPNFKLQCHFILIFLTALRGESRYLELREAADYDPFLLFSANLKRELAGEQPYRRALRCLDMLSLQGQFTFTADRPQLHCAAFFISEPEEFITIHYDQVSIDCQGGDFLKVFDGWILKGEKFPSSQDHPLPSAERYIDFCESGLSRRSIRSSQNVAMIFFRVHEPGNGFTLTIKTDPNLFPCNVISQTPNGKFTLVVPHQHRNCSFSIIYPVVIKISDLTLGHVNGLQLKKSSAGCEGIGDFVELLGGTGLDPSKMTPLADLCYPFHGPAQMKVGCDNTVVRMVSSGKHVNRVTFEYRQLEPYELENPNGNSIGEFCLSGL

SEQ ID NO: 756480 - protein, 356 aa, Homo sapiens
RWGYPGLMERVKTFPSSPDTGKHYPSLFIRYAEWQGGCPAPGPLFYPQPLNFSGLTYVSCQLREAADYDPFLLFSANLKRELAGEQPYRRALRCLDMLSLQGQFTFTADRPQLHCAAFFISEPEEFITIHYDQVSIDCQGGDFLKVFDGWILKGEKFPSSQDHPLPSAERYIDFCESGLSRRSIRSSQNVAMIFFRVHEPGNGFTLTIKTDPNLFPCNVISQTPNGKFTLVVPHQHRNCSFSIIYPVVIKISDLTLGHVNGLQLKKSSAGCEGIGDFVELLGGTGLDPSKMTPLADLCYPFHGPAQMKVGCDNTVVRMVSSGKHVNRVTFEYRQLEPYELENPNGNSIGEFCLSGL

SEQ ID NO: 756481 - protein, 223 aa, Homo sapiens
MSPNFKLQCHFILIFLTALRGESRYLELREAADYDPFLLFSANLKRELAGEQPYRRALRCLDMLSLQGQFTFTADRPQLHCAAFFISEPEEFITIHYDQVSIDCQGGDFLKVFDGWILKGEKFPSSQDHPLPSAERYIDFCESGLSRRSIRSSQNVAMIFFRVHEPGNGFTLTIKTDPNLFPCNVISQTPNGKFTLVVPHQHRNCSFSIIYPVVINPQQVARE

SEQ ID NO: 756482 - protein, 288 aa, Homo sapiens
MSPNFKLQCHFILIFLTALRGESRYLELREAADYDPFLLFSANLKRELAGEQPYRRALRCLDMLSLQGQFTFTADRPQLHCAAFFISEPEEFITIHYDQVSIDCQGGDFLKVFDGWILKGEKFPSSQDHPLPSAERYIDFCESGLSRRSIRSSQNVAMIFFRVHEPGNGFTLTIKTDPNLFPCNVISQTPNGKFTLVVPHQHRNCSFSIIYPVVIKISDLTLGHVNGLQLKKSSAGCEGIGDFVELLGGTGLDPSKMTPLADLCYPFHGPVLFRTSPECNLSCVEWMG

SEQ ID NO: 756483 - protein, 322 aa, Homo sapiens; identical to SEQ ID NO: 756479

SEQ ID NO: 756484 - protein, 316 aa, Homo sapiens
MSPNFKLQCHFILIFLTALRGESRYLELREAADYDPFLLFSANLKRELAGEQPYRRALRCLDMLSLQGQFTFTADRPQLHCAAFFISEPEEFITIHYDQVSIDCQGGDFLKVFDGWILKGEKFPSSQDHPLPSAERYIDFCESGLSRRSIRSSQNVAMIFFRVHEPGNGFTLTIKTDPNLFPCNVISQTPNGKFTLVVPHQHRNCSFSIIYPVVIKISDLTLGHVNGLQLKKSSAGCEGIGDFVELLGGTGLDPSKMTPLADLCYPFHGPAQMKVGCDNTVVRMVSSGKHVNRVTFEYRQLEPYELNQPSDLHADS

SEQ ID NO: 756485 - protein, 102 aa, Homo sapiens
MCLSLLLYSLRKSSAGCEGIGDFVELLGGTGLDPSKMTPLADLCYPFHGPAQMKVGCDNTVVRMVSSGKHVNRVTFEYRQLEPYELENPNGNSIGEFCLSGL

SEQ ID NO: 756486 - protein, 76 aa, Homo sapiens
QEEEWQLLSRTQQRAGASEGTGQGQGSESAMVIDEDFLGARGLVRLGQGSESAVVIDEDILGARGLVRLGQASESA

SEQ ID NO: 756487 - protein, 119 aa, Homo sapiens
MESGQEAHPSASPAPAPARLHLPSCDQLRTSGCSGAMPRYTVHVRGEWLAVPCQDAQLTVGWLGREAVRRYIKNKPDNGGFTSVDDAHFLVRRCKGLGLLDNEDRLEVALENNEFVEVV

SEQ ID NO: 756488 - protein, 657 aa, Homo sapiens [sequence omitted]

SEQ ID NO: 756489 - protein, 228 aa, Homo sapiens [sequence omitted]

SEQ ID NO: 756490 - protein, 327 aa, Homo sapiens
MPRYTVHVRGEWLAVPCQDAQLTVGWLGREAVRRYIKNKPDNGGFTSVDDAHFLVRRCKGLGLLDNEDRLEVALENNEFVEVVIEGDAMSPDFIPSQPEGVYLYSKYREPEKYIELDGDRLTTEDLVNLGKGRYKIKLTPTAEKRVQKSREVIDSIIKEKTVVYGITTGFGKFARTVIPINKLQELQVNLVRSHSSGVGKPLSPERCRMLLALRINVLAKGYSGISLETLKQGIEFLRPLKTTTPLEKVYDLVRSVVRPWIKDRFMAPDIEAAHRLLLEQKVWEVAAPYIEKYRMEHIPESRPLSPTAFSLQFLHKKSTKIPESEDL

SEQ ID NO: 756491 - protein, 657 aa, Homo sapiens [sequence omitted]

SEQ ID NO: 756492 - protein, 212 aa, Homo sapiens [sequence omitted]

SEQ ID NO: 756493 - protein, 622 aa, Homo sapiens
MPRYTVHVRGEWLAVPCQDAQLTVGWLGREAVRRYIKNKPDNGGFTSVDDAHFLVRRCKGLGLLDNEDRLEVALENNEFVEVVIEGDAMSPDFIPSQPEGVYLYSKYREPEKYIELDGDRLTTEDLVNLGKGRYKIKLTPTAEKRVQKSREVIDSIIKEKTVVYGITTGFGKFARTVIPINKLQELQVNLVRSHSSGVGKPLSPERCRMLLALRINVLAKGYSGISLETLKQVIEMFNASCLPYVPEKGTVGASGDLAPLSHLALGLVGEGKMWSPKSGWADAKYVLEAHGLKPVILKPKEGLALINGTQMITSLGCEAVERASAIARQADIVAALTLEVLKGTTKAFDTDIHALRPHRGQIEVAFRFRSLLDSDHHPSEIAESHRFCDRVQDAYTLRCCPQVHGVVNDTIAFVKNIITTELNSATDNPMVFANRGETISGGNFHGEYPAKALDYLAIGIHELAAISERRIERLCNPSLSELPAFLVAEGGLNSGFMIAHCTAAALVSENKALCHPSSVDSLSTSAATEDHVSMGGWAARKALRVIEHVEQVLAIELLAACQGIEFLRPLKTTTPLEKVYDLVRSVVRPWIKDRFMAPDIEAAHRLLLEQKASWLLGLFLNF

SEQ ID NO: 756494 - protein, 439 aa, Homo sapiens [sequence omitted]

SEQ ID NO: 756495 - protein, 302 aa, Homo sapiens
MPRYTVHVRGEWLAVPCQDAQLTVGWLGREAVRRYIKNKPDNGGFTSVDDAHFLVRRCKGLGLLDNEDRLEVALENNEFVEVVIEGDAMSPDFIPSQPEGVYLYSKYREPEKYIELDGDRLTTEDLVNLGKGRYKIKLTPTAEKRVQKSREVIDSIIKEKTVVYGITTGFGKFARTVIPINKLQELQVNLVRSHSSGVGKPLSPERCRMLLALRINVLAKGYSGISLETLKQVIEMFNASCLPYVPEKGTVGASGDLAPLSHLALGLVGEGKMWSPKSGWADAKYHKASFNVSSLMNCWELP

SEQ ID NO: 756496 - protein, 778 aa, Homo sapiens
MTTRQATKDPLLRGVSPTPSKIPVRSQKRTPFPTVTSCAVDQENQDPRRWVQKPPLNIQRPLVDSAGPRPKARHQAETSQRLVGISQPRNPLEELRPSPRGQNVGPGPPAQTEAPGTIEFVADPAALATILSGEGVKSCHLGRQPSLAKRVLVRGSQGGTTQRVQGVRASAYLAPRTPTHRLDPARASCFSRLEGPGPRGRTLCPQRLQALISPSGPSFHPSTRPSFQELRRETAGSSRTSVSQASGLLLETPVQPAFSLPKGEREVVTHSDEGGVASLGLAQRVPLRENREMSHTRDSHDSHLMPSPAPVAQPLPGHVVPCPSPFGRAQRVPSPGPPTLTSYSVLRRLTVQPKTRFTPMPSTPRVQQAQWLRGVSPQSCSEDPALPWEQVAVRLFDQESCIRSLEGSGKPPVATPSGPHSNRTPSLQEVKIQRIGILQQLLRQEVEGLVGGQCVPLNGGSSLDMVELQPLLTEISRTLNATEHNSGTSHLPGLLKHSGLPKPCLPEECGEPQPCPPAEPGPPEAFCRSEPEIPEPSLQEQLEVPEPYPPAEPRPLESCCRSEPEIPESSRQEQLEVPEPCPPAEPRPLESYCRIEPEIPESSRQEQLEVPEPCPPAEPGPLQPSTQGQSGPPGPCPRVELGASEPCTLEHRSLESSLPPCCSQWAPATTSLIFSSQHPLCASPPICSLQSLRPPAGQAGLSNLAPRTLALRERLKSCLTAIHCFHEARLDDECAFYTSRAPPSGPTRVCTNPVATLLEWQDALCFIPVGSAAPQGSP

SEQ ID NO: 756497 - protein, 233 aa, Homo sapiens
MTTRQATKDPLLRGVSPTPSKIPVRSQKRTPFPTVTSCAVDQENQDPRRWVQKPPLNIQRPLVDSAGPRPKARHQAETSQRLVGISQPRNPLEELRPSPRGQNVGPGPPAQTEAPGTIEFVADPAALATILSGEGVKSCHLGRQPSLAKRVLVRGSQGGTTQRVQGVRASAYLAPRTPTHRLDPARASCFSRLEGPGPRGRTLCPQRLQALNSHSGLLFTSIAKSRSKGKVRT

SEQ ID NO: 756498 - protein, 778 aa, Homo sapiens; identical to SEQ ID NO: 756496

SEQ ID NO: 756499 - protein, 749 aa, Homo sapiens
MTTRQATKDPLLRGVSPTPSKIPVRSQKRTPFPTVTSCAVDQENQDPRRWVQKPPLNIQRPLVDSAGPRPKARHQAETSQRLVGISQPRNPLEELRPSPRGQNVGPGPPAQTEAPGTIEFVADPAALATILSGEGVKSCHLGRQPSLAKRVLVRGSQGGTTQRVQGVRASAYLAPRTPTHRLDPARASCFSRLEGPGPRGRTLCPQRLQALISPSGPSFHPSTRPSFQELRRETAGSSRTSVSQASGLLLETPVQPAFSLPKGEREVVTHSDEGGVASLGLAQRVPLRENREMSHTRDSHDSHLMPSPAPVAQPLPGHVVPCPSPFGRAQRVPSPGPPTLTSYSVLRRLTVQPKTRFTPMPSTPRVQQAQWLRGVSPQSCSEDPALPWEQVAVRLFDQESCIRSLEGSGKPPVATPSGPHSNRTPSLQEVKIQRIGILQQLLRQEVEGLVGGQCVPLNGGSSLDMVELQPLLTEISRTLNATEHNSGTSHLPGLLKHSGLPKPCLPEECGEPQPCPPAEPGPPEAFCRSEPEIPEPSLQEQLEVPEPYPPAEPRPLESCCRSEPEIPESSRQEQLEEQLEVPEPCPPAEPGPLQPSTQGQSGPPGPCPRVELGASEPCTLEHRSLESSLPPCCSQWAPATTSLIFSSQHPLCASPPICSLQSLRPPAGQAGLSNLAPRTLALRERLKSCLTAIHCFHEARLDDECAFYTSRAPPSGPTRVCTNPVATLLEWQDALCFIPVGSAAPQGSP

SEQ ID NO: 756500 - protein, 868 aa, Homo sapiens
MTTRQATKDPLLRGVSPTPSKIPVRSQKRTPFPTVTSCAVDQENQDPRRWVQKPPLNIQRPLVDSAGPRPKARHQAETSQRLVGISQPRNPLEELRPSPRGQNVGPGPPAQTEAPGTIEFVADPAALATILSGEGVKSCHLGRQPSLAKRVLVRGSQGGTTQRVQGVRASAYLAPRTPTHRLDPARASCFSRLEGPGPRGRTLCPQRLQALISPSGPSFHPSTRPSFQELRRETAGSSRTSVSQASGLLLETPVQPAFSLPKGEREVVTHSDEGGVASLGLAQRVPLRENREMSHTRDSHDSHLMPSPAPVAQPLPGHVVPCPSPFGRAQRVPSPGPPTLTSYSVLRRLTVQPKTRFTPMPSTPRVQQAQWLRGVSPQSCSEDPALPWEQVAVRLFDQESCIRSLEGSGKPPVATPSGPHSNRTPSLQEVKIQRIGILQQLLRQEVEGLVGGQCVPLNGGSSLDMVELQPLLTEISRTLNATEHNSGTSHLPGLLKHSGLPKPCLPEECGEPQPCPPAEPGPPEAFCRSEPEIPEPSLQEQLEVPEPYPPAEPRPLESCCRSEPEIPESSRQEQLEVPEPCPPAEPRPLESYCRIEPEIPESSRQEQLEVPEPCPPAEPGPLQPSTQGQSGPPGPCPRVELGASEPCTLEHRSLESSLPPCCSQWAPATTSLIFSSQHPLCASPPICSLQSLRPPAGQAGKELAGKECEHKRSSPHCELHTCPAPTPGNLMLPHLPPWPSLALPQEEGRGCTSSPVLLIGLAVGGGGGEDSTWWKYRTPDLPLNFPCPSGLSNLAPRTLALRERLKSCLTAIHCFHEARLDDECAFYTSRAPPSGPTRVCTNPVATLLEWQDALCFIPVGSAAPQGSP

SEQ ID NO: 756501 - protein, 901 aa, Homo sapiens
MTTRQATKDPLLRGVSPTPSKIPVRSQKRTPFPTVTSCAVDQENQDPRRWVQKPPLNIQRPLVDSAGPRPKARHQAETSQRLVGISQPRNPLEELRPSPRGQNVGPGPPAQTEAPGTIEFVADPAALATILSGEGVKSCHLGRQPSLAKRVLVRGSQGGTTQRVQGVRASAYLAPRTPTHRLDPARASCFSRLEGPGPRGRTLCPQRLQALISPSGPSFHPSTRPSFQELRRETAGSSRTSVSQASGLLLETPVQPAFSLPKGEREVVTHSDEGGVASLGLAQRVPLRENREMSHTRDSHDSHLMPSPAPVAQPLPGHVVPCPSPFGRAQRVPSPGPPTLTSYSVLRRLTVQPKTRFTPMPSTPRVQQAQWLRGVSPQSCSEDPALPWEQVAVRLFDQESCIRSLEGSGKPPVATPSGPHSNRTPSLQEVKIQRIGILQQLLRQEVEGLVGGQCVPLNGGSSLDMVELQPLLTEISRTLNATEHNSGTSHLPGLLKHSGLPKPCLPEECGEPQPCPPAEPGPPEAFCRSEPEIPEPSLQEQLEVPEPYPPAEPRPLESCCRSEPEIPESSRQEQLEVPEPCPPAEPRPLESYCRIEPEIPESSRQEQLEVPEPCPPAEPGPLQPSTQGQSGPPGPCPRVELGASEPCTLEHRSLESSLPPCCSQWAPATTSLIFSSQHPLCASPPICSLQSLRPPAGQAGKELAGKECEHKRSSPHCELHTCPAPTPGNLMLPHLPPWPSLALPQEEGRGCTSSPVLLIGLAVGGGGGEDSTWWKYRTPDLPLNFPCPSGLSNLAPRTLALRERLKSCLTAIHCFHEARLDDECAFYTSRAPPSGPTRVCTNPVATLLEWQDALVRLQPTAQLWLHSEPDGRWGTGTGGHLGFFTERSAGRLGYSARLAEL

SEQ ID NO: 756502 - protein, 661 aa, Homo sapiens
MTTRQATKDPLLRGVSPTPSKIPVRSQKRTPFPTVTSCAVDQENQDPRGVRASAYLAPRTPTHRLDPARASCFSRLEGPGPRGRTLCPQRLQALISPSGPSFHPSTRPSFQELRRETAGSSRTSVSQASGLLLETPVQPAFSLPKGEREVVTHSDEGGVASLGLAQRVPLRENREMSHTRDSHDSHLMPSPAPVAQPLPGHVVPCPSPFGRAQRVPSPGPPTLTSYSVLRRLTVQPKTRFTPMPSTPRVQQAQWLRGVSPQSCSEDPALPWEQVAVRLFDQESCIRSLEGSGKPPVATPSGPHSNRTPSLQEVKIQRIGILQQLLRQEVEGLVGGQCVPLNGGSSLDMVELQPLLTEISRTLNATEHNSGTSHLPGLLKHSGLPKPCLPEECGEPQPCPPAEPGPPEAFCRSEPEIPEPSLQEQLEVPEPYPPAEPRPLESCCRSEPEIPESSRQEQLEVPEPCPPAEPRPLESYCRIEPEIPESSRQEQLEVPEPCPPAEPGPLQPSTQGQSGPPGPCPRVELGASEPCTLEHRSLESSLPPCCSQWAPATTSLIFSSQHPLCASPPICSLQSLRPPAGQAGLSNLAPRTLALRERLKSCLTAIHCFHEARLDDECAFYTSRAPPSGPTRVCTNPVATLLEWQDALCFIPVGSAAPQGSP

SEQ ID NO: 756503 - protein, 314 aa, Homo sapiens
MVELQPLLTEISRTLNATEHNSGTSHLPGLLKHSGLPKPCLPEECGEPQPCPPAEPGPPEAFCRSEPEIPEPSLQEQLEVPEPYPPAEPRPLESCCRSEPEIPESSRQEQLEVPEPCPPAEPRPLESYCRIEPEIPESSRQEQLEVPEPCPPAEPGPLQPSTQGQSGPPGPCPRVELGASEPCTLEHRSLESSLPPCCSQWAPATTSLIFSSQHPLCASPPICSLQSLRPPAGQAGLSNLAPRTLALRERLKSCLTAIHCFHEARLDDECAFYTSRAPPSGPTRVCTNPVATLLEWQDALCFIPVGSAAPQGSP

SEQ ID NO: 756504 - protein, 285 aa, Homo sapiens
MVELQPLLTEISRTLNATEHNSGTSHLPGLLKHSGLPKPCLPEECGEPQPCPPAEPGPPEAFCRSEPEIPEPSLQEQLEVPEPYPPAEPRPLESCCRSEPEIPESSRQEQLEEQLEVPEPCPPAEPGPLQPSTQGQSGPPGPCPRVELGASEPCTLEHRSLESSLPPCCSQWAPATTSLIFSSQHPLCASPPICSLQSLRPPAGQAGLSNLAPRTLALRERLKSCLTAIHCFHEARLDDECAFYTSRAPPSGPTRVCTNPVATLLEWQDALCFIPVGSAAPQGSP

SEQ ID NO: 756505 - protein, 264 aa, Homo sapiens
MTTRQATKDPLLRGVSPTPSKIPVRSQKRTPFPTVTSCAVDQENQDPRRWVQKPPLNIQRPLVDSAGPRPKARHQAETSQRLVGISQPRNPLEELRPSPRGQNVGPGPPAQTEAPGTIEFVADPAALATILSGEGVKSCHLGRQPSLAKRVLVRGSQGGTTQRVQGVRASAYLAPRTPTHRLDPARASCFSRLEGPGPRGRTLCPQRLQALISPSGPSFHPSTRPSFQELRRETAGSSRDLQLRPGASREFWHSPLWGGNKGAN

SEQ ID NO: 756506 - protein, 144 aa, Homo sapiens
MTTRQATKDPLLRGVSPTPSKIPVRSQKRTPFPTVTSCAVDQENQDPRRWVQKPPLNIQRPLVDSAGPRPKARHQAETSQRLVGISQPRNPLEELRPSPRGQNVGPGPPAQTVLVPAPGKLFALRRSPFPPAKCHLARCHGLYL

SEQ ID NO: 756507 - protein, 126 aa, Homo sapiens
MTTRQATKDPLLRGVSPTPSKIPVRSQKRTPFPTVTSCAVDQENQDPRRWVQKPPLNIQRPLVDSAGPRPKARHQAETSQRLVGISQPRNPLEELRPSPRGQNVGPGPPAQTGAMACTCNHSYSGG

SEQ ID NO: 756508 - protein, 126 aa, Homo sapiens
MTTRQATKDPLLRGVSPTPSKIPVRSQKRTPFPTVTSCAVDQENQDPRRWVQKPPLNIQRPLVDSAGPRPKARHQAETSQRLVGISQPRNPLEELRPSPRGQNVGPGPPAQTGTCWSHGNTASMAE

SEQ ID NO: 756509 - protein, 125 aa, Homo sapiens
MTTRQATKDPLLRGVSPTPSKIPVRSQKRTPFPTVTSCAVDQENQDPRRWVQKPPLNIQRPLVDSAGPRPKARHQAETSQRLVGISQPRNPLEELRPSPRGQNVGPGPPAQTAKCHLARCHGLYL

SEQ ID NO: 756510 - protein, 689 aa, Homo sapiens
MADLEAVLADVSYLMAMEKSKATPAARASKKILLPEPSIRSVMQKYLEDRGEVTFEKIFSQKLGYLLFRDFCLNHLEEARPLVEFYEEIKKYEKLETEEERVARSREIFDSYIMKELLACSHPFSKSATEHVQGHLGKKQVPPDLFQPYIEEICQNLRGDVFQKFIESDKFTRFCQWKNVELNIHLTMNDFSVHRIIGRGGFGEVYGCRKADTGKMYAMKCLDKKRIKMKQGETLALNERIMLSLVSTGDCPFIVCMSYAFHTPDKLSFILDLMNGGDLHYHLSQHGVFSEADMRFYAAEIILGLEHMHNRFVVYRDLKPANILLDEHGHVRISDLGLACDFSKKKPHASVGTHGYMAPEVLQKGVAYDSSADWFSLGCMLFKLLRGHSPFRQHKTKDKHEIDRMTLTMAVELPDSFSPELRSLLEGLLQRDVNRRLGCLGRGAQEVKESPFFRSLDWQMVFLQKYPPPLIPPRGEVNAADAFDIGSFDEEDTKGIKLLDSDQELYRNFPLTISERWQQEVAETVFDTINAETDRLEARKKAKNKQLGHEEDYALGKDCIMHGYMSKMGNPFLTQWQRRYFYLFPNRLEWRGEGEAPQSLLTMEEIQSVEETQIKERKCLLLKIRGGKQFILQCDSDPELVQWKKELRDAYREAQQLVQRVPKMKNKPRSPVVELSKVPLVQRGSANGL

SEQ ID NO: 756511 - protein, 689 aa, Homo sapiens; identical to SEQ ID NO: 756510

SEQ ID NO: 756512 - protein, 668 aa, Homo sapiens
RTGVVCPCGTDGETEASIRSVMQKYLEDRGEVTFEKIFSQKLGYLLFRDFCLNHLEEARPLVEFYEEIKKYEKLETEEERVARSREIFDSYIMKELLACSHPFSKSATEHVQGHLGKKQVPPDLFQPYIEEICQNLRGDVFQKFIESDKFTRFCQWKNVELNIHLTMNDFSVHRIIGRGGFGEVYGCRKADTGKMYAMKCLDKKRIKMKQGETLALNERIMLSLVSTGDCPFIVCMSYAFHTPDKLSFILDLMNGGDLHYHLSQHGVFSEADMRFYAAEIILGLEHMHNRFVVYRDLKPANILLDEHGHVRISDLGLACDFSKKKPHASVGTHGYMAPEVLQKGVAYDSSADWFSLGCMLFKLLRGHSPFRQHKTKDKHEIDRMTLTMAVELPDSFSPELRSLLEGLLQRDVNRRLGCLGRGAQEVKESPFFRSLDWQMVFLQKYPPPLIPPRGEVNAADAFDIGSFDEEDTKGIKLLDSDQELYRNFPLTISERWQQEVAETVFDTINAETDRLEARKKAKNKQLGHEEDYALGKDCIMHGYMSKMGNPFLTQWQRRYFYLFPNRLEWRGEGEAPQSLLTMEEIQSVEETQIKERKCLLLKIRGGKQFILQCDSDPELVQWKKELRDAYREAQQLVQRVPKMKNKPRSPVVELSKVPLVQRGSANGL

SEQ ID NO: 756513 - protein, 645 aa, Homo sapiens
GDCGGSPEVPLKKIFYQKLRYLLFRDFCLNHLEEARPLVEFYEEIKKYEKLETEEERVARSREIFDSYIMKELLACSHPFSKSATEHVQGHLGKKQVPPDLFQPYIEEICQNLRGDVFQKFIESDKFTRFCQWKNVELNIHLTMNDFSVHRIIGRGGFGEVYGCRKADTGKMYAMKCLDKKRIKMKQGETLALNERIMLSLVSTGDCPFIVCMSYAFHTPDKLSFILDLMNGGDLHYHLSQHGVFSEADMRFYAAEIILGLEHMHNRFVVYRDLKPANILLDEHGHVRISDLGLACDFSKKKPHASVGTHGYMAPEVLQKGVAYDSSADWFSLGCMLFKLLRGHSPFRQHKTKDKHEIDRMTLTMAVELPDSFSPELRSLLEGLLQRDVNRRLGCLGRGAQEVKESPFFRSLDWQMVFLQKYPPPLIPPRGEVNAADAFDIGSFDEEDTKGIKLLDSDQELYRNFPLTISERWQQEVAETVFDTINAETDRLEARKKAKNKQLGHEEDYALGKDCIMHGYMSKMGNPFLTQWQRRYFYLFPNRLEWRGEGEAPQSLLTMEEIQSVEETQIKERKCLLLKIRGGKQFILQCDSDPELVQWKKELRDAYREAQQLVQRVPKMKNKPRSPVVELSKVPLVQRGSANGL

SEQ ID NO: 756514 - protein, 875 aa, Homo sapiens
RRRRRPDCSPGGSGAEPGPGPSRRHGAAPPVSGGERTAGAEQGQAGGVGARGRASRGRAGPSAERAGAAAAAAAAGGGSAAAKMADLEAVLADVSYLMAMEKSKATPAARASKKILLPEPSIRSVMQKYLEDRGEVTFEKIFSQKLGYLLFRDFCLNHLEEARPLVEFYEEIKKYEKLETEEERVARSREIFDSYIMKELLACSHPFSKSATEHVQGHLGKKQVPPDLFQPYIEEICQNLRGDVFQKFIESDKFTRFCQWKNVELNIHVSGLGWGMESHAPCCSSPGSWACGLAGRGRSGDVCPLAPRAVAMGVRAGIPAWGGRSRYICGKDGQDMGMGTLAWGQPLLPRCLCPRAGQRQPVVTAAVAAPQLTMNDFSVHRIIGRGGFGEVYGCRKADTGKMYAMKCLDKKRIKMKQGETLALNERIMLSLVSTGDCPFIVCMSYAFHTPDKLSFILDLMNGGDLHYHLSQHGVFSEADMRFYAAEIILGLEHMHNRFVVYRDLKPANILLDEHGHVRISDLGLACDFSKKKPHASVGTHGYMAPEVLQKGVAYDSSADWFSLGCMLFKLLRGHSPFRQHKTKDKHEIDRMTLTMAVELPDSFSPELRSLLEGLLQRDVNRRLGCLGRGAQEVKESPFFRSLDWQMVFLQKYPPPLIPPRGEVNAADAFDIGSFDEEDTKGIKLLDSDQELYRNFPLTISERWQQEVAETVFDTINAETDRLEARKKAKNKQLGHEEDYALGKDCIMHGYMSKMGNPFLTQWQRRYFYLFPNRLEWRGEGEAPQSLLTMEEIQSVEETQIKERKCLLLKIRGGKQFILQCDSDPELVQWKKELRDAYREAQQLVQRVPKMKNKPRSPVVELSKVPLVQRGSANGL

SEQ ID NO: 756515 - protein, 534 aa, Homo sapiens
KARYEAGVNRPRTDKFTRFCQWKNVELNIHLTMNDFSVHRIIGRGGFGEVYGCRKADTGKMYAMKCLDKKRIKMKQGETLALNERIMLSLVSTGDCPFIVCMSYAFHTPDKLSFILDLMNGGDLHYHLSQHGVFSEADMRFYAAEIILGLEHMHNRFVVYRDLKPANILLDEHGHVRISDLGLACDFSKKKPHASVGTHGYMAPEVLQKGVAYDSSADWFSLGCMLFKLLRGHSPFRQHKTKDKHEIDRMTLTMAVELPDSFSPELRSLLEGLLQRDVNRRLGCLGRGAQEVKESPFFRSLDWQMVFLQKYPPPLIPPRGEVNAADAFDIGSFDEEDTKGIKLLDSDQELYRNFPLTISERWQQEVAETVFDTINAETDRLEARKKAKNKQLGHEEDYALGKDCIMHGYMSKMGNPFLTQWQRRYFYLFPNRLEWRGEGEAPQSLLTMEEIQSVEETQIKERKCLLLKIRGGKQFILQCDSDPELVQWKKELRDAYREAQQLVQRVPKMKNKPRSPVVELSKVPLVQRGSANGL

SEQ ID NO: 756516 - protein, 333 aa, Homo sapiens [sequence omitted]

SEQ ID NO: 756517 - protein, 689 aa, Homo sapiens; identical to SEQ ID NO: 756510

SEQ ID NO: 756518 - protein, 471 aa, Homo sapiens
KARYEAGCESAEDGETLALNERIMLSLVSTGDCPFIVCMSYAFHTPDKLSFILDLMNGGDLHYHLSQHGVFSEADMRFYAAEIILGLEHMHNRFVVYRDLKPANILLDEHGHVRISDLGLACDFSKKKPHASVGTHGYMAPEVLQKGVAYDSSADWFSLGCMLFKLLRGHSPFRQHKTKDKHEIDRMTLTMAVELPDSFSPELRSLLEGLLQRDVNRRLGCLGRGAQEVKESPFFRSLDWQMVFLQKYPPPLIPPRGEVNAADAFDIGSFDEEDTKGIKLLDSDQELYRNFPLTISERWQQEVAETVFDTINAETDRLEARKKAKNKQLGHEEDYALGKDCIMHGYMSKMGNPFLTQWQRRYFYLFPNRLEWRGEGEAPQSLLTMEEIQSVEETQIKERKCLLLKIRGGKQFILQCDSDPELVQWKKELRDAYREAQQLVQRVPKMKNKPRSPVVELSKVPLVQRGSANGL

SEQ ID NO: 756519 - protein, 349 aa, Homo sapiens
MIPEDKTKASPGTHGYMAPEVLQKGVAYDSSADWFSLGCMLFKLLRGHSPFRQHKTKDKHEIDRMTLTMAVELPDSFSPELRSLLEGLLQRDVNRRLGCLGRGAQEVKESPFFRSLDWQMVFLQKYPPPLIPPRGEVNAADAFDIGSFDEEDTKGIKLLDSDQELYRNFPLTISERWQQEVAETVFDTINAETDRLEARKKAKNKQLGHEEDYALGKDCIMHGYMSKMGNPFLTQWQRRYFYLFPNRLEWRGEGEAPQSLLTMEEIQSVEETQIKERKCLLLKIRGGKQFILQCDSDPELVQWKKELRDAYREAQQLVQRVPKMKNKPRSPVVELSKVPLVQRGSANGL

SEQ ID NO: 756520 - protein, 296 aa, Homo sapiens
RGSLIGSRIDRMTLTMAVELPDSFSPELRSLLEGLLQRDVNRRLGCLGRGAQEVKESPFFRSLDWQMVFLQKYPPPLIPPRGEVNAADAFDIGSFDEEDTKGIKLLDSDQELYRNFPLTISERWQQEVAETVFDTINAETDRLEARKKAKNKQLGHEEDYALGKDCIMHGYMSKMGNPFLTQWQRRYFYLFPNRLEWRGEGEAPQSLLTMEEIQSVEETQIKERKCLLLKIRGGKQFILQCDSDPELVQWKKELRDAYREAQQLVQRVPKMKNKPRSPVVELSKVPLVQRGSANGL

SEQ ID NO: 756521 - protein, 166 aa, Homo sapiens
QKRFTAIAETDRLEARKKAKNKQLGHEEDYALGKDCIMHGYMSKMGNPFLTQWQRRYFYLFPNRLEWRGEGEAPQSLLTMEEIQSVEETQIKERKCLLLKIRGGKQFILQCDSDPELVQWKKELRDAYREAQQLVQRVPKMKNKPRSPVVELSKVPLVQRGSANGL

SEQ ID NO: 756522 - protein, 159 aa, Homo sapiens
MHGYMSKMGNPFLTQWQRRYFYLFPNRLEWRGEGEAPVRSPAGVREPGFRVAGRPGSYLHHPSLALQQSLLTMEEIQSVEETQIKERKCLLLKIRGGKQFILQCDSDPELVQWKKELRDAYREAQQLVQRVPKMKNKPRSPVVELSKVPLVQRGSANGL

SEQ ID NO: 756523 - protein, 105 aa, Homo sapiens
DAWVDPRVRGEAPQSLLTMEEIQSVEETQIKERKCLLLKIRGGKQFILQCDSDPELVQWKKELRDAYREAQQLVQRVPKMKNKPRSPVVELSKVPLVQRGSANGL

SEQ ID NO: 756524 - protein, 136 aa, Homo sapiens
GEYLRFGIWQRLARGEPAQAECIQASPYFPHKPFSELQGEGEAPQSLLTMEEIQSVEETQIKERKCLLLKIRGGKQFILQCDSDPELVQWKKELRDAYREAQQLVQRVPKMKNKPRSPVVELSKVPLVQRGSANGL

SEQ ID NO: 756525 - protein, 601 aa, Homo sapiens
RRRRRPDCSPGGSGAEPGPGPSRRHGAAPPVSGGERTAGAEQGQAGGVGARGRASRGRAGPSAERAGAAAAAAAAGGGSAAAKMADLEAVLADVSYLMAMEKSKATPAARASKKILLPEPSIRSVMQKYLEDRGEVTFEKIFSQKLGYLLFRDFCLNHLEEARPLVEFYEEIKKYEKLETEEERVARSREIFDSYIMKELLACSHPFSKSATEHVQGHLGKKQVPPDLFQPYIEEICQNLRGDVFQKFIESDKFTRFCQWKNVELNIHLTMNDFSVHRIIGRGGFGEVYGCRKADTGKMYAMKCLDKKRIKMKQGETLALNERIMLSLVSTGDCPFIVCMSYAFHTPDKLSFILDLMNGGDLHYHLSQHGVFSEADMRFYAAEIILGLEHMHNRFVVYRDLKPANILLDEHGHVRISDLGLACDFSKKKPHASVGTHGYMAPEVLQKGVAYDSSADWFSLGCMLFKLLRGHSPFRQHKTKDKHEIDRMTLTMAVELPDSFSPELRSLLEGLLQRDVNRRLGCLGRGAQEVKESPFFRSLDWQMVFLQKYPPPGSPPEGGWTACEAFRQLGPRLGGAQGPRFWAGVSEAYGRFPLHSGGGAR

SEQ ID NO: 756526 - protein, 529 aa, Homo sapiens
RRRRRPDCSPGGSGAEPGPGPSRRHGAAPPVSGGERTAGAEQGQAGGVGARGRASRGRAGPSAERAGAAAAAAAAGGGSAAAKMADLEAVLADVSYLMAMEKSKATPAARASKKILLPEPSIRSVMQKYLEDRGEVTFEKIFSQKLGYLLFRDFCLNHLEEARPLVEFYEEIKKYEKLETEEERVARSREIFDSYIMKELLACSHPFSKSATEHVQGHLGKKQVPPDLFQPYIEEICQNLRGDVFQKFIESDKFTRFCQWKNVELNIHLTMNDFSVHRIIGRGGFGEVYGCRKADTGKMYAMKCLDKKRIKMKQGETLALNERIMLSLVSTGDCPFIVCMSYAFHTPDKLSFILDLMNGGDLHYHLSQHGVFSEADMRFYAAEIILGLEHMHNRFVVYRDLKPANILLDEHGHVRISDLGLACDFSKKKPHASVGTHGYMAPEVLQKGVAYDSSADWFSLGCMLFKLLRGHSPFRQHKTKDKHEIDRMTLTMAVELPDSFSPELRSLLEGLLQRDVNRRLGCLGRGLRR

SEQ ID NO: 756527 - protein, 431 aa, Homo sapiens
MADLEAVLADVSYLMAMEKSKATPAARASKKILLPEPSIRSVMQKYLEDRGEVTFEKIFSQKLGYLLFRDFCLNHLEEARPLVEFYEEIKKYEKLETEEERVARSREIFDSYIMKELLACSHPFSKSATEHVQGHLGKKQVPPDLFQPYIEEICQNLRGDVFQKFIESDKFTRFCQWKNVELNIHLTMNDFSVHRIIGRGGFGEVYGCRKADTGKMYAMKCLDKKRIKMKQGETLALNERIMLSLVSTGDCPFIVCMSYAFHTPDKLSFILDLMNGGDLHYHLSQHGVFSEADMRFYAAEIILGLEHMHNRFVVYRDLKPANILLDEHGHVRISDLGLACDFSKKKPHASVGTHGYMAPEVLQKGVAYDSSADWFSLGCMLFKLLRGHSPFRQHKTKDKHEIDRMTLTMALECRSFPEIVLVEGVRGVFRG

SEQ ID NO: 756528 - protein, 600 aa, Homo sapiens
RRRRRPDCSPGGSGAEPGPGPSRRHGAAPPVSGGERTAGAEQGQAGGVGARGRASRGRAGPSAERAGAAAAAAAAGGGSAAAKMADLEAVLADVSYLMAMEKSKATPAARASKKILLPEPSIRSVMQKYLEDRGEVTFEKIFSQKLGYLLFRDFCLNHLEEARPLVEFYEEIKKYEKLETEEERVARSREIFDSYIMKELLACSHPFSKSATEHVQGHLGKKQVPPDLFQPYIEEICQNLRGDVFQKFIESDKFTRFCQWKNVELNIHLTMNDFSVHRIIGRGGFGEVYGCRKADTGKMYAMKCLDKKRIKMKQGETLALNERIMLSLVSTGDCPFIVCMSYAFHTPDKLSFILDLMNGGDLHYHLSQHGVFSEADMRFYAAEIILGLEHMHNRFVVYRDLKMAANMYRVGDYVYFENSSSNPDLIRRIEELNKTANGNVEAKVVCFYRRRDISSTLIALADKHAREIEEEMENPEMVDLPEKLKHQLRHRELFLSRQLESLPATHIRGKCSVTLLNETESLKSYLEREDFFFYSLVYDPQQKTLLADKGEIRVGNRYQADITELLKEGEEDGRDQSRSETQVWEQHNPLTDKQIDQFLE

SEQ ID NO: 756529 - protein, 314 aa, Homo sapiens
RRRRRPDCSPGGSGAEPGPGPSRRHGAAPPVSGGERTAGAEQGQAGGVGARGRASRGRAGPSAERAGAAAAAAAAGGGSAAAKMADLEAVLADVSYLMAMEKSKATPAARASKKILLPEPSIRSVMQKYLEDRGEVTFEKIFSQKLGYLLFRDFCLNHLEEARPLVEFYEEIKKYEKLETEEERVARSREIFDSYIMKELLACSHPFSKSATEHVQGHLGKKQVPPDLFQPYIEEICQNLRGDVFQKFIESDKFTRFCQWKNVELNIHLTMNDFSVHRIIGRGGFGEVYGCRKADTGKMYASAAKSSFIHQGIR

SEQ ID NO: 756530 - protein, 297 aa, Homo sapiens
RRRRRPDCSPGGSGAEPGPGPSRRHGAAPPVSGGERTAGAEQGQAGGVGARGRASRGRAGPSAERAGAAAAAAAAGGGSAAAKMADLEAVLADVSYLMAMEKSKATPAARASKKILLPEPSIRSVMQKYLEDRGEVTFEKIFSQKLGYLLFRDFCLNHLEEARPLVEFYEEIKKYEKLETEEERVARSREIFDSYIMKELLACSHPFSKSATEHVQGHLGKKQVPPDLFQPYIEEICQNLRGDVFQKFIESDKFTRFCQWKNVELNIHSDHERLPACFAIIGLEALLCRGANRLPRV

SEQ ID NO: 756531 - protein, 276 aa, Homo sapiens
RRRRRPDCSPGGSGAEPGPGPSRRHGAAPPVSGGERTAGAEQGQAGGVGARGRASRGRAGPSAERAGAAAAAAAAGGGSAAAKMADLEAVLADVSYLMAMEKSKATPAARASKKILLPEPSIRSVMQKYLEDRGEVTFEKIFSQKLGYLLFRDFCLNHLEEARPLVEFYEEIKKYEKLETEEERVARSREIFDSYIMKELLACSHPFSKSATEHVQGHLGKKQVPPDLFQPYIEEICQNLRGDVFQKFIESDKFTRILPAGRTVDAQRSSMSTLQA

SEQ ID NO: 756532 - protein, 72 aa, Homo sapiens
GQAGWGEPQLTELGLAVQSDPELVQWKKELRDAYREAQQLVQRVPKMKNKPRSPVVELSKVPLVQRGSANGL

SEQ ID NO: 756533 - protein, 689 aa, Homo sapiens; identical to SEQ ID NO: 756510

SEQ ID NO: 756534 - protein, 647 aa, Homo sapiens
MQKYLEDRGEVTFEKIFSQKLGYLLFRDFCLNHLEEARPLVEFYEEIKKYEKLETEEERVARSREIFDSYIMKELLACSHPFSKSATEHVQGHLGKKQVPPDLFQPYIEEICQNLRGDVFQKFIESDKFTRFCQWKNVELNIHLTMNDFSVHRIIGRGGFGEVYGCRKADTGKMYAMKCLDKKRIKMKQGETLALNERIMLSLVSTGDCPFIVCMSYAFHTPDKLSFILDLMNGGDLHYHLSQHGVFSEADMRFYAAEIILGLEHMHNRFVVYRDLKPANILLDEHGHVRISDLGLACDFSKKKPHASVGTHGYMAPEVLQKGVAYDSSADWFSLGCMLFKLLRGHSPFRQHKTKDKHEIDRMTLTMAVELPDSFSPELRSLLEGLLQRDVNRRLGCLGRGAQEVKESPFFRSLDWQMVFLQKYPPPLIPPRGEVNAADAFDIGSFDEEDTKGIKLLDSDQELYRNFPLTISERWQQEVAETVFDTINAETDRLEARKKAKNKQLGHEEDYALGKDCIMHGYMSKMGNPFLTQWQRRYFYLFPNRLEWRGEGEAPQSLLTMEEIQSVEETQIKERKCLLLKIRGGKQFILQCDSDPELVQWKKELRDAYREAQQLVQRVPKMKNKPRSPVVELSKVPLVQRGSANGL

SEQ ID NO: 756535 - protein, 802 aa, Homo sapiens
RRRRRPDCSPGGSGAEPGPGPSRRHGAAPPVSGGERTAGAEQGQAGGVGARGRASRGRAGPSAERAGAAAAAAAAGGGSAAAKMADLEAVLADVSYLMAMEKSKATPAARASKKILLPEPSIRSVMQKYLEDRGEVTFEKIFSQKLGYLLFRDFCLNHLEEARPLVEFYEEIKKYEKLETEEERVARSREIFDSYIMKELLACSHPFSKSATEHVQGHLGKKQVPPDLFQPYIEEICQNLRGDVFQKFIESDKFTRFCQWKNVELNIHLTMNDFSVHRIIGRGGFGEVYGCRKADTGKMYAMKCLDKKRIKMKQGETLALNERIMLSLVSTGDCPFIVCMSYAFHTPDKLSFILDLMNGGDLHYHLSQHGVFSEADMRFYAAEIILGLEHMHNRFVVYRDLKPANILLDEHGHVRISDLGLACDFSKKKPHASVGTHGYMAPEVLQKGVAYDSSADWFSLGCMLFKLLRGHSPFRQHKTKDKHEIDRMTLTMAVELPDSFSPELRSLLEGLLQRDVNRRLGCLGRGAQEVKESPFFRSLDWQMVFLQKYPPPLIPPRGEVNAADAFDIGSFDEEDTKGIKLLDSDQELYRNFPLTISERWQQEVAETVFDTINAETDRLEARKKAKNKQLGHEEDYALGKDCIMHGYMSKMGNPFLTQWQRRYFYLFPNRLEWRGEGEAPVRSPAGVREPGFRVAGRPGSYLHHPSLALQQSLLTMEEIQSVEETQIKERKCLLLKIRGGKQFILQCDSDPELVQWKKELRDAYREAQQLVQRVPKMKNKPRSPVVELSKVPLVQRGSANGL

SEQ ID NO: 756536 - protein, 584 aa, Homo sapiens
ELGLAYYVLKELLACSHPFSKSATEHVQGHLGKKQVPPDLFQPYIEEICQNLRGDVFQKFIESDKFTRFCQWKNVELNIHLTMNDFSVHRIIGRGGFGEVYGCRKADTGKMYAMKCLDKKRIKMKQGETLALNERIMLSLVSTGDCPFIVCMSYAFHTPDKLSFILDLMNGGDLHYHLSQHGVFSEADMRFYAAEIILGLEHMHNRFVVYRDLKPANILLDEHGHVRISDLGLACDFSKKKPHASVGTHGYMAPEVLQKGVAYDSSADWFSLGCMLFKLLRGHSPFRQHKTKDKHEIDRMTLTMAVELPDSFSPELRSLLEGLLQRDVNRRLGCLGRGAQEVKESPFFRSLDWQMVFLQKYPPPLIPPRGEVNAADAFDIGSFDEEDTKGIKLLDSDQELYRNFPLTISERWQQEVAETVFDTINAETDRLEARKKAKNKQLGHEEDYALGKDCIMHGYMSKMGNPFLTQWQRRYFYLFPNRLEWRGEGEAPQSLLTMEEIQSVEETQIKERKCLLLKIRGGKQFILQCDSDPELVQWKKELRDAYREAQQLVQRVPKMKNKPRSPVVELSKVPLVQRGSANGL

SEQ ID NO: 756537 - protein, 540 aa, Homo sapiens [sequence omitted]

SEQ ID NO: 756538 - protein, 689 aa, Homo sapiens; identical to SEQ ID NO: 756510

SEQ ID NO: 756539 - protein, 689 aa, Homo sapiens; identical to SEQ ID NO: 756510

SEQ ID NO: 756540 - protein, 192 aa, Homo sapiens
GIDKQPVFIDATSLTISERWQQEVAETVFDTINAETDRLEARKKAKNKQLGHEEDYALGKDCIMHGYMSKMGNPFLTQWQRRYFYLFPNRLEWRGEGEAPQSLLTMEEIQSVEETQIKERKCLLLKIRGGKQFILQCDSDPELVQWKKELRDAYREAQQLVQRVPKMKNKPRSPVVELSKVPLVQRGSANGL

SEQ ID NO: 756541 - protein, 220 aa, Homo sapiens
MVKPCLYQKIPKKLAGHGGTRLYSQLPGRLRREDRLNLGGGGCSEPRLCHSPPAWATEWRPCLKTKKKPRWGRLSLLCLSPQDYALGKDCIMHGYMSKMGNPFLTQWQRRYFYLFPNRLEWRGEGEAPQSLLTMEEIQSVEETQIKERKCLLLKIRGGKQFILQCDSDPELVQWKKELRDAYREAQQLVQRVPKMKNKPRSPVVELSKVPLVQRGSANGL

SEQ ID NO: 756542 - protein, 109 aa, Homo sapiens
SIGAEVRLGVSPSLALQQSLLTMEEIQSVEETQIKERKCLLLKIRGGKQFILQCDSDPELVQWKKELRDAYREAQQLVQRVPKMKNKPRSPVVELSKVPLVQRGSANGL

SEQ ID NO: 756543 - protein, 588 aa, Homo sapiens
RRRRRPDCSPGGSGAEPGPGPSRRHGAAPPVSGGERTAGAEQGQAGGVGARGRASRGRAGPSAERAGAAAAAAAAGGGSAAAKMADLEAVLADVSYLMAMEKSKATPAARASKKILLPEPSIRSVMQKYLEDRGEVTFEKIFSQKLGYLLFRDFCLNHLEEARPLVEFYEEIKKYEKLETEEERVARSREIFDSYIMKELLACSHPFSKSATEHVQGHLGKKQVPPDLFQPYIEEICQNLRGDVFQKFIESDKFTRFCQWKNVELNIHLTMNDFSVHRIIGRGGFGEVYGCRKADTGKMYAMKCLDKKRIKMKQGETLALNERIMLSLVSTGDCPFIVCMSYAFHTPDKLSFILDLMNGGDLHYHLSQHGVFSEADMRFYAAEIILGLEHMHNRFVVYRDLKPANILLDEHGHVRISDLGLACDFSKKKPHASVGTHGYMAPEVLQKGVAYDSSADWFSLGCMLFKLLRGHSPFRQHKTKDKHEIDRMTLTMAVELPDSFSPELRSLLEGLLQRDVNRRLGCLGRGAQEVKESPFFRSLDWQMVFLQKYPLPPAGSPPNERGKGETAGLEPPFFEQFVGFPFWLGGDG

SEQ ID NO: 756544 - protein, 292 aa, Homo sapiens
RRRRRPDCSPGGSGAEPGPGPSRRHGAAPPVSGGERTAGAEQGQAGGVGARGRASRGRAGPSAERAGAAAAAAAAGGGSAAAKMADLEAVLADVSYLMAMEKSKATPAARASKKILLPEPSIRSVMQKYLEDRGEVTFEKIFSQKLGYLLFRDFCLNHLEEARPLVEFYEEIKKYEKLETEEERVARSREIFDSYIMKELLACSHPFSKSATEHVQGHLGKKQVPPDLFQPYIEEICQNLRGDVFQKFIERVALAAGAATLPAVPSCPNPQHPGSGTTARHLQVGPYWPRLA

SEQ ID NO: 756545 - protein, 481 aa, Homo sapiens
RRRRRPDCSPGGSGAEPGPGPSRRHGAAPPVSGGERTAGAEQGQAGGVGARGRASRGRAGPSAERAGAAAAAAAAGGGSAAAKMADLEAVLADVSYLMAMEKSKATPAARASKKILLPEPSIRSVMQKYLEDRGEVTFEKIFSQKLGYLLFRDFCLNHLEEARPLVEFYEEIKKYEKLETEEERVARSREIFDSYIMKELLACSHPFSKSATEHVQGHLGKKQVPPDLFQPYIEEICQNLRGDVFQKFIESDKFTRFCQWKNVELNIHLTMNDFSVHRIIGRGGFGEVYGCRKADTGKMYAMKCLDKKRIKMKQGETLALNERIMLSLVSTGDCPFIVCMSYAFHTPDKLSFILDLMNGGDLHYHLSQHGVFSEADMRFYAAEIILGLEHMHNRFVVYRDLKPANILLDEHGHVRISDLGLACDFSKKKPHASVGTHGYMAPEVLQKGAACVVSRLLPPGAGLAHPPLPSTHSPGRFFADF

SEQ ID NO: 756546 - protein, 358 aa, Homo sapiens
MADLEAVLADVSYLMAMEKSKATPAARASKKILLPEPSIRSVMQKYLEDRGEVTFEKIFSQKLGYLLFRDFCLNHLEEARPLVEFYEEIKKYEKLETEEERVARSREIFDSYIMKELLACSHPFSKSATEHVQGHLGKKQVPPDLFQPYIEEICQNLRGDVFQKFIESDKFTRFCQWKNVELNIHLTMNDFSVHRIIGRGGFGEVYGCRKADTGKMYAMKCLDKKRIKMKQGETLALNERIMLSLVSTGDCPFIVCMSYAFHTPDKLSFILDLMNGGDLHYHLSQHGVFSEADMRFYAAEIILGLEHMHNRFVVYRDLKGERPCCPQAGPPWLSSPSSRHPGHQAQRSGAPGTWPPRI

SEQ ID NO: 756547 - protein, 174 aa, Homo sapiens
DVGWLQVPVDHEAVVHVLQAQDDLGRKKRMSASEKTPCQPTSFWTSMATCGSRTWAWPVTSPRRSPMPASTPSAQDGAGQVGGQHSKEAGWGLSVCPPSWPISVPPPRLASPTAHVLSVPPPRPPHAPSCQSRCLCGVAPSPPRGWVGAPSPPVYSFPGAFLCRFLNVILKSEK

SEQ ID NO: 756548 - protein, 54 aa, Homo sapiens
MVFRHLCPPMCPCPIHLVKLLDSDQELYRNFPLTISERWQQEVAETVFDTINAE

SEQ ID NO: 756549 - protein, 76 aa, Homo sapiens
IKKYEKLETEEERVARSREIFDSYIMKELLACSHVSVLSWPCVLAQSHLQIGRGREDPAENSWPPLSSPALLEECH

SEQ ID NO: 756550 - protein, 111 aa, Homo sapiens
PEQRDLHTETPSWAPGTMAPLKMLALVTLLLGASLQHIHAARGTNVGRECCLEYFKGAIPLRKLKTWYQTSEDCSRDAIVFVTVQGRAICSDPNNKRVKNAVKYLQSLERS

SEQ ID NO: 756551 - protein, 124 aa, Homo sapiens
RGRRLAREQSLPWDLGSPLSPQRNSLSAAAPSSGCRGHWGPPAPKHLRHGEVTVCRQGCFCRSLNSRRTGSGLNAWAPQHPAVTELWLEGEGVDAENQGRVQFLVLSSKFFRLWARELVSQGES

SEQ ID NO: 756552 - protein, 91 aa, Homo sapiens
TRRPIKAAVPGARLIRGDGLRALIDGVRGRRQMTAFGLGIPTFLVMQPSGSQPRFPALTQNGVALVRTPLTSVYLRVREPAHMTVWRKFFP

SEQ ID NO: 756553 - protein, 123 aa, Homo sapiens
TRRPIKAAVPGARLIRGDGLRALIDGVRGRRQMTAFGLGIPTFLVMQPSGSQPRFPALTQNGVALVRTPLTSVYLRVRPILPAGLCLGVTLPELAPTTVATVMLMCDCCQEPAHMTVWRKFFP

SEQ ID NO: 756554 - protein, 107 aa, Homo sapiens
ALGFSCLLPAPRGSSGNVCWGLGIPTFLVMQPSGSQPRFPALTQNGVALVRTPLTSVYLRVRPILPAGLCLGVTLPELAPTTVATVMLMCDCCQEPAHMTVWRKFFP

SEQ ID NO: 756555 - protein, 107 aa, Homo sapiens; identical to SEQ ID NO: 756554

SEQ ID NO: 756556 - protein, 107 aa, Homo sapiens; identical to SEQ ID NO: 756554

SEQ ID NO: 756557 - protein, 107 aa, Homo sapiens; identical to SEQ ID NO: 756554

SEQ ID NO: 756558 - protein, 1114 aa, Homo sapiens
MACPWKFLFKTKFHQYAMNGEKDINNNVEKAPCATSSPVTQDDLQYHNLSKQQNESPQPLVETGKKSPESLVKLDATPLSSPRHVRIKNWGSGMTFQDTLHHKAKGILTCRSKSCLGSIMTPKSLTRGPRDKPTPPDELLPQAIEFVNQYYGSFKEAKIEEHLARVEAVTKEIETTGTYQLTGDELIFATKQAWRNAPRCIGRIQWSNLQVFDARSCSTAREMFEHICRHVRYSTNNGNIRSAITVFPQRSDGKHDFRVWNAQLCIDLGWKPNGRDPELFEIPPDLVLEVAMEHPKYEWFRELELKWYALPAVANMLLEVGGLEFPGCPFNGWYMGTEIGVRDFCDVQRYNILEEVGRRMGLETHKLASLWKDQAVVEINIAVLHSFQKQNVTIMDHHSAAESFMKYMQNEYRSRGGCPADWIWLVPPMSGSITPVFHQEMLNYVLSPFYYYQVEAWKTHVWQDEKRRPKRREIPLKVLVKAVLFACMLMRKTMASRVRVTILFATETGKSEALAWDLGALFSCAFNPKVVCMDKYRLSCLEEERLLLVVTSTFGNGDCPGNGEKLKKSLFMLKELNNKFRYAVFGLGSSMYPRFCAFAHDIDQKLSHLGASQLTPMGEGDELSGQEDAFRSWAVQTFKAACETFDVRGKQHIQIPKLYTSNVTWDPHHYRLVQDSQPLDLSKALSSMHAKNVFTMRLKSRQNLQSPTSSRATILVELSCEDGQGLNYLPGEHLGVCPGNQPALVQGILERVVDGPTPHQTVRLEALDESGSYWVSDKRLPPCSLSQALTYFLDITTPPTQLLLQKLAQVATEEPERQRLEALCQPSEYSKWKFTNSPTFLEVLEEFPSLRVSAGFLLSQLPILKPRFYSISSSRDHTPTEIHLTVAVVTYHTRDGQGPLHHGVCSTWLNSLKPQDPVPCFVRNASGFHLPEDPSHPCILIGPGTGIAPFRSFWQQRLHDSQHKGVRGGRMTLVFGCRRPDEDHIYQEEMLEMAQKGVLHAVHTAYSRLPGKPKVYVQDILRQQLASEVLRVLHKEPGHLYVCGDVRMARDVAHTLKQLVAAKLKLNEEQVEDYFFQLKSQKRYHEDIFGAVFPYEAKKDRVAVQPSSLEMSAL

SEQ ID NO: 756559 - protein, 110 aa, Homo sapiens
HRDDRSQDPCEEMVLAMLGALHPRAGLSLFLHLILAVALLRSQPLRSQRSVPEAFSAPLELSQPLSGLVDDYGILPKHPRPRGPRPLLSRAQQRKRDGPDLAEYYYDAHL

SEQ ID NO: 756560 - protein, 240 aa, Homo sapiens
QREDSALGGGRAGRPSRGAFSSSVARRRRPSPSCRAGSPASWGARSSRWRAGIRLEPTEDRAPAGRVRRCRRPAVGRPRAFPSVPRGVPRLSRVPLGSRDPPGPRGCGSTRVPSVGFLGAESLERPRRCPPPPCRTPPSRLRCREALAARLSRALGSFSPGTELSFVQPSPGKMHLLSKSLALPPAADRRSRISSWNAAKVTLFIMGAKVYSVQCGLVPSYNELEDPLWGEKKGLKNRFP

SEQ ID NO: 756561 - protein, 435 aa, Homo sapiens
MWAPPAAIMGDGPTKKVGNQAPLQTQALQTASLRDGPAKRAVWVRHTSSEPQEPTESKAAKERPKQEVTKAVVVDLGTGYCKCGFAGLPRPTHKISTTVGKPYMETAKTGDNRKETFVGQELNNTNVHLKLVNPLRHGIIVDWDTVQDIWEYLFRQEMKIAPEEHAVLVSDPPLSPHTNREKYAEMLFEAFNTPAMHIAYQSRLSMYSYGRTSGLVVEVGHGVSYVVPIYEGYPLPSITGRLDYAGSDLTAYLLGLLNSAGNEFTQDQMGIVEDIKKKCCFVALDPIEEKKVPLSEHTIRYVLPDGKEIQLCQERFLCSEMFFKPSLIKSMQLGLHTQTVSCLNKCDIALKRDLMGNILLCGGSTMLSGFPNRLQKELSSMCPNDTPQVNVLPERDSAVWTGGSILASLQGFQPLWVHRFEYEEHGPFFLYRRCF

SEQ ID NO: 756562 - protein, 165 aa, Homo sapiens
MEMFQGLLLLLLLSMGGTWASKEPLRPRCRPINATLAVEKEGCPVCITVNTTICAGYCPTMTRVLQGVLPALPQVVCHYRDVRFESIRLPGCPRGVNPVVSYAVALSCQCALCRRSTTDCGGPKDHPLTCDDPRFQDSSSSKAPPPSLPSPSRLPGPSDTPILPQ

SEQ ID NO: 756563 - protein, 165 aa, Homo sapiens
MEMFQGLLLLLLLSMGGTWASKEPLRPRCRPINATLAVEKEGCPVCITVNTTICAGYCPTMTRVLQGVLPALPQVVCNYRDVRFESIRLPGCPRGVNPVVSYAVALSCQCALCRRSTTDCGGPKDHPLTCDDPRFQDSSSSKAPPPSLPSPSRLPGPSDTPILPQ

SEQ ID NO: 756564 - protein, 276 aa, Homo sapiens
MKETDREAVATAVQRVAGMLQRPDQLDKVEQYRRREARKKASVEARLKAAIQSQLDGVRTGLSQLHNALNDVKDIQQSLADVSKDWRQSINTIESLKDVKDAVVQHSQLAAAVENLKNIFSVPEIVRETQDLIEQGALLQAHRKLMDLECSRDGLMYEQYRMDSGNTRDMTLIHGYFGSTQGLSDELAKQLWMVLQRSLVTVRRDPTLLVSVVRIIEREEKIDRRILDRKKQTGFVPPGRPKNWKENRWNPQGRGCSEPRYTPLHSSLGDRARLRL

SEQ ID NO: 756565 - protein, 209 aa, Homo sapiens
MLPLVLSDRSLSVLRYKDEAQLYKEEHLRNRQHPHCYVQYMIAIINNCQTFKESIVSLKRKYLKNEVEEGVSPSQPSMDGILDAIAKEGCSGLLEEVFLDLEQHLNELMTKKWLLGSNAVDIICVTVEDYFNDFAKIKKPYKKRMTAEAHRRVVVEYLRAVMQKRISFRSPEERKEGAEKMVREAEQLRFLFRKLASVCGKTMQSHPVV

SEQ ID NO: 756566 - protein, 111 aa, Homo sapiens
REDPVSGTERSEPRKLMDLECSRDGLMYEQYRMDSGNTRDMTLIHGYFGSTQGLSDELAKQLWMVLQRSLVTVRRDPTLLVSVVRIIEREEKIDRLQCLTRLQCLTRLQCL

SEQ ID NO: 756567 - protein, 745 aa, Homo sapiens
MKETDREAVATAVQRVAGMLQRPDQLDKVEQYRRREARKKASVEARLKAAIQSQLDGVRTGLSQLHNALNDVKDIQQSLADVSKDWRQSINTIESLKDVKDAVVQHSQLAAAVENLKNIFSVPEIVRETQDLIEQGALLQAHRKLMDLECSRDGLMYEQYRMDSGNTRDMTLIHGYFGSTQGLSDELAKQLWMVLQRSLVTVRRDPTLLVSVVRIIEREEKIDRRILDRKKQTGFVPPGRPKNWKEKMFTILERTVTTRIEGTQADTRESDKMWLVRHLEIIRKYVLDDLIVAKNLMVQCFPPHYEIFKNLLNMYHQALSTRMQDLASEDLEANEIVSLLTWVLNTYTSTEMMRNVELAPEVDVGTLEPLLSPHVVSELLDTYMSTLTSNIIAWLRKALETDKKDWVKETEPEADQDGYYQTTLPAIVFQMFEQNLQVAAQISEDLKTKVLVLCLQQMNSFLSRYKDEAQLYKEEHLRNRQHPHCYVQYMIAIINNCQTFKESIVSLKRKYLKNEVEEGVSPSQPSMDGILDAIAKEGCSGLLEEVFLDLEQHLNELMTKKWLLGSNAVDIICVTVEDYFNDFAKIKKPYKKRMTAEAHRRVVVEYLRAVMQKRISFRSPEERKEGAEKMVREAEQLRFLFRKLASGFGEDVDGYCDTIVAVAEVIKLTDPSLLYLEVSTLVSKYPDIRDDHIGALLAVRGDASRDMKQTIMETLEQGPAQASPSYVPLFKDIVVPSLNVAKLLK

SEQ ID NO: 756568 - protein, 745 aa, Homo sapiens; identical to SEQ ID NO: 756567

SEQ ID NO: 756569 - protein, 819 aa, Homo sapiens
MKETDREAVATAVQRVAGMLQRPDQLDKVEQYRRREARKKASVEARLKAAIQSQLDGVRTGLSQLHNALNDVKDIQQSLADVSKDWRQSINTIESLKDVKDAVVQHSQLAAAVENLKNIFSVPEIVRETQDLIEQGALLQAHRKLMDLECSRDGLMYEQYRMDSGNTRDMTLIHGYFGSTQGLSDELAKQLWMVLQRSLVTVRRDPTLLVSVVRIIEREEKIDRRILDRKKQTGFVPPGRPKNWKEKMFTILERTVTTRIEGTQADTRESDKMWLVRHLEIIRKYVLDDLIVAKNLMVQCFPPHYEIFKNLLNMYHQALSTRMQDLASEDLEANEIVSLLTWVLNTYTSTEMMRNVELAPEVDVGTLEPLLSPHVVSELLDTYMSTLTSNIIAWLRKALETDKKDWVKETEPEADQDGYYQTTLPAIVFQMFEQNLQVAAQISEDLKTKVLVLCLQQMNSFLSRYKDEAQLYKEEHLRNRQHPHCYVQYMIAIINNCQTFKESIVSLKRKYLKNEVEEGVSPSQPSMDGILDAIAKEGCSGLLEEVFLDLEVGLALSSCRFLGRSQCFLTALWDTGCELYRADAVWGAGLCTCIPIRSLKAPPFSVTLLRMMQGPSYAQFSKIHPQHLNELMTKKWLLGSNAVDIICVTVEDYFNDFAKIKKPYKKRMTAEAHRRVVVEYLRAVMQKRISFRSPEERKEGAEKMVREAEQLRFLFRKLASGFGEDVDGYCDTIVAVAEVIKLTDPSLLYLEVSTLVSKYPDIRDDHIGALLAVRGDASRDMKQTIMETLEQGPAQASPSYVPLFKDIVVPSLNVAKLLK

SEQ ID NO: 756570 - protein, 673 aa, Homo sapiens
MKETDREAVATAVQRVAGMLQRPDQLDKVEQYRRREARKKASVEARLKAAIQSQLDGVRTGLSQLHNALNDVKDIQQSLADVSKDWRQSINTIESLKDVKDAVVQHSQLAAAVENLKNIFSVPEIVRETQDLIEQGALLQAHRKLMDLECSRDGLMYEQYRMDSGNTRDMTLIHGYFGSTQGLSDELAKQLWMVLQRSLVTVRRDPTLLVSVVRIIEREEKIDRRILDRKKQTGFVPPGRPKNWKEKMFTILERTVTTRIEGTQADTRESDKMWLVRHLEIIRKYVLDDLIVAKNLMVQCFPPHYEIFKNLLNMYHQALSTRMQDLASEDLEANEIVSLLTWVLNTYTSEDTWSQAGLGLAHGHPTGEETTTSPPWLPASRVWFLFTNILQQYKDEAQLYKEEHLRNRQHPHCYVQYMIAIINNCQTFKESIVSLKRKYLKNEVEEGVSPSQPSMDGILDAIAKEGCSGLLEEVFLDLEQHLNELMTKKWLLGSNAVDIICVTVEDYFNDFAKIKKPYKKRMTAEAHRRVVVEYLRAVMQKRISFRSPEERKEGAEKMVREAEQLRFLFRKLASGFGEDVDGYCDTIVAVAEVIKLTDPSLLYLEVSTLVSKYPDIRDDHIGALLAVRGDASRDMKQTIMETLEQGPAQASPSYVPLFKDIVVPSLNVAKLLK

SEQ ID NO: 756571 - protein, 326 aa, Homo sapiens
DPEVTIAIVFQMFEQNLQVAAQISEDLKTKVLVLCLQQMNSFLSRYKDEAQLYKEEHLRNRQHPHCYVQYMIAIINNCQTFKESIVSLKRKYLKNEVEEGVSPSQPSMDGILDAIAKEGCSGLLEEVFLDLEQHLNELMTKKWLLGSNAVDIICVTVEDYFNDFAKIKKPYKKRMTAEAHRRVVVEYLRAVMQKRISFRSPEERKEGAEKMVREAEQLRFLFRKLASGFGEDVDGYCDTIVAVAEVIKLTDPSLLYLEVSTLVSKYPDIRDDHIGALLAVRGDASRDMKQTIMETLEQGPAQASPSYVPLFKDIVVPSLNVAKLLK

SEQ ID NO: 756572 - protein, 739 aa, Homo sapiens
MKETDREAVATAVQRVAGMLQRPDQLDKVEQYRRREARKKASVEARLKAAIQSQLDGVRTGLSQLHNALNDVKDIQQSLADVSKDWRQSINTIESLKDVKDAVVQHSQLAAAVENLKNIFSVPEIVRETQDLIEQGALLQAHRKLMDLECSRDGLMYEQYRMDSGNTRDMTLIHGYFGSTQGLSDELAKQLWMVLQRSLVTVRRDPTLLVSVVRIIEREEKIDRRILDRKKQTGFVPPGRPKNWKEKMFTILERTVTTRIEGTQADTRESDKMWLVRHLEIIRKYVLDDLIVAKNLMVQCFPPHYEIFKNLLNMYHQALSTRMQDLASEDLEANEIVSLLTWVLNTYTSTEMMRNVELAPEVDVGTLEPLLSPHVVSELLDTYMSTLTSNIIAWLRKALETDKKDWVKETEPEADQDGYYQTTLPAIVFQMFEQNLQVAAQISEDLKTKVLVLCLQQMNSFLSRYKDEAQLYKEEHLRNRQHPHCYVQYMIAIINNCQTFKESIVSLKRKYLKNEVEEGVSPSQPSMDGILDAIAKEGCSGLLEEVFLDLEQHLNELMTKKWLLGSNAVDIICVTVEDYFNDFAKIKKPYKKRMTAEAHRRVVVEYLRAVMQKRISFRSPEERKEGAEKMVREAEQLRFLFRKLASGFGEDVDGYCDTIVAVAEVIKLTDPSLLYLEVSTLVSKYPDIRDDHIGALLAVRGDASRDMKQTIMETLEQGPAQASPSYVPCSPLHSLGPCL

SEQ ID NO: 756573 - protein, 296 aa, Homo sapiens [sequence omitted]

SEQ ID NO: 756574 - protein, 662 aa, Homo sapiens
MKETDREAVATAVQRVAGMLQRPDQLDKVEQYRRREARKKASVEARLKAAIQSQLDGVRTGLSQLHNALNDVKDIQQSLADVSKDWRQSINTIESLKDVKDAVVQHSQLAAAVENLKNIFSVPEIVRETQDLIEQGALLQAHRKLMDLECSRDGLMYEQYRMDSGNTRDMTLIHGYFGSTQGLSDELAKQLWMVLQRSLVTVRRDPTLLVSVVRIIEREEKIDRRILDRKKQTGFVPPGRPKNWKEKMFTILERTVTTRIEGTQADTRESDKMWLVRHLEIIRKYVLDDLIVAKNLMVQCFPPHYEIFKNLLNMYHQALSTRMQDLASEDLEANEIVSLLTWVLNTYTSTEMMRNVELAPEVDVGTLEPLLSPHVVSELLDTYMSTLTSNIIAWLRKALETDKKDWVKETEPEADQDGYYQTTLPAIVFQMFEQNLQVAAQISEDLKTKVLVLCLQQMNSFLSRYKDEAQLYKEEHLRNRQHPHCYVQYMIAIINNCQTFKESIVSLKRKYLKNEVEEGVSPSQPSMDGILDAIAKEGCSGLLEEVFLDLEQHLNELMTKKWLLGSNAVDIICVTVEDYFNDFAKIKKPYKKRMTAEAHRRVVVEYLRAVMQKRISFRSPEERKEGAEKMVREAEQLRFLFRKLASGFGEDNAIVSSRYLTS

SEQ ID NO: 756575 - protein, 217 aa, Homo sapiens
  misc_feature (94)..(94): Xaa can be any naturally occurring amino acid
MRREALIGEVSTGEGVALARGHSTKHNTGRRGQIKDRRLRGARRPLAHPPSRKSTPHYTTGYSTPAERGRGRYTTVKGRSGVLWQPRWMAGDPXAEGGAEKMVREAEQLRFLFRKLASGFGEDVDGYCDTIVAVAEVIKLTDPSLLYLEVSTLVSKYPDIRDDHIGALLAVRGDASRDMKQTIMETLEQGPAQASPSYVPLFKDIVVPSLNVAKLLK

SEQ ID NO: 756576 - protein, 564 aa, Homo sapiens
MKETDREAVATAVQRVAGMLQRPDQLDKVEQYRRREARKKASVEARLKAAIQSQLDGVRTGLSQLHNALNDVKDIQQSLADVSKDWRQSINTIESLKDVKDAVVQHSQLAAAVENLKNIFSVPEIVRETQDLIEQGALLQAHRKLMDLECSRDGLMYEQYRMDSGNTRDMTLIHGYFGSTQGLSDELAKQLWMVLQRSLVTVRRDPTLLVSVVRIIEREEKIDRRILDRKKQTGFVPPGRPKNWKEKMFTILERTVTTRIEGTQADTRESDKMWLVRHLEIIRKYVLDDLIVAKNLMVQCFPPHYEIFKNLLNMYHQALSTRMQDLASEDLEANEIVSLLTWVLNTYTSTEMMRNVELAPEVDVGTLEPLLSPHVVSELLDTYMSTLTSNIIAWLRKALETDKKDWVKETEPEADQDGYYQTTLPAIVFQMFEQNLQVAAQISEDLKTKVLVLCLQQMNSFLSRYKDEAQLYKEEHLRNRQHPHCYVQYMIAIINNCQTFKESIVSLKRKYLKNEVEEGVSPSQPSMDGILDAIAKEGCSGLLEEVFLDLEQHLNELMLDDGDP

SEQ ID NO: 756577 - protein, 431 aa, Homo sapiens
MKETDREAVATAVQRVAGMLQRPDQLDKVEQYRRREARKKASVEARLKAAIQSQLDGVRTGLSQLHNALNDVKDIQQSLADVSKDWRQSINTIESLKDVKDAVVQHSQLAAAVENLKNIFSVPEIVRETQDLIEQGALLQAHRKLMDLECSRDGLMYEQYRMDSGNTRDMTLIHGYFGSTQGLSDELAKQLWMVLQRSLVTVRRDPTLLVSVVRIIEREEKIDRRILDRKKQTGFVPPGRPKNWKEKMFTILERTVTTRIEGTQADTRESDKMWLVRHLEIIRKYVLDDLIVAKNLMVQCFPPHYEIFKNLLNMYHQALSTRMQDLASEDLEANEIVSLLTWVLNTYTSTEMMRNVELAPEVDVGTLEPLLSPHVVSELLDTYMSTLTSNIIAWLRKALETDKKDWVKETEPEADQDGYYQTTLPAIVFQI

SEQ ID NO: 756578 - protein, 150 aa, Homo sapiens
MQTQPRARSRSREGGSERRVPLGLSAPGEMDRPVGVGVGWQTVVGSIGRARARGQARAGGRDGSWATAPPWRGIRAESAWVARVSAPRGASSFLSPRFRPGWGEALLHHSGFPERGWPAGETEARDPDRRLHCAGRSAVTDVVEPPRVFL

SEQ ID NO: 756579 - protein, 171 aa, Homo sapiens [sequence omitted]

SEQ ID NO: 756580 - protein, 171 aa, Homo sapiens [sequence omitted]

SEQ ID NO: 756581 - protein, 221 aa, Homo sapiens
TLEDPCSAQRLVSSNFITHQRTHTGVKPYRCNDCGESFSQSSDLIKHQRTHTGERPFKCPECGKGFRDSSHFVAHMSTHSGERPFSCPDCHKSFSQSSHLVTHQRTHTGERPFKCENCGKGFADSSALIKHQRIHTGERPYKCGECGKSFNQSSHFITHQRIHLGDRPYRCPECGKTFNQRSHFLTHQRTHTGEKPFHCSKCNKSFRQKAHLLCHQNTHLI

SEQ ID NO: 756582 - protein, 221 aa, Homo sapiens; identical to SEQ ID NO: 756581

SEQ ID NO: 756583 - protein, 128 aa, Homo sapiens
MFHSPGFILSEVEARRPQYPLPGMLGTVDWMTVSFSVCVCVCVFFFFFFEAGRNCTEKRPILQIWRPRSRGTRALPSTAPLMGESVGLMLRSFGLSFCLFIATPGGEGPSGLTLGSDLSAVSKVCLSL

SEQ ID NO: 756584 - protein, 103 aa, Homo sapiens
KFCFCHRAVTESINQLITLCTQQAPGQKECDNALRELETVKGMLDNPNEPVSDLSYFDCIESVMENSKVLGESMAGISQNAKTGDLPAFGECVGIASKALCGL

SEQ ID NO: 756585 - protein, 126 aa, Homo sapiens
ENSTIQESAAIQQAHVKLKEHLNHNPSPSSVVFVQEGPPFSTHQVDANIKCQTSSRENILPSEQMGFLISEMGPASKPSEDTGLATPARYREHRSNSQQGKSPDLHLLVDVGCKQERFPKEEELKE

SEQ ID NO: 756586 - protein, 152 aa, Homo sapiens
SAPNTEGVKSSSVMPSPSTTLARQGSLESPSSGTGSMGSAGGLSGSSSPLFNKPSDLTTDVISLSHSLASSPASVHSFTSGGLVWAANMSSSSAGSKDTPSYQSMTSLHTSSESIDLPLSHHGSLSGLTTGTHEVQSLLMRTGSVRSTLSER

SEQ ID NO: 756587 - protein, 1817 aa, Homo sapiens
QSGDDEEYQRIYTTKIKPRLKSEDGVEGDLGETQSRTITVTRRVTAYTVDVTGREGAKDIDISSPEFKIKIPRHELTEISNVDVETQSGKTVIRLPSGSGAASPTGSAVDIRAGAISASGPELQGAGHSKLQVTMPGIKVGGSGVNVNAKGLDLGGRGGVQVPAVDISSSLGGRAVEVQGPSLESGDHGKIKFPTMKVPKFGVSTGREGQTPKAGLRVSAPEVSVGHKGGKPGLTIQAPQLEVSVPSANIEGLEGKLKGPQITGPSLEGDLGLKGAKPQGHIGVDASAPQIGGSITGPSVEVQAPDIDVQGPGSKLNVPKMKVPKFSVSGAKGEETGIDVTLPTGEVTVPGVSGDVSLPEIATGGLEGKMKGTKVKTPEMIIQKPKISMQDVDLSLGSPKLKGDIKVSAPGVQGDVKGPQVALKGSRVDIETPNLEGTLTGPRLGSPSGKTGTCRISMSEVDLNVAAPKVKGGVDVTLPRVEGKVKVPEVDVRGPKVDVSAPDVEAHGPEWNLKMPKMKMPTFSTPGAKGEGPDVHMTLPKGDISISGPKVNVEAPDVNLEGLGGKLKGPDVKLPDMSVKTPKISMPDVDLHVKGTKVKGEYDVTVPKLEGELKGPKVDIDAPDVDVHGPDWHLKMPKMKMPKFSVPGFKAEGPEVDVNLPKADVDISGPKIDVTAPDVSIEEPEGKLKGPKFKMPEMNIKVPKISMPDVDLHLKGPNVKGEYDVTMPKVESEIKVPDVELKSAKMDIDVPDVEVQGPDWHLKMPKMKMPKFSMPGFKAEGPEVDVNLPKADVDISGPKVGVEVPDVNIEGPEGKLKGPKFKMPEMNIKAPKISMPDVDLHMKGPKVKGEYDMTVPKLEGDLKGPKVDVSAPDVEMQGPDWNLKMPKIKMPKFSMPSLKGEGPEFDVNLSKANVDISAPKVDTNAPDLSLEGPEGKLKGPKFKMPEMHFRAPKMSLPDVDLDLKGPKMKGNVDISAPKIEGEMQVPDVDIRGPKVDIKAPDVEGQGLDWSLKIPKMKMPKFSMPSLKGEGPEVDVNLPKADVVVSGPKVDIEAPDVSLEGPEGKLKGPKFKMPEMHFKTPKISMPDVDLHLKGPKVKGDVDVSVPKVEGEMKVPDVEIKGPKMDIDAPDVEVQGPDWHLKMPKMKMPKFSMPGFKGEGREVDVNLPKADIDVSGPKVDVEVPDVSLEGPEGKLKGPKFKMPEMHFKAPKISMPDVDLNLKGPKLKGDVDVSLPEVEGEMKVPDVDIKGPKVDISAPDVDVHGPDWHLKMPKVKMPKFSMPGFKGEGPEVDVKLPKADVDVSGPKMDAEVPDVNIEGPDAKLKGPKFKMPEMSIKPQKISIPDVGLHLKGPKMKGDYDVTVPKVEGEIKAPDVDIKGPKVDINAPDVEVHGPDWHLKMPKVKMPKFSMPGFKGEGPEVDMNLPKADLGVSGPKVDIDVPDVNLEAPEGKLKGPKFKMPSMNIQTHKISMPDVGLNLKAPKLKTDVDVSLPKVEGDLKGPEIDVKAPKMDVNVGDIDIEGPEGKLKGPKFKMPEMHFKAPKISMPDVDLHLKGPKVKGDMDVSVPKVEGEMKVPDVDIKGPKVDIDAPDVEVHDPDWHLKMPKMKMPKFSMPGFKAEGPEVDVNLPKADIDVSGPSVDTDAPDLDIEGPEGKLKGSKFKMPKLNIKAPKVSMPDVDLNLKGPKLKGEIDASVPELEGDLRGPQVDVKGPFVEAEVPDVDLECPDAKLKGPKFKMPEMHFKAPKISMPDVDLHLKGPKVKGDADVSVPKLEGDLTGPSVGVEVPDVELECPDAKLKGPKFKMPDMHFKAPKISMPDVDLH

SEQ ID NO: 756588 - protein, 68 aa, Homo sapiens
QRLSIDNSKKGESQLRVRDSLRPDHGLYMIKVENDHGIAKAPCTVSVLDTPGPPINFVFEDIRKTSVL

SEQ ID NO: 756589 - protein, 1678 aa, Homo sapiens
MHPGLWLLLVTLCLTEELAAAGEKSYGKPCGGQDCSGSCQCFPEKGARGRPGPIGIQGPTGPQGFTGSTGLSGLKGERGFPGLLGPYGPKGDKGPMGVPGFLGINGIPGHPGQPGPRGPPGLDGCNGTQGAVGFPGPDGYPGLLGPPGLPGQKGSKGDPVLAPGSFKGMKGDPGLPGLDGITGPQGAPGFPGAVGPAGPPGLQGPPGPPGPLGPDGNMGLGFQGEKGVKGDVGLPGPAGPPPSTGELEFMGFPKGKKGSKGEPGPKGFPGISGPPGFPGLGTTGEKGEKGEKGIPGLPGPRGPMGSEGVQGPPGQQGKKGTLGFPGLNGFQGIEGQKGDIGLPGPDVFIDIDGAVISGNPGDPGVPGLPGLKGDEGIQGLRGPSGVPGLPALSGVPGALGPQGFPGLKGDQGNPGRTTIGAAGLPGRDGLPGPPGPPGPPSPEFETETLHNKESGFPGLRGEQGPKGNLGLKGIKGDSGFCACDGGVPNTGPPGEPGPPGPWGLIGLPGLKGARGDRGSGGAQGPAGAPGLVGPLGPSGPKGKKGEPILSTIQGMPGDRGDSGSQGFRGVIGEPGKDGVPGLPGLPGLPGDGGQGFPGEKGLPGLPGEKGHPGPPGLPGNGLPGLPGPRGLPGDKGKDGLPGQQGLPGSKGITLPCIIPGSYGPSGFPGTPGFPGPKGSRGLPGTPGQPGSSGSKGEPGSPGLVHLPELPGFPGPRGEKGLPGFPGLPGKDGLPGMIGSPGLPGSKGATGDIFGAENGAPGEQGLQGLTGHKGFLGDSGLPGLKGVHGKPGLLGPKGERGSPGTPGQVGQPGTPGSSGPYGIKGKSGLPGAPGFPGISGHPGKKGTRGKKGPPGSIVKKGLPGLKGLPGNPGLVGLKGSPGSPGVAGLPALSGPKGEKGSVGFVGFPGIPGLPGIPGTRGLKGIPGSTGKMGPSGRAGTPGEKGDRGNPGPVGIPSPRRPMSNLWLKGDKGSQGSAGSNGFPGPRGDKGEAGRPGPPGLPGAPGLPGIIKGVSGKPGPPGFMGIRGLPGLKGSSGITGFPGMPGESGSQGIRGSPGLPGASGLPGLKGDNGQTVEISGSPGPKGQPGESGFKGTKGRDGLIGNIGFPGNKGEDGKVGVSGDVGLPGAPGFPGVAGMRGEPGLPGSSGHQGAIGPLGSPGLIGPKGFPGFPGLHGLNGLPGTKGTHGTPGPSITGVPGPAGLPGPKGEKGYPGIGIGAPGKPGLRGQKGDRGFPGLQGPAGLPGAPGISLPSLIAGQPGDPGRPGLDGERGRPGPAGPPGPPGPSSNQGDTGDPGFPGIPGFSGLPGELGLKGMRGEPGFMGTPGKVGPPGDPGFPGMKGKAGPRGSSGLQGDPGQTPTAEAVQVPPGPLGLPGIDGIPGLTGDPGAQGPVGLQGSKGLPGIPGKDGPSGLPGPPGALGDPGLPGLQGPPGFEGAPGQQGPFGMPGMPGQSMRVGYTLVKHSQSEQVPPCPIGMSQLWVGYSLLFVEGQEKAHNQDLGFAGSCLPRFSTMPFIYCNINEVCHYARRNDKSYWLSTTAPIPMMPVSQTQIPQYISRCSVCEAPSQAIAVHSQDITIPQCPLGWRSLWIGYSFLMHTAAGAEGGGQSLVSPGSCLEDFRATPFIECSGARGTCHYFANKYSFWLTTVEERQQFGELPVSETLKAGQLHTRVSRCQVCMKSL

SEQ ID NO: 756590 - protein, 1691 aa, Homo sapiens
MLINKLWLLLVTLCLTEELAAAGEKSYGKPCGGQDCSGSCQCFPEKGARGRPGPIGIQGPTGPQGFTGSTGLSGLKGERGFPGLLGPYGPKGDKGPMGVPGFLGINGIPGHPGQPGPRGPPGLDGCNGTQGAVGFPGPDGYPGLLGPPGLPGQKGSKGDPVLAPGSFKGMKGDPGLPGLDGITGPQGAPGFPGAVGPAGPPGLQGPPGPPGPLGPDGNMGLGFQGEKGVKGDVGLPGPAGPPPSTGELEFMGFPKGKKGSKGEPGPKGFPGISGPPGFPGLGTTGEKGEKGEKGIPGLPGPRGPMGSEGVQGPPGQQGKKGTLGFPGLNGFQGIEGQKGDIGLPGPDVFIDIDGAVISGNPGDPGVPGLPGLKGDEGIQGLRGPSGVPGLPALSGVPGALGPQGFPGLKGDQGNPGRTTIGAAGLPGRDGLPGPPGPPGPPSPEFETETLHNKESGFPGLRGEQGPKGNLGLKGIKGDSGFCACDGGVPNTGPPGEPGPPGPWGLIGLPGLKGARGDRGSGGAQGPAGAPGLVGPLGPSGPKGKKGEPILSTIQGMPGDRGDSGSQGFRGVIGEPGKDGVPGLPGLPGLPGDGGQGFPGEKGLPGLPGEKGHPGPPGLPGNGLPGLPGPRGLPGDKGKDGLPGQQGLPGSKGITLPCIIPGSYGPSGFPGTPGFPGPKGSRGLPGTPGQPGSSGSKGEPGSPGLVHLPELPGFPGPRGEKGLPGFPGLPGKDGLPGMIGSPGLPGSKGATGDIFGAENGAPGEQGLQGLTGHKGFLGDSGLPGLKGVHGKPGLLGPKGERGSPGTPGQVGQPGTPGSSGPYGIKGKSGLPGAPGFPGISGHPGKKGTRGKKGPPGSIVKKGLPGLKGLPGNPGLVGLKGSPGSPGVAGLPALSGPKGEKGSVGFVGFPGIPGLPGIPGTRGLKGIPGSTGKMGPSGRAGTPGEKGDRGNPGPVGIPSPRRPMSNLWLKGDKGSQGSAGSNGFPGPRGDKGEAGRPGPPGLPGAPGLPGIIKGVSGKPGPPGFMGIRGLPGLKGSSGITGFPGMPGESGSQGIRGSPGLPGASGLPGLKGDNGQTVEISGSPGPKGQPGESGFKGTKGRDGLIGNIGFPGNKGEDGKVGVSGDVGLPGAPGFPGVAGMRGEPGLPGSSGHQGAIGPLGSPGLIGPKGFPGFPGLHGLNGLPGTKGTHGTPGPSITGVPGPAGLPGPKGEKGYPGIGIGAPGKPGLRGQKGDRGFPGLQGPAGLPGAPGISLPSLIAGQPGDPGRPGLDGERGRPGPAGPPGPPGPSSNQGDTGDPGFPGIPGPKGPKGDQGIPGFSGLPGELGLKGMRGEPGFMGTPGKVGPPGDPGFPGMKGKAGPRGSSGLQGDPGQTPTAEAVQVPPGPLGLPGIDGIPGLTGDPGAQGPVGLQGSKGLPGIPGKDGPSGLPGPPGALGDPGLPGLQGPPGFEGAPGQQGPFGMPGMPGQSMRVGYTLVKHSQSEQVPPCPIGMSQLWVGYSLLFVEGQEKAHNQDLGFAGSCLPRFSTMPFIYCNINEVCHYARRNDKSYWLSTTAPIPMMPVSQTQIPQYISRCSVCEAPSQAIAVHSQDITIPQCPLGWRSLWIGYSFLMHTAAGAEGGGQSLVSPGSCLEDFRATPFIECSGARGTCHYFANKYSFWLTTVEERQQFGELPVSETLKAGQLHTRVSRCQVCMKSL

SEQ ID NO: 756591 - protein, 73 aa, Homo sapiens [sequence omitted]

SEQ ID NO: 756592 - protein, 202 aa, Homo sapiens
MLINKLWLLLVTLCLTEELAAAGEKSYGKPCGGQDCSGSCQCFPEKGARGRPGPIGIQGPTGPQGFTGSTGLSGLKGERGFPGLLGPYGPKGDKGPMGVPGFLGINGIPGHPGQPGPRGPPGLDGCNGTQGAVGFPGPDGYPGLLGPPVCCQIFAFYFKWLCLSLRVPFFCLSGNLKILWGSHYTPLSNVGVNTGSTTTVKV

SEQ ID NO: 756593 - protein, 430 aa, Homo sapiens
MATAVRAVGCLPVLCSGTAGHLLGRQCSLNTLPAASILAWKSVLGNGHLSSLGTRDTHPYASLSRALQTQCCISSPSHLMSQQYRPYSFFTKLTADELWKGALAETGAGAKKGRGKRTKKKKRKDLNRGQIIGEGRYGFLWPGLNVPLMKNGAVQTIAQRSKEEQEKVEADMIQQREEWDRKKKMKVKRERGWSGNSWGGISLGPPDPGPCGETYEDFDTRILEVRNVFTMTAKEGRKKSIRVLVAVGNGKGAAGFSIGKATDRMDAFRKAKNRAVHHLHYIERYEDHTIFHDISLRFKRTHIKMKKQPKGYGLRCHRAIITICRLIGIKDMYAKVSGSINMLSLTQGLFRGLSRQETHQQLADKKGLHVVEIREECGPLPIVVASPRGPLRKDPEPEDEVPDVKLDWEDVKTAQGMKRSVWSNLKRAAT

SEQ ID NO: 756594 - protein, 422 aa, Homo sapiens
SSFASSFFCSSSHLLGRQCSLNTLPAASILAWKSVLGNGHLSSLGTRDTHPYASLSRALQTQCCISSPSHLMSQQYRPYSFFTKLTADELWKGALAETGAGAKKGRGKRTKKKKRKDLNRGQIIGEGRYGFLWPGLNVPLMKNGAVQTIAQRSKEEQEKVEADMIQQREEWDRKKKMKVKRERGWSGNSWGGISLGPPDPGPCGETYEDFDTRILEVRNVFTMTAKEGRKKSIRVLVAVGNGKGAAGFSIGKATDRMDAFRKAKNRAVHHLHYIERYEDHTIFHDISLRFKRTHIKMKKQPKGYGLRCHRAIITICRLIGIKDMYAKVSGSINMLSLTQGLFRGLSRQETHQQLADKKGLHVVEIREECGPLPIVVASPRGPLRKDPEPEDEVPDVKLDWEDVKTAQGMKRSVWSNLKRAAT

SEQ ID NO: 756595 - protein, 411 aa, Homo sapiens
MATAVRAVGCLPVLCSGTAGHLLGRQCSLNTLPAASILAWKSVLGNGHLSSLGTRDTHPYASLSRALQTQCCISSPSHLMSQQYRPYSFFTKLTADELWKGALAETGAGAKKGRGKRTKKKKRKDLNRGQIIGEGRYGFLWPGLNVPLMKNGAVQTIAQRSKEEQEKVEADMIQQREEWDRKKKMKVKRERGWKTYEDFDTRILEVRNVFTMTAKEGRKKSIRVLVAVGNGKGAAGFSIGKATDRMDAFRKAKNRAVHHLHYIERYEDHTIFHDISLRFKRTHIKMKKQPKGYGLRCHRAIITICRLIGIKDMYAKVSGSINMLSLTQGLFRGLSRQETHQQLADKKGLHVVEIREECGPLPIVVASPRGPLRKDPEPEDEVPDVKLDWEDVKTAQGMKRSVWSNLKRAAT

SEQ ID NO: 756596 - protein, 430 aa, Homo sapiens; identical to SEQ ID NO: 756593

SEQ ID NO: 756597 - protein, 264 aa, Homo sapiens
MARTECPSYEKWSSADHCPKKQGRAGEGGGRHDPAERRVGPKEEDEETYEDFDTRILEVRNVFTMTAKEGRKKSIRVLVAVGNGKGAAGFSIGKATDRMDAFRKAKNRAVHHLHYIERYEDHTIFHDISLRFKRTHIKMKKQPKGYGLRCHRAIITICRLIGIKDMYAKVSGSINMLSLTQGLFRGLSRQETHQQLADKKGLHVVEIREECGPLPIVVASPRGPLRKDPEPEDEVPDVKLDWEDVKTAQGMKRSVWSNLKRAAT

SEQ ID NO: 756598 - protein, 192 aa, Homo sapiens [sequence omitted]

SEQ ID NO: 756599 - protein, 131 aa, Homo sapiens
MSKNERKQTTKGYGLRCHRAIITICRLIGIKDMYAKVSGSINMLSLTQGLFRGLSRQETHQQLADKKGLHVVEIREECGPLPIVVASPRGPLRKDPEPEDEVPDVKLDWEDVKTAQGMKRSVWSNLKRAAT

SEQ ID NO: 756600 - protein, 105 aa, Homo sapiens
TLDIPYRRGEVSGSINMLSLTQGLFRGLSRQETHQQLADKKGLHVVEIREECGPLPIVVASPRGPLRKDPEPEDEVPDVKLDWEDVKTAQGMKRSVWSNLKRAAT

SEQ ID NO: 756601 - protein, 168 aa, Homo sapiens
MATAVRAVGCLPVLCSGTAGHLLGRQCSLNTLPAASILAWKSVLGNGHLSSLGTRDTHPYASLSRALQTQCCISSPSHLMSQQYRPYSFFTKLTADELWKGALAETGAGAKKGRGKRTKKKKRKDLNRGQIIGEGRYGFLWPGLNVPLMKNGAVQTIAQRSKEELHRE

SEQ ID NO: 756602 - protein, 430 aa, Homo sapiens; identical to SEQ ID NO: 756593

SEQ ID NO: 756603 - protein, 292 aa, Homo sapiens [sequence omitted]

SEQ ID NO: 756604 - protein, 168 aa, Homo sapiens; identical to SEQ ID NO: 756601

SEQ ID NO: 756605 - protein, 121 aa, Homo sapiens
MGPSASSHGSPVPLPSDLSFRSPTPSNLPMVQLWAAHAHEGFSHLPSGLYPSYLHLNHLEPPSSGSPLLSQLGQPSIFDTQKGQGPGGDGFYLPTAGAPGSLHSHAPSARTLAGHSSGAPA

SEQ ID NO: 756606 - protein, 236 aa, Homo sapiens
EALNGPEALNGPLPSDLSFRSPTPSNLPMVQLWAAHAHEGFSHLPSGLYPSYLHLNHLEPPSSGSPLLSQLGQPSIFDTQKGQGPGGDGFYLPTAGAPGSLHSHAPSARTLAQMAVLAAQHHHSRAEEEAAVVAASSSKKAYLDPGAVLPRSAATCGRPVADMHSAAHGPGEASAMQSLIKYSGSFARDAVAVRPGGCGKKSPFGGLGTMKPEPAPTSAGASRAQARLPHSGGPAA

SEQ ID NO: 756607 - protein, 208 aa, Homo sapiens
RPPPADAPTVRATRASPDPRAYVPAKELLKPEADPRPCERAPRGPAGPAAQQAAKLFGLEPGRPPPTGPEHKWKPFELGNFAATQMAVLAAQHHHSRAEEEAAVVAASSSKKAYLDPGAVLPRSAATCGRPVADMHSAAHGPGEASAMQSLIKYSGSFARDAVAVRPGGCGKKSPFGGLGTMKPEPAPTSAGASRAQARLPHSGGPAA

SEQ ID NO: 756608 - protein, 62 aa, Homo sapiens
EALNGPEALNGPLPSDLSFRSPTPSNLPMVQLWAAHAHEGKEHAGVGAEGCWADVPATLATS

SEQ ID NO: 756609 - protein, 371 aa, Homo sapiens
MGHKVVVFDISVIRALWETRVKKHKAWQKKEVERLEKSALEKIKEEWNFVAECRRKGIPQAVYCKNGFIDTSVRLLDKIERNTLTRQSSLPKDRGKRSSAFVFELSGEHWTELPDSLKEQTHLREWYISNTLIQIIPTYIQLFQEMRILDLPKNQISHLPAEIGCLKNLKELNVGFNYLKSIPPELGDCENLERLDCSGNLELMELPFELSNLKQVTFVDISANKFSSVPICVLRMSNLQWLDISSNNLTDLPQDIDRLEELQSFLLYKNKLTYLPYSMLNLKKLTLLVVSGDHLVELPTALCDSSTPLKFVSLMDNPIDNAQCEDGNEIMESERDRQHFDKEVMKAYIEDLKERESVPSYTTKVSFSLQL

SEQ ID NO: 756610 - protein, 371 aa, Homo sapiens; identical to SEQ ID NO: 756609

SEQ ID NO: 756611 - protein, 409 aa, Homo sapiens
MSLLAHRHGRLLPARPCCSAGVNSLCGVNSLCGVNSRGGQARTVSARPSGQVALWETRVKKHKAWQKKEVERLEKSALEKIKEEWNFVAECRRKGIPQAVYCKNGFIDTSVRLLDKIERNTLTRQSSLPKDRGKRSSAFVFELSGEHWTELPDSLKEQTHLREWYISNTLIQIIPTYIQLFQEMRILDLPKNQISHLPAEIGCLKNLKELNVGFNYLKSIPPELGDCENLERLDCSGNLELMELPFELSNLKQVTFVDISANKFSSVPICVLRMSNLQWLDISSNNLTDLPQDIDRLEELQSFLLYKNKLTYLPYSMLNLKKLTLLVVSGDHLVELPTALCDSSTPLKFVSLMDNPIDNAQCEDGNEIMESERDRQHFDKEVMKAYIEDLKERESVPSYTTKVSFSLQL

SEQ ID NO: 756612 - protein, 371 aa, Homo sapiens; identical to SEQ ID NO: 756609

SEQ ID NO: 756613 - protein, 371 aa, Homo sapiens; identical to SEQ ID NO: 756609

SEQ ID NO: 756614 - protein, 282 aa, Homo sapiens
MRKDDIMLDEGMLQSLMELPDQYNYGMYAKFINDYGTHYITSGSMGGIYEYILVIDKAKMESLGITSRDITTCFGGSLGIQYEDKINVGGGLSGDHCKKFGGGKTERARKAMAVEDIISRVRGGSSGWSGGLAQNRSTITYRSWGRSLKYNPVVIDFEMQPIHEVLRHTSLGPLEAKRQNLRRALDQYLMEFNACRCGPCFNNGVPILEGTSCRCQCRLGSLGAACEQTQTEGAKADGSWSCWSSWSVCRAGIQERRRECDNPAPQNGGASCPGRKVQTQAC

SEQ ID NO: 756615 - protein, 282 aa, Homo sapiens; identical to SEQ ID NO: 756614

SEQ ID NO: 756616 - protein, 566 aa, Homo sapiens
MFAVVFFILSLMTCQPGVTAQEKVNQRVRRAATPAAVTCQLSNWSEWTDCFPCQDKSGDIWDQASCSSSTTCVRQAQCGQDFQCKETGRCLKRHLVCNGDQDCLDGSDEDDCEDVRAIDEDCSQYEPIPGSQKAALGYNILTQEDAQSVYDASYYGGQCETVYNGEWRELRYDSTCERLYYGDDEKYFRKPYNFLKYHFEALADTGISSEFYDNANDLLSKVKKDKSDSFGVTIGIGPAGSPLLVGVGVSHSQDTSFLNELNKYNEKKFIFTRIFTKVQTAHFKMRKDDIMLDEGMLQSLMELPDQYNYGMYAKFINDYGTHYITSGSMGGIYEYILVIDKAKMESLGITSRDITTCFGGSLGIQYEDKINVGGGLSGDHCKKFGGGKTERARKAMAVEDIISRVRGGSSGWSGGLAQNRSTITYRSWGRSLKYNPVVIDFEMQPIHEVLRHTSLGPLEAKRQNLRRALDQYLMEFNACRCGPCFNNGVPILEGTSCRCQCRLGSLGAACEQTQTEGAKADGSWSCWSSWSVCRAGIQERRRECDNPAPQNGGASCPGRKVQTQAC

SEQ ID NO: 756617 - protein, 274 aa, Homo sapiens
MRKDDIMLDEGMLQSLMELPDQYNYGMYAKFINDYGTHYITSGSMGGIYEYILVIDKAKMESLGITSRDITTCFGGSLGIQYEDKINVGGGLSGDHCKKFGGGKTERARKAMAVEDIISRVRGGSSGWSGGLAQNRSTITYRSWGRSLKYNPVVIDFEMQPIHEVLRHTSLGPLEAKRQNLRRALDQYLMEFNACRCGPCFNNGVPILEGTSCRCHACEQTQTEGAKADGSWSCWSSWSVCRAGIQERRRECDNPAPQNGGASCPGRKVQTQAC

SEQ ID NO: 756618 - protein, 583 aa, Homo sapiens
MFAVVFFILSLMTCQPGVTAQEKVNQRVRRAATPAAVTCQLSNWSEWTDCFPCQDKYRHRSLLQPNKFGGTICSGDIWDQASCSSSTTCVRQAQCGQDFQCKETGRCLKRHLVCNGDQDCLDGSDEDDCEDVRAIDEDCSQYEPIPGSQKAALGYNILTQEDAQSVYDASYYGGQCETVYNGEWRELRYDSTCERLYYGDDEKYFRKPYNFLKYHFEALADTGISSEFYDNANDLLSKVKKDKSDSFGVTIGIGPAGSPLLVGVGVSHSQDTSFLNELNKYNEKKFIFTRIFTKVQTAHFKMRKDDIMLDEGMLQSLMELPDQYNYGMYAKFINDYGTHYITSGSMGGIYEYILVIDKAKMESLGITSRDITTCFGGSLGIQYEDKINVGGGLSGDHCKKFGGGKTERARKAMAVEDIISRVRGGSSGWSGGLAQNRSTITYRSWGRSLKYNPVVIDFEMQPIHEVLRHTSLGPLEAKRQNLRRALDQYLMEFNACRCGPCFNNGVPILEGTSCRCQCRLGSLGAACEQTQTEGAKADGSWSCWSSWSVCRAGIQERRRECDNPAPQNGGASCPGRKVQTQAC

SEQ ID NO: 756619 - protein, 520 aa, Homo sapiens
MPNKFGGTICSGDIWDQASCSSSTTCVRQAQCGQDFQCKETGRCLKRHLVCNGDQDCLDGSDEDDCEDVRAIDEDCSQYEPIPGSQKAALGYNILTQEDAQSVYDASYYGGQCETVYNGEWRELRYDSTCERLYYGDDEKYFRKPYNFLKYHFEALADTGISSEFYDNANDLLSKVKKDKSDSFGVTIGIGPAGSPLLVGVGVSHSQDTSFLNELNKYNEKKFIFTRIFTKVQTAHFKMRKDDIMLDEGMLQSLMELPDQYNYGMYAKFINDYGTHYITSGSMGGIYEYILVIDKAKMESLGITSRDITTCFGGSLGIQYEDKINVGGGLSGDHCKKFGGGKTERARKAMAVEDIISRVRGGSSGWSGGLAQNRSTITYRSWGRSLKYNPVVIDFEMQPIHEVLRHTSLGPLEAKRQNLRRALDQYLMEFNACRCGPCFNNGVPILEGTSCRCQCRLGSLGAACEQTQTEGAKADGSWSCWSSWSVCRAGIQERRRECDNPAPQNGGASCPGRKVQTQAC

SEQ ID NO: 756620 - protein, 282 aa, Homo sapiens; identical to SEQ ID NO: 756614

SEQ ID NO: 756621 - protein, 119 aa, Homo sapiens
MRKDDIMLDEGMLQSLMELPDQYNYGMYAKFINDYGTHYITSGSMGGIYEYILVIDKDAAYPRGAAAHKPGASGGQAPEPAPRLGPVSDGIQCLPMWALLQQWGAHPRGHQLQVPVPPG

SEQ ID NO: 756622 - protein, 805 aa, Homo sapiens [sequence omitted]

SEQ ID NO: 756623 - protein, 805 aa, Homo sapiens [sequence omitted]

SEQ ID NO: 756624 - protein, 772 aa, Homo sapiens
MSSSSWLLLSLVAVTAAQSTIEEQAKTFLDKFNHEAEDLFYQSSLASWNYNTNITEENVQNMNNAGDKWSAFLKEQSTLAQMYPLQEIQNLTVKLQLQALQQNGSSVLSEDKSKRLNTILNTMSTIYSTGKVCNPDNPQECLLLEPGLNEIMANSLDYNERLWAWESWRSEVGKQLRPLYEEYVVLKNEMARANHYEDYGDYWRGDYEVNGVDGYDYSRGQLIEDVEHTFEEIKPLYEHLHAYVRAKLMNAYPSYISPIGCLPAHLLGDMWGRFWTNLYSLTVPFGQKPNIDVTDAMVDQAWDAQRIFKEAEKFFVSVGLPNMTQGFWENSMLTDPGNVQKAVCHPTAWDLGKGDFRILMCTKVTMDDFLTAHHEMGHIQYDMAYAAQPFLLRNGANEGFHEAVGEIMSLSAATPKHLKSIGLLSPDFQEDNETEINFLLKQALTIVGTLPFTYMLEKWRWMVFKGEIPKDQWMKKWWEMKYYTRTLYQFQFQEALCQAAKHEGPLHKCDISNSTEAGQKLFNMLRLGKSEPWTLALENVVGAKNMNVRPLLNYFEPLFTWLKDQNKNSFVGWSTDWSPYADQSIKVRISLKSALGDKAYEWNDNEMYLFRSSVAYAMRQYFLKVKNQMILFGEEDVRVANLKPRISFNFFVTAPKNVSDIIPRTEVEKAIRMSRSRINDAFRLNDNSLEFLGIQPTLGPPNQPPVSIWLIVFGVVMGVIVVGIVILIFTGIRDRKKKNKARSGENPYASIDISKGENNPGFQNTDDVQTSF

SEQ ID NO: 756625 - protein, 194 aa, Homo sapiens
MFFLTITSSHCLPSPMSLYPVILSLISFSPAGEVFILLIVSSVPQVKMFVLFLYREEDVRVANLKPRISFNFFVTAPKNVSDIIPRTEVEKAIRMSRSRINDAFRLNDNSLEFLGIQPTLGPPNQPPVSIWLIVFGVVMGVIVVGIVILIFTGIRDRKKKNKARSGENPYASIDISKGENNPGFQNTDDVQTSF

SEQ ID NO: 756626 - protein, 441 aa, Homo sapiens
MSSSSWLLLSLVAVTAAQSTIEEQAKTFLDKFNHEAEDLFYQSSLASWNYNTNITEENVQNMNNAGDKWSAFLKEQSTLAQMYPLQEIQNLTVKLQLQALQQNGSSVLSEDKSKRLNTILNTMSTIYSTGKVCNPDNPQECLLLEPGLNEIMANSLDYNERLWAWESWRSEVGKQLRPLYEEYVVLKNEMARANHYEDYGDYWRGDYEVNGVDGYDYSRGQLIEDVEHTFEEIKPLYEHLHAYVRAKLMNAYPSYISPIGCLPAHLLGDMWGRFWTNLYSLTVPFGQKPNIDVTDAMVDQAWDAQRIFKEAEKFFVSVGLPNMTQGFWENSMLTDPGNVQKAVCHPTAWDLGKGDFRILMCTKVTMDDFLTAHHEMGHIQYDMAYAAQPFLLRNGANEGFHEAVGEIMSLSAATPKHLKSIGLLSPDFQEDNGNSNCMFTL

SEQ ID NO: 756627 - protein, 118 aa, Homo sapiens
MCSRSLWFFQMRKAGESMGTTSKPCLEICAGRGGFCLLEEGRGVGVRSQEENSVPLGQVTDSHESAEHHGLRLVVKKEPRFTISSHLVFCIKNTLSLGMCVCMLYTHMYIYMYIFFLN

SEQ ID NO: 756628 - protein, 155 aa, Homo sapiens
LVNYQISVKCSNQFKLEGVSLNAENKVVDNQAGTQGQLKVLGANLWWPYLMHEHPAYLYSWEEVIAHTKALDPSQPVTFVTNSTYAADKGALYVDVIRVNSYYSWYRNYGHLELIQLQLAAQFENWCKTSQSHYSERVWSGNACRVSPGSTSDVQ

SEQ ID NO: 756629 - protein, 95 aa, Homo sapiens
PSEDRYFGHHQVDLYFYLTFTILPVLTLNSLCLESQDPPLMFSEEDRKSLLEQYHLGLDQKRRKYVVGELIWNFADFMTNQCVSFLVGNENSANL

SEQ ID NO: 756630 - protein, 567 aa, Homo sapiens
HPIWGKDRSWTGQELSPLAGEDREKGSTGARKEEEGGPVLVKEKLGLKKLVLTQEQKTMLLDWNDSIPESVHLKAGERISQKSAENGRGGRVLKPVRPLLLPRAAGEPLPTQRGAQEKMGTPAEQAQGERNVPPPKSPLRLIANAIRRSLEPLLSNSEGGKKAWAKQESKTLPTQACTRSFSLRKTNSNKDGDQHSPGRNQSSAFSPPDPALRTHSLPNRPSKVFPALRSPPCSKIEEVPTLLEKVSLQENFPDASKPPKKRISLFSSLRLKDKSFESFLQESRQRKDIRDLFGSPKRKVLPEDSAQALEKLLQPFKSTSLRQAAPPPPPPPPPPPPPPPPPTAGGADSKNFPLRAQVTEASSSASSTSSSSADEEFDPQLSLQLKEKKTLRRRKKLEKAMKQLVKQEELKRLYKAQAIQRQLEEVEERQRASEIQGVRLEKALRGEADSGTQDEAQLLQEWFKLVLEKNKLMRYESELLIMAQELELEDHQSRLEQKLREKMLKEESQKDEKDLNEEQEVFTELMQVIEQRDKLVDSLEEQRIREKAEDQHFESFVFSRGCQLSRT

SEQ ID NO: 756631 - protein, 212 aa, Homo sapiens
YLTSAGGPLRTRVEIHRRQSRNDPPHDDRAANGNIRALPEEPGSENVPAKSQRSAELNKEVSTNTAMIQTSKTEITELRRTLQGLEIELQSQLSMKAGLENTVAETECRYALQLQQIQGLISSIEAQLSELRSEMECQNQEYKMLLDIKTRLEQEIATYRSLLEGQDAKMIGFPSSAGSVSPRSTSVTTTSSASVTTTSNASGRRTSDVRRP

SEQ ID NO: 756632 - protein, 127 aa, Homo sapiens
  misc_feature (23)..(23): Xaa can be any naturally occurring amino acid
LPTTAFDGLCDGVTHTVPIYEGXPSPMPPCEPMSEVRSIEAQLSELRSEMECQNQEYKMLLDIKTRLEQEIATYRSLLEGQDAKMIGFPSSAGSVSPRSTSVTTTSSASVTTTSNASGRRTSDVRRP

SEQ ID NO: 756633 - protein, 458 aa, Homo sapiens
MSLRLQSSSASYGGGFGGGSCQLGGGRGVSTCSTRFVSGGSAGGYGGGVSCGFGGGAGSGFGGGYGGGLGGGYGGGLGGGFGGGFAGGFVDFGACDGGLLTGNEKITMQNLNDRLASYLEKVRALEEANADLEVKIRDWHLKQSPASPERDYSPYYKTIEELRDKILTATIENNRVILEIDNARLAVDDFRLKYENELALRQSVEADINGLRRVLDELTLSKTDLEMQIESLNEELAYMKKNHEEEMKEFSNQVVGQVNVEMDATPGIDLTRVLAEMREQYEAMAERNRRDAEEWFHAKSAELNKEVSTNTAMIQTSKTEITELRRTLQGLEIELQSQLSMKAGLENTVAETECRYALQLQQIQGLISSIEAQLSELRSEMECQNQEYKMLLDIKTRLEQEIATYRSLLEGQDAKMIGFPSSAGSVSPRSTSVTTTSSASVTTTSNASGRRTSDVRRP

SEQ ID NO: 756634 - protein, 458 aa, Homo sapiens; identical to SEQ ID NO: 756633

SEQ ID NO: 756635 - protein, 420 aa, Homo sapiens
MSLRLQSSSASYGGGFGGGSCQLGGGRGVSTCSTRFVSGGSAGGYGGGVSCGFGGGAGSGFGGGYGGGLGGGYGGGLGGGFGGGFAGGFVDFGACDGGLLTGNEKITMQNLNDRLASYLEKVRALEEANADLEVKIRDWHLKQSPASPERDYSPYYKTIEELRDKILTATIENNRVILEIDNARLAVDDFRLKYENELALRQSVEADINGLRRVLDELTLSKTDLEMQIESLNEELAYMKKNHEEEMKEFSNQVVGQVNVEMDATPGIDLTRVLAEMREQYEAMAERNRRDAEEWFHAKSAELNKEVSTNTAMIQTSKTEITELRRTLQGLEIELQSQLSMKAGLENTVAETECRYALQLQQIQGLISSIEAQLSELRSEMECQNQEYKMLLDIKTRLEQEIATYRSLLEGQDAKKRQPP

SEQ ID NO: 756636 - protein, 458 aa, Homo sapiens; identical to SEQ ID NO: 756633

SEQ ID NO: 756637 - protein, 380 aa, Homo sapiens
  misc_feature (3)..(3): Xaa can be any naturally occurring amino acid
  misc_feature (12)..(12): Xaa can be any naturally occurring amino acid
PPXSDPRIFTPXIAGCCDGGLLTGNEKITMQNLNDRLASYLEKVRALEEANADLEVKIRDWHLKQSPASPERDYSPYYKTIEELRDKILTATIENNRVILEIDNARLAVDDFRLKYENELALRQSVEADINGLRRVLDELTLSKTDLEMQIESLNEELAYMKKNHEEEMKEFSNQVVGQVNVEMDATPGIDLTRVLAEMREQYEAMAERNRRDAEEWFHAKSAELNKEVSTNTAMIQTSKTEITELRRTLQGLEIELQSQLSMKAGLENTVAETECRYALQLQQIQGLISSIEAQLSELRSEMECQNQEYKMLLDIKTRLEQEIATYRSLLEGQDAKMIGFPSSAGSVSPRSTSVTTTSSASVTTTSNASGRRTSDVRRP

SEQ ID NO: 756638 - protein, 212 aa, Homo sapiens [sequence omitted]

SEQ ID NO: 756639 - protein, 189 aa, Homo sapiens
MSLRLQKMREQYEAMAERNRRDAEEWFHAKSAELNKEVSTNTAMIQTSKTEITELRRTLQGLEIELQSQLSMKAGLENTVAETECRYALQLQQIQGLISSIEAQLSELRSEMECQNQEYKMLLDIKTRLEQEIATYRSLLEGQDAKMIGFPSSAGSVSPRSTSVTTTSSASVTTTSNASGRRTSDVRRP

SEQ ID NO: 756640 - protein, 169 aa, Homo sapiens
PPPSSCLHFRSAELNKEVSTNTAMIQTSKTEITELRRTLQGLEIELQSQLSMKAGLENTVAETECRYALQLQQIQGLISSIEAQLSELRSEMECQNQEYKMLLDIKTRLEQEIATYRSLLEGQDAKMIGFPSSAGSVSPRSTSVTTTSSASVTTTSNASGRRTSDVRRP

SEQ ID NO: 756641 - protein, 415 aa, Homo sapiens
MSLRLQSSSASYGGGFGGGSCQLGGGRGVSTCSTRFVSGGSAGGYGGGVSCGFGGGAGSGFGGGYGGGLGGGYGGGLGGGFGGGFAGGFVDFGACDGGLLTGNEKITMQNLNDRLASYLEKVRALEEANADLEVKIRDWHLKQSPASPERDYSPYYKTIEELRDKILTATIENNRVILEIDNARLAVDDFRLKYENELALRQSVEADINGLRRVLDELTLSKTDLEMQIESLNEELAYMKKNHEEEMKEFSNQVVGQVNVEMDATPGIDLTRVLAEMREQYEAMAERNRRDAEEWFHAKSAELNKEVSTNTAMIQTSKTEITELRRTLQGLEIELQSQLSMKAGLENTVAETECRYALQLQQIQGLISSIEAQLSELRSEMECQNQEYKMLLDIKTRLEQEIATYRSLLEGQDAK

SEQ ID NO: 756642 - protein, 458 aa, Homo sapiens; identical to SEQ ID NO: 756633

SEQ ID NO: 756643 - protein, 415 aa, Homo sapiens; identical to SEQ ID NO: 756641

SEQ ID NO: 756644 - protein, 420 aa, Homo sapiens
MSLRLQSSSASYGGGFGGGSCQLGGGRGVSTCSTRFVSGGSAGGYGGGVSCGFGGGAGSGFGGGYGGGLGGGYGGGLGGGFGGGFAGGFVDFGACDGGLLTGNEKITMQNLNDRLASYLEKVRALEEANADLEVKIRDWHLKQSPASPERDYSPYYKTIEELRDKILTATIENNRVILEIDNARLAVDDFRLKYENELALRQSVEADINGLRRVLDELTLSKTDLEMQIESLNEELAYMKKNHEEEMKEFSNQVVGQVNVEMDATPGIDLTRVLAEMREQYEAMAERNRRDAEEWFHAKSAELNKEVSTNTAMIQTSKTEITELRRTLQGLEIELQSQLSMKAGLENTVAETECRYALQLQQIQGLISSIEAQLSELRSEMECQNQEYKMLLDIKTRLEQERGGAAGPKAQSLCSQDPLS

SEQ ID NO: 756645 - protein, 170 aa, Homo sapiens
QCWALQCREGESWGGSGHSLTDFPFETDGSAPQSYLAVLGRAIFGDNKESPSTHHLTNEEFVSPPGGPCPVLRWVFSSLSMSCLLFPREASAPVAPLLPRLLVPLLPPPLMPLVAALLMSVGLKSAWRPLPLSSAPRGGESRQFPAGERRGCWTQGSVPLLSGPPVLTLS

SEQ ID NO: 756646 - protein, 183 aa, Homo sapiens
MSLRLQSSSASYGGGFGGGSCQLGGGRGVSTCSTRFVSGGSAGGYGGGVSCGFGGGAGSGFGGGYGGGLGGGYGGGLGGGFGGGFAGGFVDFGACDGGLLTGNEKITMQNLNDRLASYLEKVRALEEANADLEVKIRDWHLKQSPASPERDYSPYYKTIEELRDKILTATIVNNRALSICRSN

SEQ ID NO: 756647 - protein, 182 aa, Homo sapiens
MSLRLQSSSASYGGGFGGGSCQLGGGRGVSTCSTRFVSGGSAGGYGGGVSCGFGGGAGSGFGGGYGGGLGGGYGGGLGGGFGGGFAGGFVDFGACDGGLLTGNEKITMQNLNDRLASYLEKVRALEEANADLEVKIRDWHLKQNHEEEMNALRGQVGGDVNVEMDAAPGVDLSRILNEMRDR

SEQ ID NO: 756648 - protein, 79 aa, Homo sapiens
GSSTVRRKYKMLLDIKTRLEQEIATYRSLLEGQDAKMIGFPSSAGSVSPRSTSVTTTSSASVTTTSNASGRRTSDVRRP

SEQ ID NO: 756649 - protein, 161 aa, Homo sapiens
ERELQAALGSTTSSEKEEPSPATGHSPPLWDLETLSRTLCQHSEPRRGRMSSLTHLPFPSPQEMKEFSNQVVGQVNVEMDATPGIDLTRVLAEMREQYEAMAERNRRDAEEWFHAKVPGPPTPHSPSHIARGAGRTQPLGQAARAELPHHLLPACISEVQS

SEQ ID NO: 756650 - protein, 169 aa, Homo sapiens; identical to SEQ ID NO: 756640

SEQ ID NO: 756651 - protein, 458 aa, Homo sapiens; identical to SEQ ID NO: 756633

SEQ ID NO: 756652 - protein, 458 aa, Homo sapiens; identical to SEQ ID NO: 756633

SEQ ID NO: 756653 - protein, 458 aa, Homo sapiens; identical to SEQ ID NO: 756633

SEQ ID NO: 756654 - protein, 415 aa, Homo sapiens; identical to SEQ ID NO: 756641

SEQ ID NO: 756655 - protein, 415 aa, Homo sapiens; identical to SEQ ID NO: 756641

SEQ ID NO: 756656 - protein, 458 aa, Homo sapiens; identical to SEQ ID NO: 756633

SEQ ID NO: 756657 - protein, 381 aa, Homo sapiens
MSLRLQSSSASYGGGFGGGSCQLGGGRGVSTCSTRFVSGGSAGGYGGGVSCGFGGGAGSGFGGGYGGGLGGGYGGGLGGGFGGGFAGGFVDFGACDGGLLTGNEKITMQNLNDRLASYLEKVRALEEANADLEVKIRDWHLKQSPASPERDYSPYYKTIEELRDKILTATIENNRVILEIDNARLAVDDFRLKYENELALRQSVEADINGLRRVLDELTLSKTDLEMQIESLNEELAYMKKNHEEEMKEFSNQVVGQVNVEMDATPGIDLTRVLAEMREQYEAMAERNRRDAEEWFHAKEASAPVAPLLPRLLVPLLPPPLMPLVAALLMSVGLKSAWRPLPLSSAPRGGESRQFPAGERRGCWTQGSVPLLSGPPVLTLS

SEQ ID NO: 756658 - protein, 79 aa, Homo sapiens; identical to SEQ ID NO: 756648

SEQ ID NO: 756659 - protein, 274 aa, Homo sapiens
MSLRLQSSSASYGGGFGGGSCQLGGGRGVSTCSTRFVSGGSAGGYGGGVSCGFGGGAGSGFGGGYGGGLGGGYGGGLGGGFGGGFAGGFVDFGACDGGLLTGNEKITMQNLNDRLASYLEKVRALEEANADLEVKIRDWHLKQSPASPERDYSPYYKTIEELRDKILTATIENNRVILEIDNARLAVDDFRLKYENELALRQSVEADINGLRRVLDELTLSKTDLEMQIESLNEELAYMKKNHEEEERAGSSLQERGGAAGPKAQSLCSQDPLS

SEQ ID NO: 756660 - protein, 224 aa, Homo sapiens
MSLRLQSSSASYGGGFGGGSCQLGGGRGVSTCSTRFVSGGSAGGYGGGVSCGFGGGAGSGFGGGYGGGLGGGYGGGLGGGFGGGFAGGFVDFGACDGGLLTGNEKITMQNLNDRLASYLEKVRALEEANADLEVKIRDWHLKQSPASPERDYSPYYKTIEELRDKNPWNRANPLEKQTWVPFRGRFANCQGCVWVDRTSGLKVMRKWEAWPLWGQEAWGGPEST

SEQ ID NO: 756661 - protein, 173 aa, Homo sapiens
MSLRLQSSSASYGGGFGGGSCQLGGGRGVSTCSTRFVSGGSAGGYGGGVSCGFGGGAGSGFGGGYGGGLGGGYGGGLGGGFGGGFAGGFVDFGACDGGLLTGNEKITMQNLNDRLASYLEKVRALEEANADLEVKIRDWHLKQSPASPERDYSPYYKTIEELRDKTTGVLYSS

SEQ ID NO: 756662 - protein, 59 aa, Homo sapiens
MSLRLQSSSASYGGGFGGGSCQLGGGRGVSTCSTRFVSGGSAGGPPAKTPRRGACRGWG

SEQ ID NO: 756663 - protein, 69 aa, Homo sapiens
ERRREERGEREKEREEEQEREACLAYYRIFFSPLKTSSLHIWLTAWYTWLVSGFCLNSVIEETNLQEPL

SEQ ID NO: 756664 - protein, 97 aa, Homo sapiens
WGAVLTQGGDIHGRCGNDADPHTKCSRGFEWVTYATVEVEDAAMNAEATQGEQKTCDLDMMAWRRETLMMLQRHPWAESFFFGDRISLCHPGWSAVA

SEQ ID NO: 756665 - protein, 317 aa, Homo sapiens
MAKNPPENCEDCHILNAEAFKSKKICKSLKICGLVFGILALTLIVLFWGSKHFWPEVPKKAYDMEHTFYSNGEKKKIYMEIDPVTRTEIFRSGNGTDETLEVHDFKNGYTGIYFVGLQKCFIKTQIKVIPEFSEPEEEIDENEEITTTFFEQSVIWVPAEKPIENRDFLKNSKILEICDNVTMYWINPTLISVSELQDFEEEGEDLHFPANEKKGIEQNEQWVVPQVKVEKTRHARQASEEELPINDYTENGIEFDPMLDERGYCCIYCRRGNRYCRRVCEPLLGYYPYPYCYQGGRVICRVIMPCNWWVARMLGRV

SEQ ID NO: 756666 - protein, 56 aa, Homo sapiens
VWTSLRGPEQEAGSQAEWPMRPPKFQEQPVIWKLWKLLKTRSNDLGWTKDSRSLLC

SEQ ID NO: 756667 - protein, 180 aa, Homo sapiens
FPPLFSPLSSESASSSSHLPLPSLSLPLGSLFLPSLWFLCLCPVLSFPSSLDLSPLLALSPSSSHSHWPPSREPRLLRLQVAPASLPGGPLPPSPVPALPAPRFPGPDQEAGVHTEGPNRLALSRAPKPEAQEWTDLCDTHSLFLFHLSGTLDTAWRNQACRRPRKAETKTTLRDRKQLA

SEQ ID NO: 756668 - protein, 180 aa, Homo sapiens; identical to SEQ ID NO: 756667

SEQ ID NO: 756669 - protein, 315 aa, Homo sapiens
TNNKEQGVVIDSLKLSEEMKPNLDGVDLFNNGGSGNGETKTGLRLKAINLPLENEVTEISALQVHLDEFQKILWKEREMRTALEKEIERLESALSLWKWKYEELKESKPKNVKEFDILLGQHNDEMQELSGNIKEESKSQNSKDRVICELRAELERLQAENTSEWDKREILEREKQGLERENRRLKIQVKEMEELLDKKNRLSANSQSPDFKMSQIDLQEKNQELLNLQHAYYKLNRQYQANIAELTHANNRVDQNEAEVKKLRLRVEELKQGLNQKEDELDDSLNQIRKLQRSLDEEKERNENLETELRHLQNW

SEQ ID NO: 756670 - protein, 258 aa, Homo sapiens
TNNKEQGVVIDSLKLSEEMKPNLDGVDLFNNGGSGNGETKTGLRLKAINLPLENEVTEISALQVHLDEFQKILWKEREMRTALEKEIERLESALSLWKWKYEELKESKPKNVKEFDILLGQHNDEMQELSGNIKEESKSQNSKDRVICELRAELERLQAENTSEWDKREILEREKQGLERENRRLKIQVKEMEELLDKKNRLSANSQSPDFKMSQIDLQEKNQLDDSLNQIRKLQRSLDEEKERNENLETELRHLQNW

SEQ ID NO: 756671 - protein, 258 aa, Homo sapiens; identical to SEQ ID NO: 756670

SEQ ID NO: 756672 - protein, 238 aa, Homo sapiens
TNNKEQGVVIDSLKLSEEMKPNLDGVDLFNNGGSGNGETKTGLRLKAINLPLENEVTEISALQVHLDEFQKILWKEREMRTALEKEIERLESALSLWKWKYEELKESKPKNVKEFDILLGQHNDEMQELSGNIKEESKSQNSKDRVICELRAELERLQAENTSEWDKREILEREKQGLERENRRLKIQVKEMEELLDKKNRLSANSQSPDFKMSQIDLQEKNQVWVLLGANSHCLISL

SEQ ID NO: 756673 - protein, 209 aa, Homo sapiens
MRGSGRLRTPELCCSRPPPPGPGRPWLPSCLEKGRASQRLGGKKNGGRDRAEYKSRFSGLYLTRCSNSSERQRERAGGRLGWKSRASRAALRASWEGRSGANRGLRLWPSPPADPPASGPQPLPHPRNFAHSSGRALCTGTYNTRARTRLSRRGEAILPIWGHFPAAARTRFSERLSLQLLRRWIFFRVVENQQPPATIALQLSFTTGT

SEQ ID NO: 756674 - protein, 450 aa, Homo sapiens
MRECISIHVGQAGVQIGNACWELYCLEHGIQPDGQMPSDKTIGGGDDSFNTFFSETGAGKHVPRAVFVDLEPTVVDEVRTGTYRQLFHPEQLITGKEDAASNYARGHYTIGKEIVDLVLDRIRKLADLCTGLQGFLIFHSFGGGTGSGFASLLMERLSVDYSKKSKLEFAIYPAPQVSTAVVEPYNSILTTHTTLEHSDCAFMVDNEAIYDICRRNLDIERPTYTNLNRLIGQIVSSITASLRFDGALNVDLTEFQTNLVPYPRIHFPLATYAPVISAEKAYHEQLSVAEITNACFEPANQMVKCDPRHGKYMACCMLYRGDVVPKDVNAAIATIKTKRTIQFVDWCPTGFKVGINYQPPTVVPGGDLAKVQRAVCMLSNTTAIAEAWARLVHKFDLMYAKWAFVHWYVGEGMEEGEFSEAREDLAALEKDCEEVGVDSVEAEAEEGEEY

SEQ ID NO: 756675 - protein, 466 aa, Homo sapiens
RVEGTRAVTDRDYDYPRVICLSACVIGPWSYIGNACWELYCLEHGIQPDGQMPSDKTIGGGDDSFNTFFSETGAGKHVPRAVFVDLEPTVVDEVRTGTYRQLFHPEQLITGKEDAASNYARGHYTIGKEIVDLVLDRIRKLADLCTGLQGFLIFHSFGGGTGSGFASLLMERLSVDYSKKSKLEFAIYPAPQVSTAVVEPYNSILTTHTTLEHSDCAFMVDNEAIYDICRRNLDIERPTYTNLNRLIGQIVSSITASLRFDGALNVDLTEFQTNLVPYPRIHFPLATYAPVISAEKAYHEQLSVAEITNACFEPANQMVKCDPRHGKYMACCMLYRGDVVPKDVNAAIATIKTKRTIQFVDWCPTGFKVGINYQPPTVVPGGDLAKVQRAVCMLSNTTAIAEAWARLVHKFDLMYAKWAFVHWYVGEGMEEGEFSEAREDLAALEKDCEEVGVDSVEAEAEEGEEY

SEQ ID NO: 756676 - protein, 906 aa, Homo sapiens
MAGNVKKSSGAGGGTGSGGSGSGGLIGLMKDAFQPHHHHHHHLSPHPPGTVDKKMVEKCWKLMDKVVRLCQNPKLALKNSPPYILDLLPDTYQHLRTILSRYEGKMETLGENEYFRVFMENLMKKTKQTISLFKEGKERMYEENSQPRRNLTKLSLIFSHMLAELKGIFPSGLFQGDTFRITKADAAEFWRKAFGEKTIVPWKSFRQALHEVHPISSGLEAMALKSTIDLTCNDYISVFEFDIFTRLFQPWSSLLRNWNSLAVTHPGYMAFLTYDEVKARLQKFIHKPGSYIFRLSCTRLGQWAIGYVTADGNILQTIPHNKPLFQALIDGFREGFYLFPDGRNQNPDLTGLCEPTPQDHIKVTQEQYELYCEMGSTFQLCKICAENDKDVKIEPCGHLMCTSCLTSWQESEGQGCPFCRCEIKGTEPIVVDPFDPRGSGSLLRQGAEGAPSPNYDDDDDERADDTLFMMKELAGAKVERPPSPFSMAPQASLPPVPPRLDLLPQRVCVPSSASALGTASKAASGSLHKDKPLPVPPTLRDLPPPPPPDRPYSVGAESRPQRRPLPCTPGDCPSRDKLPPVPSSRLGDSWLPRPIPKVPVSAPSSSDPWTGRELTNRHSLPFSLPSQMEPRPDVPRLGSTFSLDTSMSMNSSPLVGPECDHPKIKPSSSANAIYSLAARPLPVPKLPPGEQCEGEEDTEYMTPSSRPLRPLDTSQSSRACDCDQQIDSCTYEAMYNIQSQAPSITESSTFGEGNLAAAHANTGPEESENEDDGYDVPKPPVPAVLARRTLSDISNASSSFGWLSLDGDPTTNVTEGSQVPERPPKPFPRRINSERKAGSCQQGSGPAASAATASPQLSSEIENLMSQGYSYQDIQKALVIAQNNIEMAKNILREFVSISSPAHVAT

SEQ ID NO: 756677 - protein, 446 aa, Homo sapiens
  misc_feature (6)..(6): Xaa can be any naturally occurring amino acid
RSQRWXFMRVTLVAQQPWSKWHAIYSMAPQASLPPVPPRLDLLPQRVCVPSSASALGTASKAASGSLHKDKPLPVPPTLRDLPPPPPPDRPYSVGAESRPQRRPLPCTPGDCPSRDKLPPVPSSRLGDSWLPRPIPKVPVSAPSSSDPWTGRELTNRHSLPFSLPSQMEPRPDVPRLGSTFSLDTSMSMNSSPLVGPECDHPKIKPSSSANAIYSLAARPLPVPKLPPGEQCEGEEDTEYMTPSSRPLRPLDTSQSSRACDCDQQIDSCTYEAMYNIQSQAPSITESSTFGEGNLAAAHANTGPEESENEDDGYDVPKPPVPAVLARRTLSDISNASSSFGWLSLDGDPTTNVTEGSQVPERPPKPFPRRINSERKAGSCQQGSGPAASAATASPQLSSEIENLMSQGYSYQDIQKALVIAQNNIEMAKNILREFVSISSPAHVAT

SEQ ID NO: 756678 - protein, 844 aa, Homo sapiens
MAGNVKKSSGAGGGTGSGGSGSGGLIGLMKDAFQPHHHHHHHLSPHPPGTVDKKMVEKCWKLMDKVVRLCQNPKLALKNSPPYILDLLPDTYQHLRTILSRYEGKMETLGENEYFRVFMENLMKKTKQTISLFKEGKERMYEENSQPRRNLTKLSLIFSHMLAELKGIFPSGLFQGDTFRITKADAAEFWRKAFGEKTIVPWKSFRQALHEVHPISSGLEAMALKSTIDLTCNDYISVFEFDIFTRLFQPWSSLLRNWNSLAVTHPGYMAFLTYDEVKARLQKFIHKPGSYIFRLSCTRLGQWAIGYVTADGNILQTIPHNKPLFQALIDGFREGFYLFPDGRNQNPDLTGLCEPTPQDHIKVTQEQYELYCEMGSTFQLCKICAENDKDVKIEPCGHLMCTSCLTSWQESEGQGCPFCRCEIKGTEPIVVDPFDPRGSGSLLRQGAEGAPSPNYDDDDDERADDTLFMMKELAGAKVERPPSPFSMAPQASLPPVPPRLDLLPQRVCVPSSASALGTASKAASGSLHKDKPLPVPPTLRDLPPPPPPDRPYSVGAESRPQRRPLPCTPGDCPSRDKLPPVPSSRLGDSWLPRPIPKVPVSAPSSSDPWTGRELTNRHSLPFSLPSQMEPRPDVPRLGSTFSLDTSMSMNSSPLVGPECDHPKIKPSSSANAIYSLAARPLPVPKLPPGEQCEGEEDTEYMTPSSRPLRPLDTSQSSRACDCDQQIDSCTYEAMYNIQSQAPSITESSTFGEGNLAAAHANTGPEESENEDDGYDVPKPPVPAVLARRTLSDISNASSSFGWLSLDGDPTTNVTEGSQVPERPPKPFPRRINSERKAGSCQQVS

SEQ ID NO: 756679 - protein, 258 aa, Homo sapiens [sequence omitted]

SEQ ID NO: 756680 - protein, 345 aa, Homo sapiens
MAGNVKKSSGAGGGTGSGGSGSGGLIGLMKDAFQPHHHHHHHLSPHPPGTVDKKMVEKCWKLMDKVVRLCQNPKLALKNSPPYILDLLPDTYQHLRTILSRYEGKMETLGENEYFRVFMENLMKKTKQTISLFKEGKERMYEENSQPRRNLTKLSLIFSHMLAELKGIFPSGLFQGDTFRITKADAAEFWRKAFGEKTIVPWKSFRQALHEVHPISSGLEAMALKSTIDLTCNDYISVFEFDIFTRLFQPWSSLLRNWNSLAVTHPGYMAFLTYDEVKARLQKFIHKPGSYIFRLSCTRLGQWAIGYVTADGNILQTIPHNKPLFQALIDGFREGFYLFPDGSKT

SEQ ID NO: 756681 - protein, 103 aa, Homo sapiens
KYIQCLPAIYLFIFLMFVSLLVAHLYIDTAFRIWVSWLHCCICAPLSLLNVLYQGRSQQHLLVLSNLSLWSSLFPVWGLLHCHLVVVVVVAVMYLCLLLSVPA

SEQ ID NO: 756682 - protein, 129 aa, Homo sapiens
RTCNRFRLLLERRTVGSEVTSGADCPGSQVWLVPGGGRGVQPRARGDVVGGGQERESRAEFLGWGEAVWRFVSHLTQPGTFLSQQRSVTCAPHVRLPLSSVLASSALSQHSLSLCSNPAHLMAFFAPPA

SEQ ID NO: 756683 - protein, 210 aa, Homo sapiens
MAQKAYVMESMTYLTAGMLDQPGFPDCSIEAAMVKVFSSEAAWQCVSEALQILGGLGYTRDYPYERILRDTRILLIFEGTNEILRMYIALTGLQHAGRILTTRIHELKQAKVSTVMDTVGRRLRDSLGRTVDLGLTGNHGVVHPSLADSANKFEENTYCFGRTVETLLLRFGKVTRPSQAWVASGPPIWPAFMRLLFVKHPLGPGLEQKC

SEQ ID NO: 756684 - protein, 621 aa, Homo sapiens
MSGCGLFLRTTAAARACRGLVVSTANRRLLRTSPPVRAFAKELFLGKIKKKEVFPFPEVSQDELNEINQFLGPVEKFFTEEVDSRKIDQEGKIPDETLEKLKSLGLFGLQVPEEYGGLGFSNTMYSRLGEIISMDGSITVTLAAHQAIGLKGIILAGTEEQKAKYLPKLASGEHIAAFCLTEPASGSDAASIRSRATLSEDKKHYILNGSKVWITNGGLANIFTVFAKTEVVDSDGSVKDKITAFIVERDFGGVTNGKPEDKLGIRGSNTCEVHFENTKIPVENILGEVGDGFKVAMNILNSGRFSMGSVVAGLLKRLIEMTAEYACTRKQFNKRLSEFGLIQEKFALMAQKAYVMESMTYLTAGMLDQPGFPDCSIEAAMVKVFSSEAAWQCVSEALQILGGLGYTRDYPYERILRDTRILLIFEGTNEILRMYIALTGLQHAGRILTTRIHELKQAKVSTVMDTVGRRLRDSLGRTVDLGLTGNHGVVHPSLADSANKFEENTYCFGRTVETLLLRFGKTIMEEQLVLKRVANILINLYGMTAVLSRASRSIRIGLRNHDHEVLLANTFCVEAYLQNLFSLSQLDKYAPENLDEQIKKVSQQILEKRAYICAHPLDRTC

SEQ ID NO: 756685 - protein, 678 aa, Homo sapiens
AGWYRPEWLGSAALSKKGRLRLRLGNIGQHERLRALPAHHGCGSCLPGSGGLYREPAATAHQPACTSFRQRAFPRQNQEGNASPGRTLAVWLPLFTLSCKTGVELCEIPQTCQRDTPCGRGVLTLRIPEFQENLPREKVDSRKIDQEGKIPDETLEKLKSLGLFGLQVPEEYGGLGFSNTMYSRLGEIISMDGSITVTLAAHQAIGLKGIILAGTEEQKAKYLPKLASGEHIAAFCLTEPASGSDAASIRSRATLSEDKKHYILNGSKVWITNGGLANIFTVFAKTEVVDSDGSVKDKITAFIVERDFGGVTNGKPEDKLGIRGSNTCEVHFENTKIPVENILGEVGDGFKVAMNILNSGRFSMGSVVAGLLKRLIEMTAEYACTRKQFNKRLSEFGLIQEKFALMAQKAYVMESMTYLTAGMLDQPGFPDCSIEAAMVKVFSSEAAWQCVSEALQILGGLGYTRDYPYERILRDTRILLIFEGTNEILRMYIALTGLQHAGRILTTRIHELKQAKVSTVMDTVGRRLRDSLGRTVDLGLTGNHGVVHPSLADSANKFEENTYCFGRTVETLLLRFGKTIMEEQLVLKRVANILINLYGMTAVLSRASRSIRIGLRNHDHEVLLANTFCVEAYLQNLFSLSQLDKYAPENLDEQIKKVSQQILEKRAYICAHPLDRTC

SEQ ID NO: 756686 - protein, 709 aa, Homo sapiens
AGWYRPEWLGSAALSKKGRLRLRLGNIGQHERLRALPAHHGCGSCLPGSGGLYREPAATAHQPACTSFRQRAFPRQNQEGNASPGRTLAVWLPLFTLSCKTGVELCEIPQTCQRDTPCGRGVLTLRIPEFQENLPRERKEVFPFPEVSQDELNEINQFLGPVEKFFTEEVDSRKIDQEGKIPDETLEKLKSLGLFGLQVPEEYGGLGFSNTMYSRLGEIISMDGSITVTLAAHQAIGLKGIILAGTEEQKAKYLPKLASGEHIAAFCLTEPASGSDAASIRSRATLSEDKKHYILNGSKVWITNGGLANIFTVFAKTEVVDSDGSVKDKITAFIVERDFGGVTNGKPEDKLGIRGSNTCEVHFENTKIPVENILGEVGDGFKVAMNILNSGRFSMGSVVAGLLKRLIEMTAEYACTRKQFNKRLSEFGLIQEKFALMAQKAYVMESMTYLTAGMLDQPGFPDCSIEAAMVKVFSSEAAWQCVSEALQILGGLGYTRDYPYERILRDTRILLIFEGTNEILRMYIALTGLQHAGRILTTRIHELKQAKVSTVMDTVGRRLRDSLGRTVDLGLTGNHGVVHPSLADSANKFEENTYCFGRTVETLLLRFGKTIMEEQLVLKRVANILINLYGMTAVLSRASRSIRIGLRNHDHEVLLANTFCVEAYLQNLFSLSQLDKYAPENLDEQIKKVSQQILEKRAYICAHPLDRTC

SEQ ID NO: 756687 - protein, 621 aa, Homo sapiens; identical to SEQ ID NO: 756684

SEQ ID NO: 756688 - protein, 646 aa, Homo sapiens
MSGCGLFLRTTAAARACRGLVVSTANRRLLRTSPPVRAFAKELFLGKIKKKEVFPFPEVSQDELNEINQFLGPVEKFFTEEVDSRKIDQEGKIPDETLEKLKSLGLFGLQVPEEYGGLGFSNTMYSRLGEIISMDGSITVTLAAHQAIGLKGIILAGTEEQKAKYLPKLASGEHIAAFCLTEPASGSDAASIRSRATLSEDKKHYILNGSKGPALSPRLECRARSWLTAASTSWAQVWITNGGLANIFTVFAKTEVVDSDGSVKDKITAFIVERDFGGVTNGKPEDKLGIRGSNTCEVHFENTKIPVENILGEVGDGFKVAMNILNSGRFSMGSVVAGLLKRLIEMTAEYACTRKQFNKRLSEFGLIQEKFALMAQKAYVMESMTYLTAGMLDQPGFPDCSIEAAMVKVFSSEAAWQCVSEALQILGGLGYTRDYPYERILRDTRILLIFEGTNEILRMYIALTGLQHAGRILTTRIHELKQAKVSTVMDTVGRRLRDSLGRTVDLGLTGNHGVVHPSLADSANKFEENTYCFGRTVETLLLRFGKTIMEEQLVLKRVANILINLYGMTAVLSRASRSIRIGLRNHDHEVLLANTFCVEAYLQNLFSLSQLDKYAPENLDEQIKKVSQQILEKRAYICAHPLDRTC

SEQ ID NO: 756689 - protein, 558 aa, Homo sapiens
MSGCGLFLRTTAAARACRGLVVSTANRRLLRTSPPVRAFAKELFLGKIKKKEVFPFPEVSQDELNEINQFLGPVEKFFTEEVDSRKIDQEGKIPDETLEKLKSLGLFGLQVPEEYGGLGFSNTMYSRLGEIISMDGSITVTLAAHQAIGLKGIILAGTEEQKAKYLPKLASGEHIAAFCLTEPASGSDAASIRSRATLSEDKKHYILNGSKVWITNGGLANIFTVFAKTEVVDSDGSVKDKITAFIVERDFGGVTNGKPEDKLGIRGSNTCEVHFENTKIPVENILGEVGDGFKVAMNILNSGRFSMGSVVAGLLKRLIEMTAEYACTRKQFNKRLSEFGLIQEKFALMAQKAYVMESMTYLTAGMLDQPGFPDCSIEAAMVKVFSSEAAWQCVSEALQILGGLGYTRDYPYERILRDTRILLIFEGTNEILRMYIALTGLQHAGRILTTRIHELKQAKVSTVMDTVGRRLRDSLGRTVDLGLTGNHGVVHPSLADSANKFEENTYCFGRTVETLLLRFGKVTRPSQAWVASGPPIWPAFMRLLFVKHPLGPGLEQKC

SEQ ID NO: 756690 - protein, 325 aa, Homo sapiens [sequence omitted]

SEQ ID NO: 756691 - protein, 548 aa, Homo sapiens
MSGCGLFLRTTAAARACRGLVVSTANRRLLRTSPPVRAFAKELFLGKIKKKEVFPFPEVSQDELNEINQFLGPVEKFFTEEVDSRKIDQEGKIPDETLEKLKSLGLFGLQVPEEYGGLGFSNTMYSRLGEIISMDGSITVTLAAHQAIGLKGIILAGTEEQKAKYLPKLASGEHIAAFCLTEPASGSDAASIRSRATLSEDKKHYILNGSKVWITNGGLANIFTVFAKTEVVDSDGSVKDKITAFIVERDFGGVTNGKPEDKLGIRGSNTCEVHFENTKIPVENILGEVGDGFKVAMNILNSGRFSMGSVVAGLLKRLIEMTAEYACTRKQFNKRLSEFGLIQEKFALMAQKAYVMESMTYLTAGMLDQPGFPDCSIEAAMVKVFSSEAAWQCVSEALQILGGLGYTRDYPYERILRDTRILLIFEGTNEILRMYIALTGLQHAGRILTTRIHELKQAKVSTVMDTVGRRLRDSLGRTVDLGLTGNHGVVHPSLATVPQVEGTPTASADVGPAGRWQTLGGVLGGAILHVVGGGGRPCPPLPWWSPVT

SEQ ID NO: 756692 - protein, 468 aa, Homo sapiens
AGWYRPEWLGSAALSKKGRLRLRLGNIGQHERLRALPAHHGCGSCLPGSGGLYREPAATAHQPACTSFRQRAFPRQNQEGNASPGRTLAVWLPLFTLSCKTGVELCEIPQTCQRDTPCGRGVLTLRIPEFQENLPREKVDSRKIDQEGKIPDETLEKLKSLGLFGLQVPEEYGGLGFSNTMYSRLGEIISMDGSITVTLAAHQAIGLKGIILAGTEEQKAKYLPKLASGEHIAAFCLTEPASGSDAASIRSRATLSEDKKHYILNGSKVWITNGGLANIFTVFAKTEVVDSDGSVKDKITAFIVERDFGGVTNGKPEDKLGIRGSNTCEVHFENTKIPVENILGEVGDGFKVAMNIPPQSRRIHALGRGPMSMALIKTNDRTELLTTPAPRKQITRRLSAKIGTWTPRTHNWAPALSLTTRISGHRTANDPTSPLGDFCPKLDIPPLFTRTTHCQMVVSTRTPVLVRN

SEQ ID NO: 756693 - protein, 621 aa, Homo sapiens; identical to SEQ ID NO: 756684

SEQ ID NO: 756694 - protein, 621 aa, Homo sapiens; identical to SEQ ID NO: 756684

SEQ ID NO: 756695 - protein, 645 aa, Homo sapiens
RGPVTSSDVCVPAALRSKKGRLRLRLGNIGQHERLRALPAHHGCGSCLPGSGGLYREPAATAHQPACTSFRQRAFPRQNQEEVSQDELNEINQFLGPVEKFFTEEVDSRKIDQEGKIPDETLEKLKSLGLFGLQVPEEYGGLGFSNTMYSRLGEIISMDGSITVTLAAHQAIGLKGIILAGTEEQKAKYLPKLASGEHIAAFCLTEPASGSDAASIRSRATLSEDKKHYILNGSKVWITNGGLANIFTVFAKTEVVDSDGSVKDKITAFIVERDFGGVTNGKPEDKLGIRGSNTCEVHFENTKIPVENILGEVGDGFKVAMNILNSGRFSMGSVVAGLLKRLIEMTAEYACTRKQFNKRLSEFGLIQEKFALMAQKAYVMESMTYLTAGMLDQPGFPDCSIEAAMVKVFSSEAAWQCVSEALQILGGLGYTRDYPYERILRDTRILLIFEGTNEILRMYIALTGLQHAGRILTTRIHELKQAKVSTVMDTVGRRLRDSLGRTVDLGLTGNHGVVHPSLADSANKFEENTYCFGRTVETLLLRFGKTIMEEQLVLKRVANILINLYGMTAVLSRASRSIRIGLRNHDHEVLLANTFCVEAYLQNLFSLSQLDKYAPENLDEQIKKVSQQILEKRAYICAHPLDRTC

SEQ ID NO: 756696 - protein, 621 aa, Homo sapiens; identical to SEQ ID NO: 756684

SEQ ID NO: 756697 - protein, 415 aa, Homo sapiens
MASTRLGLNGRGLANIFTVFAKTEVVDSDGSVKDKITAFIVERDFGGVTNGKPEDKLGIRGSNTCEVHFENTKIPVENILGEVGDGFKVAMNILNSGRFSMGSVVAGLLKRLIEMTAEYACTRKQFNKRLSEFGLIQEKFALMAQKAYVMESMTYLTAGMLDQPGFPDCSIEAAMVKVFSSEAAWQCVSEALQILGGLGYTRDYPYERILRDTRILLIFEGTNEILRMYIALTGLQHAGRILTTRIHELKQAKVSTVMDTVGRRLRDSLGRTVDLGLTGNHGVVHPSLADSANKFEENTYCFGRTVETLLLRFGKTIMEEQLVLKRVANILINLYGMTAVLSRASRSIRIGLRNHDHEVLLANTFCVEAYLQNLFSLSQLDKYAPENLDEQIKKVSQQILEKRAYICAHPLDRTC

SEQ ID NO: 756698 - protein, 655 aa, Homo sapiens
MSGCGLFLRTTAAARACRGLVVSTANRRLLRTSPPVRAFAKELFLGKIKKKEVFPFPEVSQDELNEINQFLGPVEKFFTEEVDSRKIDQEGKIPDETLEKLKSLGLFGLQVPEEYGGLGFSNTMYSRLGEIISMDGSITVTLAAHQAIGLKGIILAGTEEQKAKYLPKLASGEHIAAFCLTEPASGSDAASIRSRATLSEDKKHYILNGSKGPALSPRLECRARSWLTAASTSWAQVWITNGGLANIFTVFAKTEVVDSDGSVKDKITAFIVERDFGGVTNGKPEDKLGIRGSNTCEVHFENTKIPVENILGEVGDGFKVAMNILNSGRFSMGSVVAGLLKRLIEMTAEYACTRKQFNKRLSEFGLIQFLVFFLNIQEKFALMAQKAYVMESMTYLTAGMLDQPGFPDCSIEAAMVKVFSSEAAWQCVSEALQILGGLGYTRDYPYERILRDTRILLIFEGTNEILRMYIALTGLQHAGRILTTRIHELKQAKVSTVMDTVGRRLRDSLGRTVDLGLTGNHGVVHPSLADSANKFEENTYCFGRTVETLLLRFGKTIMEEQLVLKRVANILINLYGMTAVLSRASRSIRIGLRNHDHEVLLANTFCVEAYLQNLFSLSQLDKYAPENLDEQIKKVSQQILEKRAYICAHPLDRTC

SEQ ID NO: 756699 - protein, 316 aa, Homo sapiens
LRQHTSSVKVCQNDEMTAEYACTRKQFNKRLSEFGLIQEKFALMAQKAYVMESMTYLTAGMLDQPGFPDCSIEAAMVKVFSSEAAWQCVSEALQILGGLGYTRDYPYERILRDTRILLIFEGTNEILRMYIALTGLQHAGRILTTRIHELKQAKVSTVMDTVGRRLRDSLGRTVDLGLTGNHGVVHPSLADSANKFEENTYCFGRTVETLLLRFGKTIMEEQLVLKRVANILINLYGMTAVLSRASRSIRIGLRNHDHEVLLANTFCVEAYLQNLFSLSQLDKYAPENLDEQIKKVSQQILEKRAYICAHPLDRTC

SEQ ID NO: 756700 - protein, 277 aa, Homo sapiens
MGTPINRGCEARLHLCVKLALGGNQPGFPDCSIEAAMVKVFSSEAAWQCVSEALQILGGLGYTRDYPYERILRDTRILLIFEGTNEILRMYIALTGLQHAGRILTTRIHELKQAKVSTVMDTVGRRLRDSLGRTVDLGLTGNHGVVHPSLADSANKFEENTYCFGRTVETLLLRFGKTIMEEQLVLKRVANILINLYGMTAVLSRASRSIRIGLRNHDHEVLLANTFCVEAYLQNLFSLSQLDKYAPENLDEQIKKVSQQILEKRAYICAHPLDRTC

SEQ ID NO: 756701 - protein, 112 aa, Homo sapiens
GPWTFCSELKQAKVSTVMDTVGRRLRDSLGRTVDLGLTGNHGVVHPSLADSANKFEENTYCFGRTVETLLLRFGKVTRPSQAWVASGPPIWPAFMRLLFVKHPLGPGLEQKC

SEQ ID NO: 756702 - protein, 83 aa, Homo sapiens
TAAARACRGLVVSTANRRLLRTSPPVRAFAKELFLGKIKKVTRALGEPLLSGSRFSPSAARLVLNFVRFPKPAREIHPAAEAC

SEQ ID NO: 756703 - protein, 239 aa, Homo sapiens
MEGTVESQTPDLRDVEGKVGRKTPEGLLRGLRGECELGTSGALLLPGASSTGHDLGDKIMALKMELAYLRAIDVKILQQLVTLNEGIEAVRWLLEERGTLTSHCSSLTSSQYSLTGGSPGRSRRGSWDSLPDTSTTDRLDSVSIGSFLDTVAPSELDEQGPPGAPRSEMDWAKVIAGGERARTEVDVAATRLGSLRAVWKPPGERLQGGPPESPEDESAKLGFEAHWFWEQCQDDVTFL

SEQ ID NO: 756704 - protein, 249 aa, Homo sapiens
MEGTVESQTPDLRDVEGKVGRKTPEGLLRGLRGECELGTSGALLLPGASSTGHDLGDKIMALKMELAYLRAIDVKILQQLVTLNEGIEAVRWLLEERGTLTSHCSSLTSSQYSLTGGSPGRSRRGSWDSLPDTSTTDRLDSVSIGSFLDTVAPSELDEQGPPGAPRSEMDWAKVIAGGERARTEVDVAATRLGSLRAVWKPPGERLQGGPPESPEDESAKLGFEAHWFWEQCQDDVTFLSLCQTQAQDG

SEQ ID NO: 756705 - protein, 59 aa, Homo sapiens
GNEMGFMIGALTDRMVYKKSGGEESECFLPAELLHSRQGPARPVFAEGGQASFACLKGT

SEQ ID NO: 756706 - protein, 136 aa, Homo sapiens
FFLRQGLALSPRLEFSGPSIAHCSLDLLGFKVILLPQPAKQLGLFADGIKKQGICVSLWKNPGSSGTVGSLCCCHVIKKLEVAEPNPYTQNTSQGHLSLLHLAMTPKEKSKWSLHAKQVANHHRFCLSNYQIYVYI

SEQ ID NO: 756707 - protein, 317 aa, Homo sapiens
MGYDVTRFQGDVDEDLICPICSGVLEEPVQAPHCEHAFCNACITQWFSQQQTCPVDRSVVTVAHLRPVPRIMRNMLSKLQIACDNAVFGCSAVVRLDNLMSHLSDCEHNPKRPVTCEQGCGLEMPKDELPNHNCIKHLRSVVQQQQTRIAELEKTSAEHKHQLAEQKRDIQLLKAYMRAIRSVNPNLQNLEETIEYNEILEWVNSLQPARVTRWGGMISTPDAVLQAVIKRSLVESGCPASIVNELIENAHERSWPQGLATLETRQMNRRYYENYVAKRIPGKQAVVVMACENQHMGDDMVQEPGLVMIFAHGVEEI

SEQ ID NO: 756708 - protein, 317 aa, Homo sapiens; identical to SEQ ID NO: 756707

SEQ ID NO: 756709 - protein, 317 aa, Homo sapiens; identical to SEQ ID NO: 756707

SEQ ID NO: 756710 - protein, 317 aa, Homo sapiens; identical to SEQ ID NO: 756707

SEQ ID NO: 756711 - protein, 317 aa, Homo sapiens; identical to SEQ ID NO: 756707

SEQ ID NO: 756712 - protein, 246 aa, Homo sapiens
MRNMLSKLQIACDNAVFGCSAVVRLDNLMSHLSDCEHNPKRPVTCEQGCGLEMPKDELPNHNCIKHLRSVVQQQQTRIAELEKTSAEHKHQLAEQKRDIQLLKAYMRAIRSVNPNLQNLEETIEYNEILEWVNSLQPARVTRWGGMISTPDAVLQAVIKRSLVESGCPASIVNELIENAHERSWPQGLATLETRQMNRRYYENYVAKRIPGKQAVVVMACENQHMGDDMVQEPGLVMIFAHGVEEI

SEQ ID NO: 756713 - protein, 317 aa, Homo sapiens; identical to SEQ ID NO: 756707

SEQ ID NO: 756714 - protein, 317 aa, Homo sapiens; identical to SEQ ID NO: 756707

SEQ ID NO: 756715 - protein, 317 aa, Homo sapiens; identical to SEQ ID NO: 756707

SEQ ID NO: 756716 - protein, 317 aa, Homo sapiens; identical to SEQ ID NO: 756707

SEQ ID NO: 756717 - protein, 121 aa, Homo sapiens
MGYDVTRFQGDVDEDLICPICSGVLEEPVQAPHCEHAFCNACITQWFSQQQTCPVDRSVVTVAHLRPVPRIMRNMLSKLQIACDNAVFGCSAVVRLDNLMSHLSDCEHNPKRPVTCEQGCG

SEQ ID NO: 756718 - protein, 796 aa, Homo sapiens
MTKDKEPIVKSFHFVCLMIIIVGTRIQFSDGNEFAVDKSKRGLIHVPKDLPLKTKVLDMSQNYIAELQVSDMSFLSELTVLRLSHNRIQLLDLSVFKFNQDLEYLDLSHNQLQKISCHPIVSFRHLDLSFNDFKALPICKEFGNLSQLNFLGLSAMKLQKLDLLPIAHLHLSYILLDLRNYYIKENETESLQILNAKTLHLVFHPTSLFAIQVNISVNTLGCLQLTNIKLNDDNCQVFIKFLSELTRGPTLLNFTLNHIETTWKCLVRVFQFLWPKPVEYLNIYNLTIIESIREEDFTYSKTTLKALTIEHITNQVFLFSQTALYTVFSEMNIMMLTISDTPFIHMLCPHAPSTFKFLNFTQNVFTDSIFEKCSTLVKLETLILQKNGLKDLFKVGLMTKDMPSLEILDVSWNSLESGRHKENCTWVESIVVLNLSSNMLTDSVFRCLPPRIKVLDLHSNKIKSVPKQVVKLEALQELNVAFNSLTDLPGCGSFSSLSVLIIDHNSVSHPSADFFQSCQKMRSIKAGDNPFQCTCELREFVKNIDQVSSEVLEGWPDSYKCDYPESYRGSPLKDFHMSELSCNITLLIVTIGATMLVLAVTVTSLCIYLDLPWYLRMVCQWTQTRRRARNIPLEELQRNLQFHAFISYSEHDSAWVKSELVPYLEKEDIQICLHERNFVPGKSIVENIINCIEKSYKSIFVLSPNFVQSEWCHYELYFAHHNLFHEGSNNLILILLEPIPQNSIPNKYHKLKALMTQRTYLQWPKEKSKRGLFWANIRAAFNMKLTLVTENNDVKS

SEQ ID NO: 756719 - protein, 408 aa, Homo sapiens
YELSKIAEDDYTDEDLCNNWHVSQNSVSYDEKKGDCSWTKSLLSINLSSNMLTDSVFRCLPPRIKVLDLHSNKIKSVPKQVVKLEALQELNVAFNSLTDLPGCGSFSSLSVLIIDHNSVSHPSADFFQSCQKMRSIKAGDNPFQCTCELREFVKNIDQVSSEVLEGWPDSYKCDYPESYRGSPLKDFHMSELSCNITLLIVTIGATMLVLAVTVTSLCIYLDLPWYLRMVCQWTQTRRRARNIPLEELQRNLQFHAFISYSEHDSAWVKSELVPYLEKEDIQICLHERNFVPGKSIVENIINCIEKSYKSIFVLSPNFVQSEWCHYELYFAHHNLFHEGSNNLILILLEPIPQNSIPNKYHKLKALMTQRTYLQWPKEKSKRGLFWANIRAAFNMKLTLVTENNDVKS

SEQ ID NO: 756720 - protein, 377 aa, Homo sapiens
MFNPHALDSPAVIFDNGSGFCKAGLSGEFGPRHMVSSIVGHLKFQAPSAEANQKKYFVGEEALYKQEALQLHSPFERGLITGWDDVERLWKHLFEWELGVKPSDQPLLATEPSLNPRENREKMAEVMFENFGVPAFYLSDQAVLALYASACVTGLVVDSGDAVTCTVPIFEGYSLPHAVTKLHVAGRDITELLMQLLLASGHTFPCQLDKGLVDDIKKKLCYVALEPEKELSRRPEEVLREYKLPDGNIISLGDPLHQAPEALFVPQQLGSQSPGLSNMVSSSITKCDTDIQKILFGEIVLSGGTTLFHGLDDRLLKELEQLASKDTPIKITAPPDRWFSTWIGASIVTSLSSFKQMWVTAADFKEFGTSVVQRRCF

SEQ ID NO: 756721 - protein, 377 aa, Homo sapiens; identical to SEQ ID NO: 756720

SEQ ID NO: 756722 - protein, 75 aa, Homo sapiens
IRTLRLWIEADATVPGKPHCPPIPALASVPVRSCTMLLSAILPSPALPACWSCIALHLTDSYSTALASPKHTWPS

SEQ ID NO: 756723 - protein, 148 aa, Homo sapiens
STLRHCKYSVTKLIEGKEYLFRVRAENRFGPGPPCVSKPLVAKDPFGPPDAPDKPIVEDVTSNSMLVKWNEPKDNGSPILGYWLEKREVNSTHWSRVNKSLLNALKANVDGLLEGLTYVFRVCAENAAGPGKFSPPSDPKTAHDPICK

SEQ ID NO: 756724 - protein, 435 aa, Homo sapiens
MATQTLSIDSYQDGQQMQVVTELKTEQDPNCSEPDAEGVSPPPVESQTPMDVDKQAIYRHPLFPLLALLFEKCEQSTQGSEGTTSASFDVDIENFVRKQEKEGKPFFCEDPETDNLMVKAIQVLRIHLLELEKVNELCKDFCSRYIACLKTKMNSETLLSGEPGSPYSPVQSQQIQSAITGTISPQGIVVPASALQQGNVAMATVAGGTVYQPVTVVTPQGQVVTQTLSPGTIRIQNSQLQLQLNQDLSILHQDDGSSKNKRGVLPKHATNVMRSWLFQHIGHPYPTEDEKKQIAAQTNLTLLQVNNWFINARRRILQPMLDSSCSETPKTKKKTAQNRPVQRFWPDSIASGVAQPPPSELTMSEGAVVTITTPVNMNVDSLQSLSSDGATLAVQQVMMAGQSEDESVDSTEEDAGALAPAHISGLVLENSDSLQ

SEQ ID NO: 756725 - protein, 217 aa, Homo sapiens
MATQTLSIDSYQDGQQMQVVTELKTEQDPNCSEPDAEGVSPPPVESQTPMDVDKQAIYRHPLFPLLALLFEKCEQSTQGSEGTTSASFDVDIENFVRKQEKEGKPFFCEDPETDNLMVKAIQVLRIHLLELEKVNELCKDFCSRYIACLKTKMNSETLLSGEPGSPYSPVQSQQIQSAITGTISPQGIVVPASALQQGNVAMATVAGTMTEKWTRSP

SEQ ID NO: 756726 - protein, 435 aa, Homo sapiens; identical to SEQ ID NO: 756724

SEQ ID NO: 756727 - protein, 435 aa, Homo sapiens; identical to SEQ ID NO: 756724

SEQ ID NO: 756728 - protein, 435 aa, Homo sapiens; identical to SEQ ID NO: 756724

SEQ ID NO: 756729 - protein, 283 aa, Homo sapiens [sequence omitted]

SEQ ID NO: 756730 - protein, 163 aa, Homo sapiens
MRSWLFQHIGHPYPTEDEKKQIAAQTNLTLLQVNNWFINARRRILQPMLDSSCSETPKTKKKTAQNRPVQRFWPDSIASGVAQPPPSELTMSEGAVVTITTPVNMNVDSLQSLSSDGATLAVQQVMMAGQSEDESVDSTEEDAGALAPAHISGLVLENSDSLQ

SEQ ID NO: 756731 - protein, 164 aa, Homo sapiens
KAMVTFFFYFQHPYPTEDEKKQIAAQTNLTLLQVNNWFINARRRILQPMLDSSCSETPKTKKKTAQNRPVQRFWPDSIASGVAQPPPSELTMSEGAVVTITTPVNMNVDSLQSLSSDGATLAVQQVMMAGQSEDESVDSTEEDAGALAPAHISGLVLENSDSLQ

SEQ ID NO: 756732 - protein, 217 aa, Homo sapiens; identical to SEQ ID NO: 756725

SEQ ID NO: 756733 - protein, 71 aa, Homo sapiens
FQEGLAQLTSGKVSKLCDLGNRGGVLSSGVFCQLDSETLACWGEDEALMWSGQLWVGHLHHRALTRACYRP

SEQ ID NO: 756734 - protein, 653 aa, Homo sapiens
GTRSTPVTERSRLVCLRAAVPRMNPSTPSYPTASLYVGDLHPDVTEAMLYEKFSPAGPILSIRICRDLITSGSSNYAYVNFQHTKDAEHALDTMNFDVIKGKPVRIMWSQRDPSLRKSGVGNIFVKNLDKSINNKALYDTVSAFGNILSCNVVCDENGSKGYGFVHFETHEAAERAIKKMNGMLLNGRKVFVGQFKSRKEREAELGARAKEFPNVYIKNFGEDMDDERLKDLFGKFGPALSVKVMTDESGKSKGFGFVSFERHEDAQKAVDEMNGKELNGKQIYVGRAQKKVERQTELKRTFEQMKQDRITRYQVVNLYVKNLDDGIDDERLRKAFSPFGTITSAKVMMEGGRSKGFGFVCFSSPEEATKAVTEMNGRIVATKPLYVALAQRKEERQAYLTNEYMQRMASVRAVPNQRAPPSGYFMTAVPQTQNHAAYYPPSQIARLRPSPRWTAQGARPHPFQNKPSAIRPGAPRVPFSTMRPASSQVPRVMSTQRVANTSTQTVGPRPAAAAAAAATPAVRTVPRYKYAAGVRNPQQHRNAQPQVTMQQLAVHVQGQETLTASRLASAPPQKQKQMLGERLFPLIQAMHPTLAGKITGMLLEIDNSELLYMLESPESLRSKVDEAVAVLQAHQAKEATQKAVNSATGVPTV

SEQ ID NO: 756735 - protein, 653 aa, Homo sapiens; identical to SEQ ID NO: 756734

SEQ ID NO: 756736 - protein, 269 aa, Homo sapiens
MIRTLLLSTLVAGALSCGDPTYPPYVTRVVGGEEARPNSWPWQVSLQYSSNGKWYHTCGGSLIANSWVLTAAHCISSSRTYRVGLGRHNLYVAESGSLAVSVSKIVVHKDWNSNQISKGNDIALLKLANPVSLTDKIQLACLPPAGTILPNNYPCYVTGWGRLQTNGAVPDVLQQGRLLVVDYATCSSSAWWGSSVKTSMICAGGDGVISSCNGDSGGPLNCQASDGRWQVHGIVSFGSRLGCNYYHKPSVFTRVSNYIDWINSVIANN

SEQ ID NO: 756737 - protein, 228 aa, Homo sapiens
LTELPRTHHDKDAAAVHFGGWRNDIALLKLANPVSLTDKIQLACLPPAGTILPNNYPCYVTGWGRLQTNGAVPDVLQQGRLLVVDYATCSSSAWWGSSVKTSMICAGGDGVISSCNVSLQYSSNGQWYHTCGGSLIANSWVLTAAHCISSSRIYRVMLGQHNLYVAESGSLAVSVSKIVVHKDWNSNQVSKGNELPVKWYPVSLTNNDKALVFTRVSNYIDWINSVIE

SEQ ID NO: 756738 - protein, 269 aa, Homo sapiens; identical to SEQ ID NO: 756736

SEQ ID NO: 756739 - protein, 473 aa, Homo sapiens
MIRTLLLSTLVAGALSCGDPTYPPYVTRVVGGEEARPNSWPWQVSLQYSSNGKWYHTCGGSLIANSWVLTAAHCISSSRTYRVGLGRHNLYVAESGSLAVSVSKIVVHKDWNSNQISKGNDIALLKLANPVSLTDKIQLACLPPAGTILPNNYPCYVTGWGRLQTNGAVPDVLQQGRLLVVDYATCSSSAWWGSSVKTSMICAGGDGVISSCNGDSGGPLNCQASDGRWQVHGIVSFGSRLGCNYYHKPSVFTRVSNYIDWINSRLSCGVSTYAPDMSRMLGGDRSEAQQSVLLVEVSLQYSSNGQWYHTCGGSLIANSWVLTAAHCISSSRIYRVMLGQHNLYVAESGSLAVSVSKIVVHKDWNSNQVSKGNDIALLKLANPVSLTDKIQLACLPPAGTILPNNYPCYVTGWGRLQTNGALPDDLKQGQLLVVDYATCSSSGWWGSTVKTNMICAGGDGVICTCNVSTKNQG

SEQ ID NO: 756740 - protein, 215 aa, Homo sapiens
MIRTLLLSTLVAGALSCGDPTYPPYVTRVVGGEEARPNSWPWQVSLQYSSNGKWYHTCGGSLIANSWVLTAAHCISSSRTYRVGLGRHNLYVAESGSLAVSVSKIVVHKDWNSNQISKGNDIALLKLANPVSLTDKIQLACLPPAGTILPNNYPCYVTGWGRLQTNGAVPDVLQQGRLLVVDYATCSSSAWWGSSVKTSMICAGGDGVISSCNAT

SEQ ID NO: 756741 - protein, 274 aa, Homo sapiens
MICAGGDGVISSCNGDSGGPLNCQASDGRWQVHGIVSFGSRLGCNYYHKPSVFTRVSNYIDWINSRLSCGVSTYAPDMSRMLGGDRSEAQQSVLLVEVSLQYSSNGQWYHTCGGSLIANSWVLTAAHCISSSRIYRVMLGQHNLYVAESGSLAVSVSKIVVHKDWNSNQVSKGNDIALLKLANPVSLTDKIQLACLPPAGTILPNNYPCYVTGWGRLQTNGALPDDLKQGQLLVVDYATCSSSGWWGSTVKTNMICAGGDGVICTCNVSTKNQG

SEQ ID NO: 756742 - protein, 94 aa, Homo sapiens
QKGRLALHLNLGDSKARLSSSLPSATLGSLLDDQHWHSVLIERVGKQVNFTVDKHTQHFRTKGETDALDIDYELSFGGIPVPGKPGTFLKKNFH

SEQ ID NO: 756743 - protein, 131 aa, Homo sapiens
CPLSIHPSIHSSIHPFIHPSIYASIHPSTHPSIHPSIRLPIHSSIYLPIHLLIHSSIHPPTRPFIHPLIHPSSLESLRHAKDCPGYWRDRNERHYSCLQGTHSLVGCQKTKQMIPVQSVRCPEGQVASCLS

SEQ ID NO: 756744 - protein, 111 aa, Homo sapiens
MSLGLKDYAFTFNMKSMDGVYINNHVGLPILNPLVLVHTHMDISISTFTLVSKDKIKTHLVMYLIGFYSRFMNRCSLHSNRITASTGQWQTIGFCEVGMRKHNNGENKLIS

SEQ ID NO: 756745 - protein, 217 aa, Homo sapiens
GRVGRPTRRGRFSGDTGFGRERNSGTKLFNISGHVNHPCTVEEEMSVPLKELIEKHAGGVTGGWDNLLAVIPGGSSTPLIPKSVCETVLMDFDALVQAQTGLGTAAVIVMDRSTDIVKAIARLIEFYKHESCGQCTPCREGVDWMNKVMARFVRGDARPAEIDSLWEISKQIEGHTICALGDGAAWPVQGLIRHFRPELEERMQRFAQQHQARQAAS

SEQ ID NO: 756746 - protein, 311 aa, Homo sapiens
MLATRRLLGWSLPARVSVRFSGDTTAPKKTSFGSLKDEDRIFTNLYGRHDWRLKGSLSRGDWYKTKEILLKGPDWILGEIKTSGLRGRGGAGFPTGLKWSFMNKPSDGRPKYLVVNADEGEPGTCKDREILRHDPHKLLEGCLVGGRAMGARAAYIYIRGEFYNEASNLQVAIREAYEAGLIGKNACGSGYDFDVFVVRGAGAYICGEETALIESIEGKQGKPRLKPPLPRRRGSVGAHNVARGDVECPKSAAGGPGCWPWRDASGHIHFWAVHLLWGFWPSMLAVRVRGHPVIRAYLPLLRCLRDSAGWR

SEQ ID NO: 756747 - protein, 173 aa, Homo sapiens
MSVPLKELIEKHAGGVTGGWDNLLAVIPGGSSTPLIPKSVCETVLMDFDALVQAQTGLGTAAVIVMDRSTDIVKAIARLIEFYKHESCGQCTPCREGVDWMNKVMARFVRGDARPAEIDSLWEISKQIEGHTICALGDGAAWPVQGLIRHFRPELEERMQRFAQQHQARQAAS

SEQ ID NO: 756748 - protein, 296 aa, Homo sapiens
MLATRRLLGWSLPARVSVRFSGDTTAPKKTSFGSLKDEDRIFTNLYGRHDWRLKGSLSRGDWYKTKEILLKGPDWILGEIKTSGLRGRGGAGFPTGLKWSFMNKPSDGRPKYLVVNADEGEPGTCKDREILRHDPHKLLEGCLVGGRAMGARAAYIYIRGEFYNEASNLQVAIREAYEAGLIGKNACGSGYDFDVFVVRGAGAYICGEETALIESIEGKQGKPRLKPPLPRRRGECLAAPQLWPTWRQWQCPPQSAAVEVPGLLALAENATQAPNYSTSLAMSTTLALWRRRCLCP

SEQ ID NO: 756749 - protein, 296 aa, Homo sapiens; identical to SEQ ID NO: 756748

SEQ ID NO: 756750 - protein, 296 aa, Homo sapiens; identical to SEQ ID NO: 756748

SEQ ID NO: 756751 - protein, 296 aa, Homo sapiens; identical to SEQ ID NO: 756748

SEQ ID NO: 756752 - protein, 296 aa, Homo sapiens; identical to SEQ ID NO: 756748

SEQ ID NO: 756753 - protein, 296 aa, Homo sapiens; identical to SEQ ID NO: 756748

SEQ ID NO: 756754 - protein, 296 aa, Homo sapiens; identical to SEQ ID NO: 756748

SEQ ID NO: 756755 - protein, 296 aa, Homo sapiens; identical to SEQ ID NO: 756748

SEQ ID NO: 756756 - protein, 296 aa, Homo sapiens; identical to SEQ ID NO: 756748

SEQ ID NO: 756757 - protein, 287 aa, Homo sapiens
MLATRRLLGWSLPARTAPKKTSFGSLKDEDRIFTNLYGRHDWRLKGSLSRGDWYKTKEILLKGPDWILGEIKTSGLRGRGGAGFPTGLKWSFMNKPSDGRPKYLVVNADEGEPGTCKDREILRHDPHKLLEGCLVGGRAMGARAAYIYIRGEFYNEASNLQVAIREAYEAGLIGKNACGSGYDFDVFVVRGAGAYICGEETALIESIEGKQGKPRLKPPLPRRRGECLAAPQLWPTWRQWQCPPQSAAVEVPGLLALAENATQAPNYSTSLAMSTTLALWRRRCLCP

SEQ ID NO: 756758 - protein, 288 aa, Homo sapiens
GRVGRPTRRGRFSGDTTAPKKTSFGSLKDEDRIFTNLYGRHDWRLKGSLSRGDWYKTKEILLKGPDWILGEIKTSGLRGRGGAGFPTGLKWSFMNKPSDGRPKYLVVNADEGEPGTCKDREILRHDPHKLLEGCLVGGRAMGARAAYIYIRGEFYNEASNLQVAIREAYEAGLIGKNACGSGYDFDVFVVRGAGAYICGEETALIESIEGKQGKPRLKPPLPRRRGECLAAPQLWPTWRQWQCPPQSAAVEVPGLLALAENATQAPNYSTSLAMSTTLALWRRRCLCP

SEQ ID NO: 756759 - protein, 173 aa, Homo sapiens; identical to SEQ ID NO: 756747

SEQ ID NO: 756760 - protein, 264 aa, Homo sapiens
HRTSRCGSDFSKLYGRYDWRLKGSLSRGDWYKTKEILLKGPDWILGEIKTSGLRGRGGAGFPTGLKWSFMNKPSDGRPKYLVVNADEGEPGTCKDREILRHDPHKLLEGCLVGGRAMGARAAYIYIRGEFYNEASNLQVAIREAYEAGLIGKNACGSGYDFDVFVVRGAGAYICGEETALIESIEGKQGKPRLKPPLPRRRGECLAAPQLWPTWRQWQCPPQSAAVEVPGLLALAENATQAPNYSTSLAMSTTLALWRRRCLCP

SEQ ID NO: 756761 - protein, 278 aa, Homo sapiens
MLATRRLLGWSLPARVSVRFSGDTTAPKKTSFGSLKDEDRIFTNLYGRHDWRLKGSLSRGDWYKTKEILLKGPDWILGEIKTSGLRGRGGAGFPTGLKWSFMNKPSDGRPKYLVVNADEGEPGTCKDREILRHDPHKLLEGCLVGGRAMGARAAYIYIRGAGLIGKNACGSGYDFDVFVVRGAGAYICGEETALIESIEGKQGKPRLKPPLPRRRGECLAAPQLWPTWRQWQCPPQSAAVEVPGLLALAENATQAPNYSTSLAMSTTLALWRRRCLCP

SEQ ID NO: 756762 - protein, 234 aa, Homo sapiens
MLVGVFGCPTTVANVETVAVSPTICRRGGTWFAGFGRERNSGTKLFNISGHVNHPCTVEEEMSVPLKELIEKHAGGVTGGWDNLLAVIPGGSSTPLIPKSVCETVLMDFDALVQAQTGLGTAAVIVMDRSTDIVKAIARLIEFYKHESCGQCTPCREGVDWMNKVMARFVRGDARPAEIDSLWEISKQIEGHTICALGDGAAWPVQGLIRHFRPELEERMQRFAQQHQARQAAS

SEQ ID NO: 756763 - protein, 173 aa, Homo sapiens; identical to SEQ ID NO: 756747

SEQ ID NO: 756764 - protein, 310 aa, Homo sapiens
MLATRRLLGWSLPARVSVRFSGDTTAPKKTSFGSLKDEDRIFTNLYGRHDWRLKGSLSRGDWYKTKEILLKGPDWILGEIKTSGLRGRGGAGFPTGLKWSFMNKPSDGRPKYLVVNADEGEPGTCKDREILRHDPHKLLEGCLVGGRAMGARAAYIYIRGEFYNEASNLQVAIREAYEAGLIGKNACGSGYDFDVFVVRGAGAYICGEETALIESIEGKQGKPRLKPPLPRRRGSVWWPTLGQRGDRGVSPIAPEDRCGLQEARALSFAVAMSGGGLPPSSSRAGAPLSAPHSGSLAGLPLLSPVCAALA

SEQ ID NO: 756765 - protein, 206 aa, Homo sapiens
MLATRRLLGWSLPARVSVRFSGDTTAPKKTSFGSLKDEDRIFTNLYGRHDWRLKGSLSRGDWYKTKEILLKGPDWILGEIKTSGLRGRGGAGFPTGLKWSFMNKPSDGRPKYLVVNADEGEPGTCKDREILRHDPHKLLEGCLVGGRAMGARAAYIYIRGEFYNEASNLQVGRERCRQMRRCSVCTHTPLTQHSCSEVLVPGDVRD

SEQ ID NO: 756766 - protein, 53 aa, Homo sapiens
MGARAAYIYIRGEFYNEASNLQVGRERCRQMRRCSVCTHTPLTQHSCSEVLVP

SEQ ID NO: 756767 - protein, 296 aa, Homo sapiens; identical to SEQ ID NO: 756748

SEQ ID NO: 756768 - protein, 296 aa, Homo sapiens; identical to SEQ ID NO: 756748

SEQ ID NO: 756769 - protein, 296 aa, Homo sapiens; identical to SEQ ID NO: 756748

SEQ ID NO: 756770 - protein, 296 aa, Homo sapiens; identical to SEQ ID NO: 756748

SEQ ID NO: 756771 - protein, 263 aa, Homo sapiens
MLATRRLLGWSLPARVSVRFSGDTTAPKKTSFGSLKDEDRIFTNLYGRHDWRLKGSLSRGDWYKTKEILLKGPDWILGEIKTSGLRGRGGAGFPTGLKWSFMNKPSDGRPKYLVVNADEGEPGTCKDREILRHDPHKLLEGCLVGGRAMGARAAYIYIRGEFYNEASNLQVAIREAYEAGLIGKNACGSGYDFDVFVVRGAGAYICGEETALIESIEGKQGKPRLKPPLPRRRGECLAAPQLWPTPCCDPWRLVYPTDPQVCV

SEQ ID NO: 756772 - protein, 309 aa, Homo sapiens
MLATRRLLGWSLPARVSVRFSGDTTAPKKTSFGSLKDEDRIFTNLYGRHDWRLKGSLSRGDWYKTKEILLKGPDWILGEIKTSGLRGRGGAGFPTGLKWSFMNKPSDGRPKYLVVNADEGEPGTCKDREILRHDPHKLLEGCLVGGRAMGARAAYIYIRGEFYNEASNLQVAIREAYEAGLIGKNACGSGYDFDVFVVRGAGAYICGEETALIESIEGKQGKPRLKPPLPRRRGECLAAPQLWPTWRQWQCPPQSAAVEVPGLLWLEKASGQSSFGCTLLGSLLNEPGGGTHDGPAQLQVGKASHGYIR

SEQ ID NO: 756773 - protein, 173 aa, Homo sapiens; identical to SEQ ID NO: 756747

SEQ ID NO: 756774 - protein, 173 aa, Homo sapiens; identical to SEQ ID NO: 756747

SEQ ID NO: 756775 - protein, 173 aa, Homo sapiens; identical to SEQ ID NO: 756747

SEQ ID NO: 756776 - protein, 311 aa, Homo sapiens; identical to SEQ ID NO: 756746

SEQ ID NO: 756777 - protein, 107 aa, Homo sapiens
MCSPEETAFIASVSQRSLMVLVSWAPRISVSPFVLKLTSLSWMAPWTSTSPSPSRHTGGTLVHREDACSGHQLESGRPWVPDLWTLPHRALPQSLLLPLAGWSWQGS

SEQ ID NO: 756778 - protein, 113 aa, Homo sapiens
  misc_feature (7)..(7): Xaa can be any naturally occurring amino acid
KRAAVRXGLGMETAFIASVSQRSLMVLVSWAPRISVSPFVLKLTSLSWMAPWTSTSPSPSRHTGGTLVHREDACSGHQLESGRPWVPDLWTLPHRALPQSLLLPLAGWSWQGS

SEQ ID NO: 756779 - protein, 70 aa, Homo sapiens
SGVFSADTSLVSSFIPGCQARQGTAAALVLTALATGLVTARSSCFCDLSAAFRHLSAGVFLGPCELPVLL

SEQ ID NO: 756780 - protein, 2008 aa, Homo sapiens
MVCLGTGQSAGPLVSVQNHCPPCGLSPQESLGLALGQAQEPLHSLLEAAEDLAQELLALRSLVELRALLQRPRGTSGPLELLSEALCSVRGPSSTVGPSLNWYEASDLMELVGQEPESALPDSSLSPACSELIGALDSHPLSRLLWRRLKPLILGKLLFAPDTPFTRKLMAQVNRTFEELTLLRDVREVWEMLGPRIFTFMNDSSNVAMLQRLLQMQDEGRRQPRPGGRDHMEALRSFLDPGSGGYSWQDAHADVGHLVGTLGRVTECLSLDKLEAAPSEAALVSRALQLLAEHRFWAGVVFLGPEDSSDPTEHPTPDLGPGHVRIKIRMDIDVVTRTNKIRDRFWDPGPAADPLTDLRYVWGGFVYLQDLVERAAVRVLSGANPRAGLYLQQMPYPCYVDDVFLRVLSRSLPLFLTLAWIYSVTLTVKAVVREKETRLRDTMRAMGLSRAVLWLGWFLSCLGPFLLSAALLVLVLKLGDILPYSHPGVVFLFLAAFAVATVTQSFLLSAFFSRANLAAACGGLAYFSLYLPYVLCVAWRDRLPAGGRVAASLLSPVAFGFGCESLALLEEQGEGAQWHNVGTRPTADVFSLAQVSGLLLLDAALYGLATWYLEAVCPGQYGIPEPWNFPFRRSYWCGPRPPKSPAPCPTPLDPKVLVEEAPPGLSPGVSVRSLEKRFPGSPQPALRGLSLDFYQGHITAFLGHNGAGKTTTLSILSGLFPPSGGSAFILGHDVRSSMAAIRPHLGVCPQYNVLFDMLTVDEHVWFYGRLKGLSAAVVGPEQDRLLQDVGLVSKQSVQTRHLSGGMQRKLSVAIAFVGGSQVVILDEPTAGVDPASRRGIWELLLKYREGRTLILSTHHLDEAELLGDRVAVVAGGRLCCCGSPLFLRRHLGSGYYLTLVKARLPLTTNEKADTDMEGSVDTRQEKKNGSQGSRVGTPQLLALVQHWVPGARLVEELPHELVLVLPYTGAHDGSFATLFRELDTRLAELRLTGYGISDTSLEEIFLKVVEECAADTDMEDGSCGQHLCTGIAGLDVTLRLKMPPQETALENGEPAGSAPETDQGSGPDAVGRVQGWALTRQQLQALLLKRFLLARRSRRGLFAQIVLPALFVGLALVFSLIVPPFGHYPALRLSPTMYGAQVSFFSEDAPGDPGRARLLEALLQEAGLEEPPVQHSSHRFSAPEVPAEVAKVLASGNWTPESPSPACQCSQPGARRLLPDCPAAAGGPPPPQAVTGSGEVVQNLTGRNLSDFLVKTYPRLVRQGLKTKKWVNEVRYGGFSLGGRDPGLPSGQELGRSVEELWALLSPLPGGALDRVLKNLTAWAHSLDAQDSLKIWFNNKGWHSMVAFVNRASNAILRAHLPPGRARHAHSITTLNHPLNLTKEQLSEAALMASSVDVLVSICVVFAMSFVPASFTLVLIEERVTRAKHLQLMGGLSPTLYWLGNFLWDMCNYLVPACIVVLIFLAFQQRAYVAPANLPALLLLLLLYGWSITPLMYPASFFFSVPSTAYVVLTCINLFIGINGSMATFVLELFSDQKLQEVSRILKQVFLIFPHFCLGRGLIDMVRNQAMADAFERLGDRQFQSPLRWEVVGKNLLAMVIQGPLFLLFTLLLQHRSQLLPQPRVRSLPLLGEEDEDVARERERVVQGATQGDVLVLRNLTKVYRGQRMPAVDRLCLGIPPGECFGLLGVNGAGKTSTFRMVTGDTLASRGEAVLAGHSVAREPSAAHLSMGYCPQSDAIFELLTGREHLELLARLRGVPEAQVAQTAGSGLARLGLSWYADRPAGTYSGGNKRKLATALALVGDPAVVFLDEPTTGMDPSARRFLWNSLLAVVREGRSVMLTSHSMEECEALCSRLAIMVNGRFRCLGSPQHLKGRFAAGHTLTLRVPAARSQPAAAFVAAEFPGSELREAHGGRLRFQLPPGGRCALARVFGELAVHGAEHGVEDFSVSQTMLEEVFLYFSKDQGKDEDTEEQKEAGVGVDPAPGLQHPKRVSQFLDDPSTAETVL

SEQ ID NO: 756781 - protein, 2146 aa, Homo sapiens
MAFWTQLMLLLWKNFMYRRRQPVQLLVELLWPLFLFFILVAVRHSHPPLEHHECHFPNKPLPSAGTVPWLQGLICNVNNTCFPQLTPGEEPGRLSNFNDSLVSRLLADARTVLGGASAHRTLAGLGKLIATLRAARSTAQPQPTKQSPLEPPMLDVAELLTSLLRTESLGLALGQAQEPLHSLLEAAEDLAQELLALRSLVELRALLQRPRGTSGPLELLSEALCSVRGPSSTVGPSLNWYEASDLMELVGQEPESALPDSSLSPACSELIGALDSHPLSRLLWRRLKPLILGKLLFAPDTPFTRKLMAQVNRTFEELTLLRDVREVWEMLGPRIFTFMNDSSNVAMLQRLLQMQDEGRRQPRPGGRDHMEALRSFLDPGSGGYSWQDAHADVGHLVGTLGRVTECLSLDKLEAAPSEAALVSRALQLLAEHRFWAGVVFLGPEDSSDPTEHPTPDLGPGHVRIKIRMDIDVVTRTNKIRDRFWDPGPAADPLTDLRYVWGGFVYLQDLVERAAVRVLSGANPRAGLYLQQMPYPCYVDDVFLRVLSRSLPLFLTLAWIYSVTLTVKAVVREKETRLRDTMRAMGLSRAVLWLGWFLSCLGPFLLSAALLVLVLKLGDILPYSHPGVVFLFLAAFAVATVTQSFLLSAFFSRANLAAACGGLAYFSLYLPYVLCVAWRDRLPAGGRVAASLLSPVAFGFGCESLALLEEQGEGAQWHNVGTRPTADVFSLAQVSGLLLLDAALYGLATWYLEAVCPGQYGIPEPWNFPFRRSYWCGPRPPKSPAPCPTPLDPKVLVEEAPPGLSPGVSVRSLEKRFPGSPQPALRGLSLDFYQGHITAFLGHNGAGKTTTLSILSGLFPPSGGSAFILGHDVRSSMAAIRPHLGVCPQYNVLFDMLTVDEHVWFYGRLKGLSAAVVGPEQDRLLQDVGLVSKQSVQTRHLSGGMQRKLSVAIAFVGGSQVVILDEPTAGVDPASRRGIWELLLKYREGRTLILSTHHLDEAELLGDRVAVVAGGRLCCCGSPLFLRRHLGSGYYLTLVKARLPLTTNEKADTDMEGSVDTRQEKKNGSQGSRVGTPQLLALVQHWVPGARLVEELPHELVLVLPYTGAHDGSFATLFRELDTRLAELRLTGYGISDTSLEEIFLKVVEECAADTDMEDGSCGQHLCTGIAGLDVTLRLKMPPQETALENGEPAGSAPETDQGSGPDAVGRVQGWALTRQQLQALLLKRFLLARRSRRGLFAQIVLPALFVGLALVFSLIVPPFGHYPALRLSPTMYGAQVSFFSEDAPGDPGRARLLEALLQEAGLEEPPVQHSSHRFSAPEVPAEVAKVLASGNWTPESPSPACQCSQPGARRLLPDCPAAAGGPPPPQAVTGSGEVVQNLTGRNLSDFLVKTYPRLVRQGLKTKKWVNEVRYGGFSLGGRDPGLPSGQELGRSVEELWALLSPLPGGALDRVLKNLTAWAHSLDAQDSLKIWFNNKGWHSMVAFVNRASNAILRAHLPPGRARHAHSITTLNHPLNLTKEQLSEAALMASSVDVLVSICVVFAMSFVPASFTLVLIEERVTRAKHLQLMGGLSPTLYWLGNFLWDMCNYLVPACIVVLIFLAFQQRAYVAPANLPALLLLLLLYGWSITPLMYPASFFFSVPSTAYVVLTCINLFIGINGSMATFVLELFSDQKLQEVSRILKQVFLIFPHFCLGRGLIDMVRNQAMADAFERLGDRQFQSPLRWEVVGKNLLAMVIQGPLFLLFTLLLQHRSQLLPQPRVRSLPLLGEEDEDVARERERVVQGATQGDVLVLRNLTKVYRGQRMPAVDRLCLGIPPGECFGLLGVNGAGKTSTFRMVTGDTLASRGEAVLAGHSVAREPSAAHLSMGYCPQSDAIFELLTGREHLELLARLRGVPEAQVAQTAGSGLARLGLSWYADRPAGTYSGGNKRKLATALALVGDPAVVFLDEPTTGMDPSARRFLWNSLLAVVREGRSVMLTSHSMEECEALCSRLAIMVNGRFRCLGSPQHLKGRFAAGHTLTLRVPAARSQPAAAFVAAEFPGSELREAHGGRLRFQLPPGGRCALARVFGELAVHGAEHGVEDFSVSQTMLEEVFLYFSKDQGKDEDTEEQKEAGVGVDPAPGLQHPKRVSQFLDDPSTAETVL

SEQ ID NO: 756782 - protein, 2020 aa, Homo sapiens
MVCLGTGQSAGPLVSVQNHCPPCGLSPQESLGLALGQAQEPLHSLLEAAEDLAQELLALRSLVELRALLQRPRGTSGPLELLSEALCSVRGPSSTVGPSLNWYEASDLMELVGQEPESALPDSSLSPACSELIGALDSHPLSRLLWRRLKPLILGKLLFAPDTPFTRKLMAQVNRTFEELTLLRDVREVWEMLGPRIFTFMNDSSNVAMLQRLLQMQDEGRRQPRPGGRDHMEALRSFLDPGSGGYSWQDAHADVGHLVGTLGRVTECLSLDKLEAAPSEAALVSRALQLLAEHRFWAGVVFLGPEDSSDPTEHPTPDLGPGHVRIKIRMDIDVVTRTNKIRDRFWDPGPAADPLTDLRYVWGGFVYLQDLVERAAVRVLSGANPRAGLYLQQMPYPCYVDDVFLRVLSRSLPLFLTLAWIYSVTLTVKAVVREKETRLRDTMRAMGLSRAVLWLGWFLSCLGPFLLSAALLVLVLKLGDILPYSHPGVVFLFLAAFAVATVTQSFLLSAFFSRANLAAACGGLAYFSLYLPYVLCVAWRDRLPAGGRVAASLLSPVAFGFGCESLALLEEQGEGAQWHNVGTRPTADVFSLAQVSGLLLLDAALYGLATWYLEAVCPGQYGIPEPWNFPFRRSYWCGPRPPKSPAPCPTPLDPKVLVEEAPPGLSPGVSVRSLEKRFPGSPQPALRGLSLDFYQGHITAFLGHNGAGKTTTLSILSGLFPPSGGSAFILGHDVRSSMAAIRPHLGVCPQYNVLFDMLTVDEHVWFYGRLKGLSAAVVGPEQDRLLQDVGLVSKQSVQTRHLSGGMQRKLSVAIAFVGGSQVVILDEPTAGVDPASRRGIWELLLKYREGRTLILSTHHLDEAELLGDRVAVVAGGRLCCCGSPLFLRRHLGSGYYLTLVKARLPLTTNEKADTDMEGSVDTRQEKKNGSQGSRVGTPQLLALVQHWVPGARLVEELPHELVLVLPYTGAHDGSFATLFRELDTRLAELRLTGYGISDTSLEEIFLKVVEECAADTDMEDGSCGQHLCTGIAGLDVTLRLKMPPQETALENGEPAGSAPETDQGSGPDAVGRVQGWALTRQQLQALLLKRFLLARRSRRGLFAQIVLPALFVGLALVFSLIVPPFGHYPALRLSPTMYGAQVSFFSEDAPGDPGRARLLEALLQEAGLEEPPVQHSSHRFSAPEVPAEVAKVLASGNWTPESPSPACQCSQPGARRLLPDCPAAAGGPPPPQAVTGSGEVVQNLTGRNLSDFLVKTYPRLVRQGLKTKKWVNEVRYGGFSLGGRDPGLPSGQELGRSVEELWALLSPLPGGALDRVLKNLTAWAHSLDAQDSLKIWFNNKGWHSMVAFVNRASNAILRAHLPPGRARHAHSITTLNHPLNLTKEQLSEAALMASSVDVLVSICVVFAMSFVPASFTLVLIEERVTRAKHLQLMGGLSPTLYWLGNFLWDMCNYLVPACIVVLIFLAFQQRAYVAPANLPALLLLLLLYGWSITPLMYPASFFFSVPSTAYVVLTCINLFIGINGSMATFVLELFSDQKLQEVSRILKQVFLIFPHFCLGRGLIDMVRNQAMADAFERLGDRQFQSPLRWEVVGKNLLAMVIQGPLFLLFTLLLQHRSQLLPQPRVRSLPLLGEEDEDVARERERVVQGATQGDVLVLRNLTKVYRGQRMPAVDRLCLGIPPGECFGLLGVNGAGKTSTFRMVTGDTLASRGEAVLAGHSVAREPSAAHLSMGYCPQSDAIFELLTGREHLELLARLRGVPEAQVAQTAGSGLARLGLSWYADRPAGTYSGGNKRKLATALALVGDPAVVFLDEPTTGMDPSARRFLWNSLLAVVREGRSVMLTSHRWAGLCCPGLWLSMEECEALCSRLAIMVNGRFRCLGSPQHLKGRFAAGHTLTLRVPAARSQPAAAFVAAEFPGSELREAHGGRLRFQLPPGGRCALARVFGELAVHGAEHGVEDFSVSQTMLEEVFLYFSKDQGKDEDTEEQKEAGVGVDPAPGLQHPKRVSQFLDDPSTAETVL

SEQ ID NO: 756783 - protein, 1889 aa, Homo sapiens
RAAPSSPLDTLSFMEVGGGCWPQGVGLSHEGCVLVPGLLFEVNRTFEELTLLRDVREVWEMLGPRIFTFMNDSSNVAMLQRLLQMQDEGRRQPRPGGRDHMEALRSFLDPGSGGYSWQDAHADVGHLVGTLGRVTECLSLDKLEAAPSEAALVSRALQLLAEHRFWAGVVFLGPEDSSDPTEHPTPDLGPGHVRIKIRMDIDVVTRTNKIRDRFWDPGPAADPLTDLRYVWGGFVYLQDLVERAAVRVLSGANPRAGLYLQQMPYPCYVDDVFLRVLSRSLPLFLTLAWIYSVTLTVKAVVREKETRLRDTMRAMGLSRAVLWLGWFLSCLGPFLLSAALLVLVLKLGDILPYSHPGVVFLFLAAFAVATVTQSFLLSAFFSRANLAAACGGLAYFSLYLPYVLCVAWRDRLPAGGRVAASLLSPVAFGFGCESLALLEEQGEGAQWHNVGTRPTADVFSLAQVSGLLLLDAALYGLATWYLEAVCPGQYGIPEPWNFPFRRSYWCGPRPPKSPAPCPTPLDPKVLVEEAPPGLSPGVSVRSLEKRFPGSPQPALRGLSLDFYQGHITAFLGHNGAGKTTTLSILSGLFPPSGGSAFILGHDVRSSMAAIRPHLGVCPQYNVLFDMLTVDEHVWFYGRLKGLSAAVVGPEQDRLLQDVGLVSKQSVQTRHLSGGMQRKLSVAIAFVGGSQVVILDEPTAGVDPASRRGIWELLLKYREGRTLILSTHHLDEAELLGDRVAVVAGGRLCCCGSPLFLRRHLGSGYYLTLVKARLPLTTNEKADTDMEGSVDTRQEKKNGSQGSRVGTPQLLALVQHWVPGARLVEELPHELVLVLPYTGAHDGSFATLFRELDTRLAELRLTGYGISDTSLEEIFLKVVEECAADTDMEDGSCGQHLCTGIAGLDVTLRLKMPPQETALENGEPAGSAPETDQGSGPDAVGRVQGWALTRQQLQALLLKRFLLARRSRRGLFAQIVLPALFVGLALVFSLIVPPFGHYPALRLSPTMYGAQVSFFSEDAPGDPGRARLLEALLQEAGLEEPPVQHSSHRFSAPEVPAEVAKVLASGNWTPESPSPACQCSQPGARRLLPDCPAAAGGPPPPQAVTGSGEVVQNLTGRNLSDFLVKTYPRLVRQGLKTKKWVNEVRYGGFSLGGRDPGLPSGQELGRSVEELWALLSPLPGGALDRVLKNLTAWAHSLDAQDSLKIWFNNKGWHSMVAFVNRASNAILRAHLPPGRARHAHSITTLNHPLNLTKEQLSEAALMASSVDVLVSICVVFAMSFVPASFTLVLIEERVTRAKHLQLMGGLSPTLYWLGNFLWDMCNYLVPACIVVLIFLAFQQRAYVAPANLPALLLLLLLYGWSITPLMYPASFFFSVPSTAYVVLTCINLFIGINGSMATFVLELFSDQKLQEVSRILKQVFLIFPHFCLGRGLIDMVRNQAMADAFERLGDRQFQSPLRWEVVGKNLLAMVIQGPLFLLFTLLLQHRSQLLPQPRVRSLPLLGEEDEDVARERERVVQGATQGDVLVLRNLTKVYRGQRMPAVDRLCLGIPPGECFGLLGVNGAGKTSTFRMVTGDTLASRGEAVLAGHSVAREPSAAHLSMGYCPQSDAIFELLTGREHLELLARLRGVPEAQVAQTAGSGLARLGLSWYADRPAGTYSGGNKRKLATALALVGDPAVVFLDEPTTGMDPSARRFLWNSLLAVVREGRSVMLTSHRWAGLRCPGLWLSMEECEALCSRLAIMVNGRFRCLGSPQHLKGRFAAGHTLTLRVPAARSQPAAAFVAAEFPGSELREAHGGRLRFQLPPGGRCALARVFGELAVHGAEHGVEDFSVSQTMLEEVFLYFSKDQGKDEDTEEQKEAGVGVDPAPGLQHPKRVSQFLDDPSTAETVL

SEQ ID NO: 756784 - protein, 762 aa, Homo sapiens
VYVPDLNPVISGYIKSVYGGFSLGGRDPGLPSGQELGRSVEELWALLSPLPGGALDRVLKNLTAWAHSLDAQDSLKIWFNNKGWHSMVAFVNRASNAILRAHLPPGRARHAHSITTLNHPLNLTKEQLSEAALMASSVDVLVSICVVFAMSFVPASFTLVLIEERVTRAKHLQLMGGLSPTLYWLGNFLWDMCNYLVPACIVVLIFLAFQQRAYVAPANLPALLLLLLLYGWSITPLMYPASFFFSVPSTAYVVLTCINLFIGINGSMATFVLELFSDQKLQEVSRILKQVFLIFPHFCLGRGLIDMVRNQAMADAFERLGDRQFQSPLRWEVVGKNLLAMVIQGPLFLLFTLLLQHRSQLLPQPRVRSLPLLGEEDEDVARERERVVQGATQGDVLVLRNLTKVYRGQRMPAVDRLCLGIPPGECFGLLGVNGAGKTSTFRMVTGDTLASRGEAVLAGHSVAREPSAAHLSMGYCPQSDAIFELLTGREHLELLARLRGVPEAQVAQTAGSGLARLGLSWYADRPAGTYSGGNKRKLATALALVGDPAVVFLDEPTTGMDPSARRFLWNSLLAVVREGRSVMLTSHRWAGLRCPGLWLSMEECEALCSRLAIMVNGRFRCLGSPQHLKGRFAAGHTLTLRVPAARSQPAAAFVAAEFPGSELREAHGGRLRFQLPPGGRCALARVFGELAVHGAEHGVEDFSVSQTMLEEVFLYFSKDQGKDEDTEEQKEAGVGVDPAPGLQHPKRVSQFLDDPSTAETVL

SEQ ID NO: 756785 - protein, 1735 aa, Homo sapiens
MVCLGTGQSAGPLVSVQNHCPPCGLSPQESLGLALGQAQEPLHSLLEAAEDLAQELLALRSLVELRALLQRPRGTSGPLELLSEALCSVRGPSSTVGPSLNWYEASDLMELVGQEPESALPDSSLSPACSELIGALDSHPLSRLLWRRLKPLILGKLLFAPDTPFTRKLMAQVNRTFEELTLLRDVREVWEMLGPRIFTFMNDSSNVAMLQRLLQMQDEGRRQPRPGGRDHMEALRSFLDPGSGGYSWQDAHADVGHLVGTLGRVTECLSLDKLEAAPSEAALVSRALQLLAEHRFWAGVVFLGPEDSSDPTEHPTPDLGPGHVRIKIRMDIDVVTRTNKIRDRFWDPGPAADPLTDLRYVWGGFVYLQDLVERAAVRVLSGANPRAGLYLQQMPYPCYVDDVFLRVLSRSLPLFLTLAWIYSVTLTVKAVVREKETRLRDTMRAMGLSRAVLWLGWFLSCLGPFLLSAALLVLVLKLGDILPYSHPGVVFLFLAAFAVATVTQSFLLSAFFSRANLAAACGGLAYFSLYLPYVLCVAWRDRLPAGGRVAASLLSPVAFGFGCESLALLEEQGEGAQWHNVGTRPTADVFSLAQVSGLLLLDAALYGLATWYLEAVCPGQYGIPEPWNFPFRRSYWCGPRPPKSPAPCPTPLDPKVLVEEAPPGLSPGVSVRSLEKRFPGSPQPALRGLSLDFYQGHITAFLGHNGAGKTTTLSILSGLFPPSGGSAFILGHDVRSSMAAIRPHLGVCPQYNVLFDMLTVDEHVWFYGRLKGLSAAVVGPEQDRLLQDVGLVSKQSVQTRHLSGGMQRKLSVAIAFVGGSQVVILDEPTAGVDPASRRGIWELLLKYREGRTLILSTHHLDEAELLGDRVAVVAGGRLCCCGSPLFLRRHLGSGYYLTLVKARLPLTTNEKADTDMEGSVDTRQEKKNGSQGSRVGTPQLLALVQHWVPGARLVEELPHELVLVLPYTGAHDGSFATLFRELDTRLAELRLTGYGISDTSLEEIFLKVVEECAADTDMEDGSCGQHLCTGIAGLDVTLRLKMPPQETALENGEPAGSAPETDQGSGPDAVGRVQGWALTRQQLQALLLKRFLLARRSRRGLFAQIVLPALFVGLALVFSLIVPPFGHYPALRLSPTMYGAQVSFFSEDAPGDPGRARLLEALLQEAGLEEPPVQHSSHRFSAPEVPAEVAKVLASGNWTPESPSPACQCSQPGARRLLPDCPAAAGGPPPPQAVTGSGEVVQNLTGRNLSDFLVKTYPRLVRQGLKTKKWVNEVRYGGFSLGGRDPGLPSGQELGRSVEELWALLSPLPGGALDRVLKNLTAWAHSLDAQDSLKIWFNNKGWHSMVAFVNRASNAILRAHLPPGRARHAHSITTLNHPLNLTKEQLSEAALMASSVDVLVSICVVFAMSFVPASFTLVLIEERVTRAKHLQLMGGLSPTLYWLGNFLWDMCNYLVPACIVVLIFLAFQQRAYVAPANLPALLLLLLLYGWSITPLMYPASFFFSVPSTAYVVLTCINLFIGINGSMATFVLELFSDQKLQEVSRILKQVFLIFPHFCLGRGLIDMVRNQAMADAFERLGDRQFQSPLRWEVVGKNLLAMVIQGPLFLLFTLLLQHRSQLLPQPRVRSLPLLGEEDEDVARERERVVQGATQGDVLVLRNLTKVYRGQRMPAVDRLCLGIPPGEVSPGVEARCRDSEWLPYCMPCPSSFTEHLLCIHHLLLGTYCMPIFVLLFLFY

SEQ ID NO: 756786 - protein, 2001 aa, Homo sapiens
MVCLGTGQSAGPLVSVQNHCPPCGLSPQESLGLALGQAQEPLHSLLEAAEDLAQELLALRSLVELRALLQRPRGTSGPLELLSEALCSVRGPSSTVGPSLNWYEASDLMELVGQEPESALPDSSLSPACSELIGALDSHPLSRLLWRRLKPLILGKLLFAPDTPFTRKLMAQVNRTFEELTLLRDVREVWEMLGPRIFTFMNDSSNVAMLQRLLQMQDEGRRQPRPGGRDHMEALRSFLDPGSGGYSWQDAHADVGHLVGTLGRVTECLSLDKLEAAPSEAALVSRALQLLAEHRFWAGVVFLGPEDSSDPTEHPTPDLGPGHVRIKIRMDIDVVTRTNKIRDRFWDPGPAADPLTDLRYVWGGFVYLQDLVERAAVRVLSGANPRAGLYLQQMPYPCYVDDVFLRVLSRSLPLFLTLAWIYSVTLTVKAVVREKETRLRDTMRAMGLSRAVLWLGWFLSCLGPFLLSAALLVLVLKLGDILPYSHPGVVFLFLAAFAVATVTQSFLLSAFFSRANLAAACGGLAYFSLYLPYVLCVAWRDRLPAGGRVAASLLSPVAFGFGCESLALLEEQGEGAQWHNVGTRPTADVFSLAQVSGLLLLDAALYGLATWYLEAVCPGQYGIPEPWNFPFRRSYWCGPRPPKSPAPCPTPLDPKVLVEEAPPGLSPGVSVRSLEKRFPGSPQPALRGLSLDFYQGHITAFLGHNGAGKTTTLSILSGLFPPSGGSAFILGHDVRSSMAAIRPHLGVCPQYNVLFDMLTVDEHVWFYGRLKGLSAAVVGPEQDRLLQDVGLVSKQSVQTRHLSGGMQRKLSVAIAFVGGSQVVILDEPTAGVDPASRRGIWELLLKYREGRTLILSTHHLDEAELLGDRVAVVAGGRLCCCGSPLFLRRHLGSGYYLTLVKARLPLTTNEKADTDMEGSVDTRQEKKNGSQGSRVGTPQLLALVQHWVPGARLVEELPHELVLVLPYTGAHDGSFATLFRELDTRLAELRLTGYGISDTSLEEIFLKVVEECAADTDMEDGSCGQHLCTGIAGLDVTLRLKMPPQETALENGEPAGSAPETDQGSGPDAVGRVQGWALTRQQLQALLLKRFLLARRSRRGLFAQIVLPALFVGLALVFSLIVPPFGHYPALRLSPTMYGAQVSFFSEDAPGDPGRARLLEALLQEAGLEEPPVQHSSHRFSAPEVPAEVAKVLASGNWTPESPSPACQCSQPGARRLLPDCPAAAGGPPPPQAVTGSGEVVQNLTGRNLSDFLVKTYPRLVRQGLKTKKWVNEVRYGGFSLGGRDPGLPSGQELGRSVEELWALLSPLPGGALDRVLKNLTAWAHSLDAQDSLKIWFNNKGWHSMVAFVNRASNAILRAHLPPGRARHAHSITTLNHPLNLTKEQLSEAALMASSVDVLVSICVVFAMSFVPASFTLVLIEERVTRAKHLQLMGGLSPTLYWLGNFLWDMCNYLVPACIVVLIFLAFQQRAYVAPANLPALLLLLLLYGWSITPLMYPASFFFSVPSTAYVVLTCINLFIGINGSMATFVLELFSDQKLQEVSRILKQVFLIFPHFCLGRGLIDMVRNQAMADAFERLGDRQFQSPLRWEVVGKNLLAMVIQGPLFLLFTLLLQHRSQLLPQPRVRSLPLLGEEDEDVARERERVVQGATQGDVLVLRNLTKVYRGQRMPAVDRLCLGIPPGECFGLLGVNGAGKTSTFRMVTGDTLASRGEAVLAGHSVAREPSAAHLSMGYCPQSDAIFELLTGREHLELLARLRGVPEAQVAQTAGSGLARLGLSWYADRPAGTYSGGNKRKLATALALVGDPAVVFLDEPTTGMDPSARRFLWNSLLAVVREGRSVMLTSHSMEECEALCSRLAIMVNGRFRCLGSPQHLKGRFAAGHTLTLRVPAARSQPAAAFVAAEFPGSELREAHGGRLRFQLPPGGRCALARVFGELAVHGAEHGVEDFSVSQTMLEEDQGKDEDTEEQKEAGVGVDPAPGLQHPKRVSQFLDDPSTAETVL

SEQ ID NO: 756787 - protein, 1639 aa, Homo sapiens
MVCLGTGQSAGPLVSVQNHCPPCGLSPQESLGLALGQAQEPLHSLLEAAEDLAQELLALRSLVELRALLQRPRGTSGPLELLSEALCSVRGPSSTVGPSLNWYEASDLMELVGQEPESALPDSSLSPACSELIGALDSHPLSRLLWRRLKPLILGKLLFAPDTPFTRKLMAQVNRTFEELTLLRDVREVWEMLGPRIFTFMNDSSNVAMLQRLLQMQDEGRRQPRPGGRDHMEALRSFLDPGSGGYSWQDAHADVGHLVGTLGRVTECLSLDKLEAAPSEAALVSRALQLLAEHRFWAGVVFLGPEDSSDPTEHPTPDLGPGHVRIKIRMDIDVVTRTNKIRDRFWDPGPAADPLTDLRYVWGGFVYLQDLVERAAVRVLSGANPRAGLYLQQMPYPCYVDDVFLRVLSRSLPLFLTLAWIYSVTLTVKAVVREKETRLRDTMRAMGLSRAVLWLGWFLSCLGPFLLSAALLVLVLKLGDILPYSHPGVVFLFLAAFAVATVTQSFLLSAFFSRANLAAACGGLAYFSLYLPYVLCVAWRDRLPAGGRVAASLLSPVAFGFGCESLALLEEQGEGAQWHNVGTRPTADVFSLAQVSGLLLLDAALYGLATWYLEAVCPGQYGIPEPWNFPFRRSYWCGPRPPKSPAPCPTPLDPKVLVEEAPPGLSPGVSVRSLEKRFPGSPQPALRGLSLDFYQGHITAFLGHNGAGKTTTLSILSGLFPPSGGSAFILGHDVRSSMAAIRPHLGVCPQYNVLFDMLTVDEHVWFYGRLKGLSAAVVGPEQDRLLQDVGLVSKQSVQTRHLSGGMQRKLSVAIAFVGGSQVVILDEPTAGVDPASRRGIWELLLKYREGRTLILSTHHLDEAELLGDRVAVVAGGRLCCCGSPLFLRRHLGSGYYLTLVKARLPLTTNEKADTDMEGSVDTRQEKKNGSQGSRVGTPQLLALVQHWVPGARLVEELPHELVLVLPYTGAHDGSFATLFRELDTRLAELRLTGYGISDTSLEEIFLKVVEECAADTDMEDGSCGQHLCTGIAGLDVTLRLKMPPQETALENGEPAGSAPETDQGSGPDAVGRVQGWALTRQQLQALLLKRFLLARRSRRGLFAQIVLPALFVGLALVFSLIVPPFGHYPALRLSPTMYGAQVSFFSEDAPGDPGRARLLEALLQEAGLEEPPVQHSSHRFSAPEVPAEVAKVLASGNWTPESPSPACQCSQPGARRLLPDCPAAAGGPPPPQAVTGSGEVVQNLTGRNLSDFLVKTYPRLVRQGLKTKKWVNEVRYGGFSLGGRDPGLPSGQELGRSVEELWALLSPLPGGALDRVLKNLTAWAHSLDAQDSLKIWFNNKGWHSMVAFVNRASNAILRAHLPPGRARHAHSITTLNHPLNLTKEQLSEAALMASSVDVLVSICVVFAMSFVPASFTLVLIEERVTRAKHLQLMGGLSPTLYWLGNFLWDMCNYLVPACIVVLIFLAFQQRAYVAPANLPALLLLLLLYGWSITPLMYPASFFFSVPSTAYVVLTCINLFIGINGSMATFVLELFSDQKLQEVSRILKQVFLIFPHFCLGRGLIDMVRNQAMADAFERLGDRQFQSPLRWEVVGKNLLAMVIQGPLFLLFTLLLQHRSQLLPQPPGWLLGPPAPVHGLHP

SEQ ID NO: 756788 - protein, 133 aa, Homo sapiens
MVFAAGHTLTLRVPAARSQPAAAFVAAEFPGSELREAHGGRLRFQLPPGGRCALARVFGELAVHGAEHGVEDFSVSQTMLEEVFLYFSKDQGKDEDTEEQKEAGVGVDPAPGLQHPKRVSQFLDDPSTAETVL

SEQ ID NO: 756789 - protein, 1489 aa, Homo sapiens
MVCLGTGQSAGPLVSVQNHCPPCGLSPQESLGLALGQAQEPLHSLLEAAEDLAQELLALRSLVELRALLQRPRGTSGPLELLSEALCSVRGPSSTVGPSLNWYEASDLMELVGQEPESALPDSSLSPACSELIGALDSHPLSRLLWRRLKPLILGKLLFAPDTPFTRKLMAQVNRTFEELTLLRDVREVWEMLGPRIFTFMNDSSNVAMLQRLLQMQDEGRRQPRPGGRDHMEALRSFLDPGSGGYSWQDAHADVGHLVGTLGRVTECLSLDKLEAAPSEAALVSRALQLLAEHRFWAGVVFLGPEDSSDPTEHPTPDLGPGHVRIKIRMDIDVVTRTNKIRDRFWDPGPAADPLTDLRYVWGGFVYLQDLVERAAVRVLSGANPRAGLYLQQMPYPCYVDDVFLRVLSRSLPLFLTLAWIYSVTLTVKAVVREKETRLRDTMRAMGLSRAVLWLGWFLSCLGPFLLSAALLVLVLKLGDILPYSHPGVVFLFLAAFAVATVTQSFLLSAFFSRANLAAACGGLAYFSLYLPYVLCVAWRDRLPAGGRVAASLLSPVAFGFGCESLALLEEQGEGAQWHNVGTRPTADVFSLAQVSGLLLLDAALYGLATWYLEAVCPGQYGIPEPWNFPFRRSYWCGPRPPKSPAPCPTPLDPKVLVEEAPPGLSPGVSVRSLEKRFPGSPQPALRGLSLDFYQGHITAFLGHNGAGKTTTLSILSGLFPPSGGSAFILGHDVRSSMAAIRPHLGVCPQYNVLFDMLTVDEHVWFYGRLKGLSAAVVGPEQDRLLQDVGLVSKQSVQTRHLSGGMQRKLSVAIAFVGGSQVVILDEPTAGVDPASRRGIWELLLKYREGRTLILSTHHLDEAELLGDRVAVVAGGRLCCCGSPLFLRRHLGSGYYLTLVKARLPLTTNEKADTDMEGSVDTRQEKKNGSQGSRVGTPQLLALVQHWVPGARLVEELPHELVLVLPYTGAHDGSFATLFRELDTRLAELRLTGYGISDTSLEEIFLKVVEECAADTDMEDGSCGQHLCTGIAGLDVTLRLKMPPQETALENGEPAGSAPETDQGSGPDAVGRVQGWALTRQQLQALLLKRFLLARRSRRGLFAQIVLPALFVGLALVFSLIVPPFGHYPALRLSPTMYGAQVSFFSEDAPGDPGRARLLEALLQEAGLEEPPVQHSSHRFSAPEVPAEVAKVLASGNWTPESPSPACQCSQPGARRLLPDCPAAAGGPPPPQAVTGSGEVVQNLTGRNLSDFLVKTYPRLVRQGLKTKKWVNEVRYGGFSLGGRDPGLPSGQELGRSVEELWALLSPLPGGALDRVLKNLTAWAHSLDAQDSLKIWFNNKGWHSMVAFVNRASNAILRAHLPPGRARHAHSITTLNHPLNLTKEQLSEAALMASSVDVLVSICVVFAMSFVPASFTLVLIEERVTRAKHLQLMGGLSPTLYWLGNFLWDMCNYLVPACIVVLIFLAFQQRAYVAPANLPALLLLLLLYG

SEQ ID NO: 756790 - protein, 446 aa, Homo sapiens
MRTLNTSAMDGTGLVVERDFSVRILTACFLSLLILSTLLGNTLVCAAVIRFRHLRSKVTNFFVISLAVSDLLVAVLVMPWKAVAEIAGFWPFGSFCNIWVAFDIMCSTASILNLCVISVDRYWAISSPFRYERKMTPKAAFILISVAWTLSVLISFIPVQLSWHKAKPTSPSDGNATSLAETIDNCDSSLSRTYAISSSVISFYIPVAIMIVTYTRIYRIAQKQIRRIAALERAAVHAKNCQTTTGNGKPVECSQPESSFKMSFKRETKVLKTLSVIMGVFVCCWLPFFILNCILPFCGSGETQPFCIDSNTFDVFVWFGWANSSLNPIIYAFNADFRKAFSTLLGCYRLCPATNNAIETVSINNNGAAMFSSHHEPRGSISKECNLVYLIPHAVGSSEDLKKEEAAGIARPLEKLSPALSVILDYDTDVSLEKIQPITQNGQHPT

SEQ ID NO: 756791 - protein, 242 aa, Homo sapiens
MSLGIMEEEDLAEYFRLQYGERLLQMLQKLPNVEGASESPSIWLLEKKKETEIMHQTMVQKKKMFQRRMETLNLRWEELGVKEAQLKAHIQKSEQFIQENDQKRIRAMKKANKERELKCQHMQELTKRKQEMVALRLEHQRLSAKLKDYYIFNKYLEKVVENSEESRWAHIQNTAAKKTLLLGTIKMATLNLFQIVSKHLKEVTEVALEDTHKQLDMIQQFIQDRSDIWAEVKKKEQQRVRI

SEQ ID NO: 756792 - protein, 104 aa, Homo sapiens [sequence omitted]

SEQ ID NO: 756793 - protein, 104 aa, Homo sapiens [sequence omitted]

SEQ ID NO: 756794 - protein, 173 aa, Homo sapiens [sequence omitted]

SEQ ID NO: 756795 - protein, 151 aa, Homo sapiens
MSYEVDLLTHEWVTTRSLETAGWTPTCAFQLLLEPQGPRKAVWSLQPGPSPGRNTSTFAKDSLIHHHGTQKKKMQKRRLKLWPTQGGCKLFEIFLVEKWGSKFPPLNLGRPSDCLTNRNSMEATLYRFLRLSLKRLAVPTSCHLGIIVLET

SEQ ID NO: 756796 - protein, 151 aa, Homo sapiens
SQDINSHLASLSMARNTSPTPDPTVREALCAPDNLNASIESQGQIKMYINEVCRETVSRCCNSFLQQAGLNLLISMTVINNMLAKSASDLKFPLISEGSGCAKVQVLKPLMGLSEKPVLAGELVGAQMLFSFMSLFIRNGNREILLETPAP

SEQ ID NO: 756797 - protein, 181 aa, Homo sapiens
MEPKRIREGYLVKKGSVFNTWKPMWVVLLEDGIEFYKKKSDNSPKGMIPLKGSTLTSPCQDFGKRMFVFKITTTKQQDHFFQAAFLEERDAWVRDIKKAIKCIEGGQKFARKSTRRSIRLPETIDLGALYLSMKDTEKGIKELNLEKDKKIFNHCFTGKSTCRPEIGRLGRRYGVLLRPRL

SEQ ID NO: 756798 - protein, 177 aa, Homo sapiens
  misc_feature (151)..(151): Xaa can be any naturally occurring amino acid
MEPKRIREGYLVKKGSVFNTWKPMWVVLLEDGIEFYKKKSDNSPKGMIPLKGSTLTSPCQDFGKRMFVFKITTTKQQDHFFQAAFLEERDAWVRDIKKAIKCIEGGQKFARKSTRRSIRLPETIDLGPLYSPMNDTASQYLRIEVVASNQXGRNSQDGLMNPLSLLMRGFLHISEMY

SEQ ID NO: 756799 - protein, 350 aa, Homo sapiens [sequence omitted]

SEQ ID NO: 756800 - protein, 350 aa, Homo sapiens [sequence omitted]

SEQ ID NO: 756801 - protein, 174 aa, Homo sapiens
MYTGMEEKGGGCPHGWRGGGMEMAQVAMCLRLVMLACCLIFQQPDSGFFCEENSSDDDVILKEEFRGVIIKQGCLLKQGHRRKNWKVRKFILREDPAYLHYYDPAGAEDPLGAIHLRGCVVTSVESNSNGRKSEEENLFEIITADEVHYFLQAATPKERTEWIKAIQMASRTGK

SEQ ID NO: 756802 - protein, 295 aa, Homo sapiens
MEPKRIREGYLVKKGSVFNTWKPMWVVLLEDGIEFYKKKSDNSPKGMIPLKGSTLTSPCQDFGKRMFVFKITTTKQQDHFFQAAFLEERDAWVRDIKKAIKCIEGGQKFARKSTRRSIRLPETIDLGALYLSMKDTEKGIKELNLEKDKKIFNHCFTGNCVIDWLVSNQSVRNRQEGLMIASSLLNEGYLQPAGDMSKSAVDGTAENPFLDNPDAFYYFPDSGFFCEENSSDDDVILKEEFRGVIIKQGCLLKQVSGHNCSHLAFSLYKVLFVSKLPSDFWFVWLIVKQKMKPTK

SEQ ID NO: 756803 - protein, 434 aa, Homo sapiens
SFTNRNYDLDYDSVQPYFYCDEEENFYQQQQQSELQPPAPSEDIWKKFELLPTPPLSPSRRSGLCSPSYVAVTPFSLRGDNDGGGGSFSTADQLEMVTELLGGDMVNQSFICDPDDETFIKNIIIQDCMWSGFSAAAKLVSEKLASYQAARKDSGSPNPARGHSVCSTSSLYLQDLSAAASECIDPSVVFPYPLNDSSSPKSCASQDSSAFSPSSDSLLSSTESSPQGSPEPLVLHEETPPTTSSDSEEEQEDEEEIDVVSVEKRQAPGKRSESGSPSAGGHSKPPHSPLVLKRCHVSTHQHNYAAPPSTRKDYPAAKRVKLDSVRVLRQISNNRKCTSPRSSDTEENVKRRTHNVLERQRRNELKRSFFALRDQIPELENNEKAPKVVILKKATAYILSVQAEEQKLISEEDLLRKRREQLKHKLEQLRNSCA

SEQ ID NO: 756804 - protein, 434 aa, Homo sapiens; identical to SEQ ID NO: 756803

SEQ ID NO: 756805 - protein, 434 aa, Homo sapiens; identical to SEQ ID NO: 756803

SEQ ID NO: 756806 - protein, 219 aa, Homo sapiens
SFTNRNYDLDYDSVQPYFYCDEEENFYQQQQQSELQPPAPSEDIWKKFELLPTPPLSPSRRSGLCSPSYVAVTPFSLRGDNDGGGGSFSTADQLEMVTELLGGDMVNQSFICDPDDETFIKNIIIQDCMWSGFSAAAKLVSEKLASYQAARKDSGSPNPARGHSVCSTSSLYLQDLSAAASECIDPSVVFPYPLNDSSSPKSCASQDSSSSHRDLKSTT

SEQ ID NO: 756807 - protein, 434 aa, Homo sapiens; identical to SEQ ID NO: 756803

SEQ ID NO: 756808 - protein, 116 aa, Homo sapiens
TTSYHNPDIPFCDLRSSDKLNQLSTRKCLNSPTAWNPLSSTPSPPPTTSTCLFSGPNQCISQMYLIAVSCLPKMYKTKLHPNHLGHMFSGPPEGCVMGHGQSYLAQNKFLQIFYRV

SEQ ID NO: 756809 - protein, 496 aa, Homo sapiens
SLDFSMTTQLPAYVAILLFYVSRASCQDTFIAAVYEHAAILPNATLTPVSREEALALMNRNLDILEGAITSAADQGAHIIVTPEDAIYGWNFNRDSLYPYLEDIPDPEVNWIPCNNRNRFGQTPVQERLSCLAKNNSIYVVANIGDKKPCDTSDPQCPPDGRYQYNTDVVFDSQGKLVARYHKNTFGSFGIFTCFDILFHDPAVTLVKDFHVDTIVFPTAWMNVLPHLSAVEFHSAWAMGMRVNFLASNIHYPSKKMTGSGIYAPNSSRAFHYDMKTEEGKLLLSQLDSHPSHSAVVNWTSYASSIEALSSGNKEFKGTVFFDEFTFVKLTGVAGNYTVCQKDLCCHLSYKMSENIPNEVYALGAFDGLHTVEGRYYLQICTLLKCKTTNLNTCGDSAETASTRFEMFSLSGTFGTQYVFPEVLLSENQLAPGEFQVSTDGRLFSLKPTSGPVLTVTLFGRLYEKDWASNASSGLTAQARIIMLIVIAPIVCSLSW

SEQ ID NO: 756810 - protein, 496 aa, Homo sapiens; identical to SEQ ID NO: 756809

SEQ ID NO: 756811 - protein, 519 aa, Homo sapiens
SLDFSMTTQLPAYVAILLFYVSRASCQDTFIAAVYEHAAILPNATLTPVSREEALALMNRNLDILEGAITSAADQGAHIIVTPEDAIYGWNFNRDSLYPYLEDIPDPEVNWIPCNNRNRFGQTPVQERLSCLAKNNSIYVVANIGDKKPCDTSDPQCPPDGRYQYNTDVVFDSQGKLVARYHKKQNLFMGENQFNVPKEPEIVTFNTTFGSFGIFTCFDILFHDPAVTLVKDFHVDTIVFPTAWMNVLPHLSAVEFHSAWAMGMRVNFLASNIHYPSKKMTGSGIYAPNSSRAFHYDMKTEEGKLLLSQLDSHPSHSAVVNWTSYASSIEALSSGNKEFKGTVFFDEFTFVKLTGVAGNYTVCQKDLCCHLSYKMSENIPNEVYALGAFDGLHTVEGRYYLQICTLLKCKTTNLNTCGDSAETASTRFEMFSLSGTFGTQYVFPEVLLSENQLAPGEFQVSTDGRLFSLKPTSGPVLTVTLFGRLYEKDWASNASSGLTAQARIIMLIVIAPIVCSLSW

SEQ ID NO: 756812 - protein, 118 aa, Homo sapiens [sequence omitted]

SEQ ID NO: 756813 - protein, 172 aa, Homo sapiens
KARSAGRKAPVSALRAQSVPAAPPLSVPAAAATATMPNFAGTWKMRSSENFDELLKALGVNAMLRKVAVAAASKPHVEIRQDGDQFYIKTSTTVRTTEINFKVGEGFEEETVDGRKCRSLATWENENKIHCTQTLLEGDGPKTYWTRELANDELILTFGADDVVCTRIYVRE

SEQ ID NO: 756814 - protein, 103 aa, Homo sapiens
MTLGGVIHSSGMLRFLHDLEEGLWVRTTEINFKVGEGFEEETVDGRKCRSLATWENENKIHCTQTLLEGDGPKTYWTRELANDELILTFGADDVVCTRIYVRE

SEQ ID NO: 756815 - protein, 398 aa, Homo sapiens
AGREDQVRGPPSSEDRCKEYPAGGYSSPSGFAAMHPGRTTGKGPSTHTQIDQQPPRLLIVHIALPSWADICTNLCEALQNFFSLACSLMGPSRMSLFSLYMVQDQHECILPFVQVKGNFARLQTCISELRMLQREGCFRSQGASLRLAVEDGLQQFKQYSRHVTTRAALTYTSLEITILTSQPGKEVVKQLEEGLKDTDLARVRRFQVVEVTKGILEHVDSASPVEDTSNDESSILGTDIDLQTIDNDIVSMEIFFKAWLHNSGTDQEQIHLLLSSQCFSNISRPRDNPMCLKCDLQERLLCPSLLAGTADGSLRMDDPKGDFITLYQMASQSSASHYKLQVIKALKSSGLCESLTYGLPFILRPTSCWQLDWDELETNQQHFHALCHSLLVSTHVPR

SEQ ID NO: 756816 - protein, 450 aa, Homo sapiens
SGPGASSAGPPGPRAGLLIRQARCKEYPAGGYSSPSGFAAMHPGRTTGKGPSTHTQIDQQPPRLLIVHIALPSWADICTNLCEALQNFFSLACSLMGPSRMSLFSLYMVQDQHECILPFVQVKGNFARLQTCISELRMLQREGCFRSQGASLRLAVEDGLQQFKQYSRHVTTRAALTYTSLEITILTSQPGKEVVKQLEEGLKDTDLARVRRFQVVEVTKGILEHVDSASPVEDTSNDESSILGTDIDLQTIDNDIVSMEIFFKAWLHNSGTDQEQIHLLLSSQCFSNISRPRDNPMCLKCDLQERLLCPSLLAGTADGSLRMDDPKGDFITLYQMASQSSASHYKLQVIKALKSSGLCESLTYGLPFILRPTSCWQLDWDELETNQQHFHALCHSLLTGQLQTNRARATVAPLPMTPVPGRASKMPAASKSSSDAFFLPSEWEKDPSRP

SEQ ID NO: 756817 - protein, 468 aa, Homo sapiens
SGPGASSAGPPGPRAGLLIRQARCKEYPAGGYSSPSGFAAMHPGRTTGKGPSTHTQIDQQPPRLLIVHIALPSWADICTNLCEALQNFFSLACSLMGPSRMSLFSLYMVQDQHECILPFVQVKGNFARLQTCISELRMLQREGCFRSQGASLRLAVEDGLQQFKQYSRHVTTRAALTYTSLEITILTSQPGKEVVKQLEEGLKDTDLARVRRFQVVEVTKGILEHVDSASPVEDTSNDESSILGTDIDLQTIDNDIVSMEIFFKAWLHNSGTDQEQIHLLLSSQCFSNISRPRDNPMCLKCDLQERLLCPSLLAGTADGSLRMDDPKGDFITLYQMASQSSASHYKLQVIKALKSSGLCESLTYGLPFILRPTSCWQLDWDELETNQQHFHALCHSLLKREWLLLAKGEPPGPGHSQRIPASTFYVIMPSHSLTLLVKAVATRELMLPSTFPLLPEDPHDDSLKNVEA

SEQ ID NO: 756818 - protein, 1260 aa, Homo sapiens
MQKGIRLNDGHVASLGLLARKDGTRKGYLSKRSSDNTKWQTKWFALLQNLLFYFESDSSSRPSGLYLLEGCVCDRAPSPKPALSAKEPLEKQHYFTVNFSHENQKALELRTEDAKDCDEWVAAIAHASYRTLATEHEALMQKYLHLLQIVETEKTVAKQLRQQIEDGEIEIERLKAEITSLLKDNERIQSTQTVAPNDEDSDIKKIKKVQSFLRGWLCRRKWKTIIQDYIRSPHADSMRKRNQVVFSMLEAEAEYVQQLHILVNNFLRPLRMAASSKKPPITHDDVSSIFLNSETIMFLHQIFYQGLKARISSWPTLVLADLFDILLPMLNIYQEFVRNHQYSLQILAHCKQNRDFDKLLKTTEAKPDCEERTLETFLTYPMFQIPRYILTLHELLAHTPHEHVERNSLDYAKSKLEELSRIMHDEVSETENIRKNLAIERMIIEGCEILLDTSQTFVRQGSLIQVPMSEKGKITRGRLGSLSLKKEGERQCFLFSKHLIICTRGSGGKLHLTKNGVISLIDCTLLEEPESTEEEAKGSGQDIDHLDFKIGVEPKDSPPFTVILVASSRQEKAAWTSDISQCVDNIRCNGLMMNAFEENSKVTVPQMIKSDASLYCDDVDIRFSKTMNSCKVLQIRYASVERLLERLTDLRFLSIDFLNTFLHSYRVFTTAIVVLDKLITIYKKPISAIPARWLRSLELLFASGQNNKLLYGEPPKSPRATRKFSSPPPLSITKTSSPSRRRKLSLNIPIITGGKALDLAALSCNSNGYTSMYSAMSPFSKATLDTSKLYVSSSFTNKIPDEGDTTPEKPEDPSALSKQSSEVSMREESDIDQNQSDDGDTETSPTKSPTTPKSVKNKNSSEFPLFSYNNGVVMTSCRELDNNRSALSAASAFAIATAGANEGTPNKEKYRRMSLASAGFPPDQRNGDKEFVIRRAATNRVLNVLRHWVSKHSQDFETNDELKCKVIGFLEEVMHDPELLTQERKAAANIIRTLTQEDPGDNQITLEEITQMAEGVKAEPFENHSALEIAEQLTLLDHLVFKKIPYEEFFGQGWMKLEKNERTPYIMKTTKHFNDISNLIASEIIRNEDINARVSAIEKWVAVADICRCLHNYNAVLEITSSMNRSAIFRLKKTWLKVSKQTKALIDKLQKLVSSEGRFKNLREALKNCDPPCVPYLGMYLTDLAFIEEGTPNYTEDGLVNFSKMRMISHIIREIRQFQQTAYKIEHQAKVTQYLLDQSFVMDEESLYESSLRIEPKLPT

SEQ ID NO: 756819 - protein, 964 aa, Homo sapiens
MFLHQIFYQGLKARISSWPTLVLADLFDILLPMLNIYQEFVRNHQYSLQILAHCKQNRDFDKLLKTTEAKPDCEERTLETFLTYPMFQIPRYILTLHELLAHTPHEHVERNSLDYAKSKLEELSRIMHDEVSETENIRKNLAIERMIIEGCEILLDTSQTFVRQGSLIQVPMSEKGKITRGRLGSLSLKKEGERQCFLFSKHLIICTRGSGGKLHLTKNGVISLIDCTLLEEPESTEEEAKGSGQDIDHLDFKIGVEPKDSPPFTVILVASSRQEKAAWTSDISQCVDNIRCNGLMMNAFEENSKVTVPQMIKSDASLYCDDVDIRFSKTMNSCKVLQIRYASVERLLERLTDLRFLSIDFLNTFLHSYRVFTTAIVVLDKLITIYKKPISAIPARWLRSLELLFASGQNNKLLYGEPPKSPRATRKFSSPPPLSITKTSSPSRRRKLSLNIPIITGGKALDLAALSCNSNGYTSMYSAMSPFSKATLDTSKLYVSSSFTNKIPDEGDTTPEKPEDPSALSKQSSEVSMREESDIDQNQSDDGDTETSPTKSPTTPKSVKNKNSSEFPLFSYNNGVVMTSCRELDNNRSALSAASAFAIATAGANEGTPNKEKYRRMSLASAGFPPDQRNGDKEFVIRRAATNRVLNVLRHWVSKHSQDFETNDELKCKVIGFLEEVMHDPELLTQERKAAANIIRTLTQEDPGDNQITLEEITQMAEGVKAEPFENHSALEIAEQLTLLDHLVFKKIPYEEFFGQGWMKLEKNERTPYIMKTTKHFNDISNLIASEIIRNEDINARVSAIEKWVAVADICRCLHNYNAVLEITSSMNRSAIFRLKKTWLKVSKQTKALIDKLQKLVSSEGRFKNLREALKNCDPPCVPYLGMYLTDLAFIEEGTPNYTEDGLVNFSKMRMISHIIREIRQFQQTAYKIEHQAKVTQYLLDQSFVMDEESLYESSLRIEPKLPT

SEQ ID NO: 756820 - protein, 159 aa, Homo sapiens
GELPPPCIHQLVRPSAPGAPLHPPPHMAGFLVCRRHHRCLHCLWGPPFCLSPHPDRLPSFQVACGPVCDPPCVPYLGMYLTDLAFIEEGTPNYTEDGLVNFSKMRMISHIIREIRQFQQTAYKIEHQAKVTQYLLDQSFVMDEESLYESSLRIEPKLPT

SEQ ID NO: 756821 - protein, 489 aa, Homo sapiens
MYSAMSPFSKATLDTSKLYVSSSFTNKIPDEGDTTPEKPEDPSALSKQSSEVSMREESDIDQNQSDDGDTETSPTKSPTTPKSVKNKNSSEFPLFSYNNGVVMTSCRELDNNRSALSAASAFAIATAGANEGTPNKEKYRRMSLASAGFPPDQRNGDKEFVIRRAATNRVLNVLRHWVSKHSQDFETNDELKCKVIGFLEEVMHDPELLTQERKAAANIIRTLTQEDPGDNQITLEEITQMAEGVKAEPFENHSALEIAEQLTLLDHLVFKKIPYEEFFGQGWMKLEKNERTPYIMKTTKHFNDISNLIASEIIRNEDINARVSAIEKWVAVADICRCLHNYNAVLEITSSMNRSAIFRLKKTWLKVSKQTKALIDKLQKLVSSEGRFKNLREALKNCDPPCVPYLGMYLTDLAFIEEGTPNYTEDGLVNFSKMRMISHIIREIRQFQQTAYKIEHQAKVTQYLLDQSFVMDEESLYESSLRIEPKLPT

SEQ ID NO: 756822 - protein, 1273 aa, Homo sapiens
MQKGIRLNDGHVASLGLLARKDGTRKGYLSKRSSDNTKWQTKWFALLQNLLFYFESDSSSRPSGLYLLEGCVCDRAPSPKPALSAKEPLEKQHYFTVNFSHENQKALELRTEDAKDCDEWVAAIAHASYRTLATEHEALMQKYLHLLQIVETEKTVAKQLRQQIEDGEIEIERLKAEITSLLKDNERIQSTQTVAPNDEDSDIKKIKKVQSFLRGWLCRRKWKTIIQDYIRSPHADSMRKRNQVVFSMLEAEAEYVQQLHILVNNFLRPLRMAASSKKPPITHDDVSSIFLNSETIMFLHQIFYQGLKARISSWPTLVLADLFDILLPMLNIYQEFVRNHQYSLQILAHCKQNRDFDKLLKTTEAKPDCEERTLETFLTYPMFQIPRYILTLHELLAHTPHEHVERNSLDYAKSKLEELSRIMHDEVSETENIRKNLAIERMIIEGCEILLDTSQTFVRQGSLIQVPMSEKGKITRGRLGSLSLKKEGERQCFLFSKHLIICTRGSGGKLHLTKNGVISLIDCTLLEEPESTEEEAKGSGQDIDHLDFKIGVEPKDSPPFTVILVASSRQEKAAWTSDISQCVDNIRCNGLMMNAFEENSKVTVPQMIKRTREGTREAEMSRSDASLYCDDVDIRFSKTMNSCKVLQIRYASVERLLERLTDLRFLSIDFLNTFLHSYRVFTTAIVVLDKLITIYKKPISAIPARWLRSLELLFASGQNNKLLYGEPPKSPRATRKFSSPPPLSITKTSSPSRRRKLSLNIPIITGGKALDLAALSCNSNGYTSMYSAMSPFSKATLDTSKLYVSSSFTNKIPDEGDTTPEKPEDPSALSKQSSEVSMREESDIDQNQSDDGDTETSPTKSPTTPKSVKNKNSSEFPLFSYNNGVVMTSCRELDNNRSALSAASAFAIATAGANEGTPNKEKYRRMSLASAGFPPDQRNGDKEFVIRRAATNRVLNVLRHWVSKHSQDFETNDELKCKVIGFLEEVMHDPELLTQERKAAANIIRTLTQEDPGDNQITLEEITQMAEGVKAEPFENHSALEIAEQLTLLDHLVFKKIPYEEFFGQGWMKLEKNERTPYIMKTTKHFNDISNLIASEIIRNEDINARVSAIEKWVAVADICRCLHNYNAVLEITSSMNRSAIFRLKKTWLKVSKQTKALIDKLQKLVSSEGRFKNLREALKNCDPPCVPYLGMYLTDLAFIEEGTPNYTEDGLVNFSKMRMISHIIREIRQFQQTAYKIEHQAKVTQYLLDQSFVMDEESLYESSLRIEPKLPT

SEQ ID NO: 756823 - protein, 249 aa, Homo sapiens [sequence omitted]

SEQ ID NO: 756824 - protein, 249 aa, Homo sapiens [sequence omitted]

SEQ ID NO: 756825 - protein, 328 aa, Homo sapiens
MTGVFDSLVADMHSTQIAASSTYHQHQQPPSGGGAGPGGNSSSSSSLHKPQESPTLPVSTATDSSYYTNQQHPAGGGGGGGSPYAHMGSYQYQASGLNNVPYSAKSSYDLGYTAAYTSYAPYGTSSSPANNEPEKEDLEPEIRIVNGKPKKVRKPRTIYSSFQLAALQRRFQKTQYLALPERAELAASLGLTQTQVKIWFQNRRSKFKKMWKSGEIPSEQHPGASASPPCASPPVSAPASWDFGVPQRMAGGGGPGSGGSGAGSSGSSPSSAASAFLGNYPWYHQTSGSASHLQATAPLLHPTQTPQPHHHHHHHGGGGAPVSAGTIF

SEQ ID NO: 756826 - protein, 141 aa, Homo sapiens [sequence omitted]

SEQ ID NO: 756827 - protein, 479 aa, Homo sapiens
MSFGATPKMSPEMGELTQTRLQKIWIPHSSGSSRLQRRRGSSIPQFTNSPTMVIMVGLPARGKTYISTKLTRYLNWIGTPTKVFNLGQYRREAVSYKNYEFFLPDNMEALQIRKQCALAALKDVHNYLSHEEGHVAVFDATNTTRERRSLILQFAKEHGYKVFFIESICNDPGIIAENIRQVKLGSPDYIDCDREKVLEDFLKRIECYEVNYQPLDEELDSHLSYIKIFDVGTRYMVNRVQDHIQSRTVYYLMNIHVTPRSIYLCRHGESELNIRGRIGGDSGLSVRGKQYAYALANFIQSQGISSLKVWTSHMKRTIQTAEALGVPYEQWKALNEIDAGVCEEMTYEEIQEHYPEEFALRDQDKYRYRYPKGESYEDLVQRLEPVIMELERQENVLVICHQAVMRCLLAYFLDKSSDELPYLKCPLHTVLKLTPVAYGCKVESIYLNVEAVNTHREKPENVDITREPEEALDTVPAHY

SEQ ID NO: 756828 - protein, 431 aa, Homo sapiens
MSFGATPKMSPEMGELTQTRLQKIWIPHSSGSSRLQRRRGSSIPQFTNSPTMVIMVGLPARGKTYISTKLTRYLNWIGTPTKVFNLGQYRREAVSYKNYEFFLPDNMEALQIRKQCALAALKDVHNYLSHEEGHVAVFDATNTTRERRSLILQFAKEHGYKVFFIESICNDPGIIAENIRQVKLGSPDYIDCDREKVLEDFLKRIECYEVNYQPLDEELDSHLSYIKIFDVGTRYMVNRVQDHIQSRTVYYLMNIHVTPRSIYLCRHGESELNIRGRIGGDSGLSVRGKQYAYALANFIQSQGISSLKVWTSHMKRTIQTAEALGVPYEQWKALNEIDAGVCEEMTYEEIQEHYPEEFALRDQDKYRYRYPKGESYEDLVQRLEPVIMELERQENVLVICHQAVMRCLLAYFLDKSSGTTLISALGMFDGI

SEQ ID NO: 756829 - protein, 607 aa, Homo sapiens
FPGGWQMRVVRLLRLRAALTLLGEVPRRPASRGVPGSRRTQKGSGARWEKEKHEDGVKWRQLEHKGPYFAPPYEPLPDGVRFFYEGRPVRLSVAAEEVATFYGRMLDHEYTTKEVFRKNFFNDWRKEMAVEEREVIKSLDKCDFTEIHRYFVDKAAARKVLSREEKQKLKEEAEKLQQEFGYCILDGHQEKIGNFKIEPPGLFRGRGDHPKMGMLKRRITPEDVVINCSRDSKIPEPPAGHQWKEVRSDNTVTWLAAWTESVQNSIKYIMLNPCSKLKGETAWQKFETARRLRGFVDEIRSQYRADWKSREMKTRQRAVALYFIDKLALRAGNEKEDGEAADTVGCCSLRVEHVQLHPEADGCQHVVEFDFLGKDCIRYYNRVPVEKPVYKNLQLFMENKDPRDDLFDRLTTTSLNKHLQELMDGLTAKVFRTYNASITLQEQLRALTRAEDSIAAKILSYNRANRVVAILCNHQRATPSTFEKSMQNLQTKIQAKKEQVAEARAELRRARAEHKAQGDGKSRSVLEKKRRLLEKLQEQLAQLSVQATDKEENKQVALGTSKLNYLDPRISIAWCKRFRVPVEKIYSKTQRERFAWALAMAGEDFEF

SEQ ID NO: 756830 - protein, 607 aa, Homo sapiens; identical to SEQ ID NO: 756829

SEQ ID NO: 756831 - protein, 688 aa, Homo sapiens
FPGGWQMRVVRLLRLRAALTLLGEVPRRPASRGVPGSRRTQKGSGARWEKEKHEDGVKWRQLEHKGPYFAPPYEPLPDGVRFFYEGRPVRLSVAAEEVATFYGRMLDHEYTTKEVFRKNFFNDWRKEMAVEEREVIKSLDKCDFTEIHRYFVDKAAARKVLSREEKQKLKEEAEKLQQEFGYCILDGHQEKIGNFKIEPPGLFRGRGDHPKMGMLKRRITPEDVVINCSRDSKIPEPPAGHQWKEVRSDNTVTWLAAWTESVQNSIKYIMLNPCSKLKGETAWQKFETARRLRGFVDEIRSQYRADWKSREMKTRQRAVALYFIDKLALRAGNEKEDGEAADTVGCCSLRVEHVQLHPEADGCQHVVEFDFLGKDCIRYYNRVPVEKPVYKNLQLFMENKDPRDDLFDRLTTTSLNKHLQELMDGLTAKVFRTYNASITLQEQLRALTRAEDSIAAKILSYNRANRVVAILCNHQRATPSTFEKSMQNLQTKIQAKKEQVAEARAELRRARAEHKAQGDGKSRSVLEKKRRLLEKLQEQLAQLSVQATDKEENKQVALGTSKLNYLDPRISIAWCVCLGSQFPPVAYGGPGFSRRPLFSPSIALVPCPLGSAQALPVTGTHDAESCVISSPCPERSDGQGEVGVLTVAWDSEASGGPVELSLPTGSGRWLSALLGGHLGHSRLSLTPR

SEQ ID NO: 756832 - protein, 688 aa, Homo sapiens; identical to SEQ ID NO: 756831

SEQ ID NO: 756833 - protein, 664 aa, Homo sapiens
FPGGWQMRVVRLLRLRAALTLLGEVPRRPASRGVPGSRRTQKGSGARNSQKGPFRNVCCTCFPLSDPSETSCCSEDTHPSRPGPPGPQQHYLAGVTCRSPGSGRWEKEKHEDGVKWRQLEHKGPYFAPPYEPLPDGVRFFYEGRPVRLSVAAEEVATFYGRMLDHEYTTKEVFRKNFFNDWRKEMAVEEREVIKSLDKCDFTEIHRYFVDKAAARKVLSREEKQKLKEEAEKLQQEFGYCILDGHQEKIGNFKIEPPGLFRGRGDHPKMGMLKRRITPEDVVINCSRDSKIPEPPAGHQWKEVRSDNTVTWLAAWTESVQNSIKYIMLNPCSKLKGETAWQKFETARRLRGFVDEIRSQYRADWKSREMKTRQRAVALYFIDKLALRAGNEKEDGEAADTVGCCSLRVEHVQLHPEADGCQHVVEFDFLGKDCIRYYNRVPVEKPVYKNLQLFMENKDPRDDLFDRLTTTSLNKHLQELMDGLTAKVFRTYNASITLQEQLRALTRAEDSIAAKILSYNRANRVVAILCNHQRATPSTFEKSMQNLQTKIQAKKEQVAEARAELRRARAEHKAQGDGKSRSVLEKKRRLLEKLQEQLAQLSVQATDKEENKQVALGTSKLNYLDPRISIAWCKRFRVPVEKIYSKTQRERFAWALAMAGEDFEF

SEQ ID NO: 756834 - protein, 690 aa, Homo sapiens
LSRRLADARGAAAAAPGGSDAARGGPPPPGLPGCPGLAQDAEGQWSQELGTQREPQMGQGVLGGGSSGLRLELGLAVGPALRHISPRVHRQTLQRLPVALRTLIPADQAHQAPNSTTWLGSRAGLLALARWEKEKHEDGVKWRQLEHKGPYFAPPYEPLPDGVRFFYEGRPVRLSVAAEEVATFYGRMLDHEYTTKEVFRKNFFNDWRKEMAVEEREVIKSLDKCDFTEIHRYFVDKAAARKVLSREEKQKLKEEAEKLQQEFGYCILDGHQEKIGNFKIEPPGLFRGRGDHPKMGMLKRRITPEDVVINCSRDSKIPEPPAGHQWKEVRSDNTVTWLAAWTESVQNSIKYIMLNPCSKLKGETAWQKFETARRLRGFVDEIRSQYRADWKSREMKTRQRAVALYFIDKLALRAGNEKEDGEAADTVGCCSLRVEHVQLHPEADGCQHVVEFDFLGKDCIRYYNRVPVEKPVYKNLQLFMENKDPRDDLFDRLTTTSLNKHLQELMDGLTAKVFRTYNASITLQEQLRALTRAEDSIAAKILSYNRANRVVAILCNHQRATPSTFEKSMQNLQTKIQAKKEQVAEARAELRRARAEHKAQGDGKSRSVLEKKRRLLEKLQEQLAQLSVQATDKEENKQVALGTSKLNYLDPRISIAWCKRFRVPVEKIYSKTQRERFAWALAMAGEDFEF

SEQ ID NO: 756835 - protein, 607 aa, Homo sapiens; identical to SEQ ID NO: 756829

SEQ ID NO: 756836 - protein, 607 aa, Homo sapiens; identical to SEQ ID NO: 756829

SEQ ID NO: 756837 - protein, 620 aa, Homo sapiens
FPGGWQMRVVRLLRLRAALTLLGEVPRRPASRGVPGSRRTQKGSGARWEKEKHEDGVKWRQLEHKGPYFAPPYEPLPDGVRFFYEGRPVRLSVAAEEVATFYGRMLDHEYTTKEVFRKNFFNDWRKEMAVEEREVIKSLDKCDFTEIHRYFVDKAAARKVLSREEKQKLKEEAEKLQQEFGYCILDGHQEKIGNFKIEPPGLFRGRGDHPKMGMLKRRITPEDVVINCSRDSKIPEPPAGHQWKEVRSDNTVTWLAAWTESVQNSIKYIMLNPCSKLKGETAWQKFETARRLRGFVDEIRSQYRADWKSREMKTRQRAVALYFIDKLALRAGNEKEDGEAADTVGCCSLRVEHVQLHPEADGCQHVVEFDFLGKDCIRYYNRVPVEKPVYKNLQLFMENKDPRDDLFDRLTTTSLNKHLQELMDGLTAKVFRTYNASITLQEQLRALTRAEDSIAAKILSYNRANRVVAILCNHQRATPSTFEKSMQNLQTKIQAKKEQVAEARAELRRARAEHKAQGDGKSRSPARGLAASSSLASVLEKKRRLLEKLQEQLAQLSVQATDKEENKQVALGTSKLNYLDPRISIAWCKRFRVPVEKIYSKTQRERFAWALAMAGEDFEF

SEQ ID NO: 756838 - protein, 503 aa, Homo sapiens
MLDHEYTTKEVFRKNFFNDWRKEMAVEEREVIKSLDKCDFTEIHRYFVDKAAARKVLSREEKQKLKEEAEKLQQEFGYCILDGHQEKIGNFKIEPPGLFRGRGDHPKMGMLKRRITPEDVVINCSRDSKIPEPPAGHQWKEVRSDNTVTWLAAWTESVQNSIKYIMLNPCSKLKGETAWQKFETARRLRGFVDEIRSQYRADWKSREMKTRQRAVALYFIDKLALRAGNEKEDGEAADTVGCCSLRVEHVQLHPEADGCQHVVEFDFLGKDCIRYYNRVPVEKPVYKNLQLFMENKDPRDDLFDRLTTTSLNKHLQELMDGLTAKVFRTYNASITLQEQLRALTRAEDSIAAKILSYNRANRVVAILCNHQRATPSTFEKSMQNLQTKIQAKKEQVAEARAELRRARAEHKAQGDGKSRSVLEKKRRLLEKLQEQLAQLSVQATDKEENKQVALGTSKLNYLDPRISIAWCKRFRVPVEKIYSKTQRERFAWALAMAGEDFEF

SEQ ID NO: 756839 - protein, 447 aa, Homo sapiens
VKAGRRMKLKEEAEKLQQEFGYCILDGHQEKIGNFKIEPPGLFRGRGDHPKMGMLKRRITPEDVVINCSRDSKIPEPPAGHQWKEVRSDNTVTWLAAWTESVQNSIKYIMLNPCSKLKGETAWQKFETARRLRGFVDEIRSQYRADWKSREMKTRQRAVALYFIDKLALRAGNEKEDGEAADTVGCCSLRVEHVQLHPEADGCQHVVEFDFLGKDCIRYYNRVPVEKPVYKNLQLFMENKDPRDDLFDRLTTTSLNKHLQELMDGLTAKVFRTYNASITLQEQLRALTRAEDSIAAKILSYNRANRVVAILCNHQRATPSTFEKSMQNLQTKIQAKKEQVAEARAELRRARAEHKAQGDGKSRSVLEKKRRLLEKLQEQLAQLSVQATDKEENKQVALGTSKLNYLDPRISIAWCKRFRVPVEKIYSKTQRERFAWALAMAGEDFEF

SEQ ID NO: 756840 - protein, 266 aa, Homo sapiens
IATWQGCGVCWGPLWGHDLRRVCGGRELSTFHGLEGPHRGPSGTHGVEAGMGSCGEIPGWSGAWNRPLGGPSSFSAQGLPAEPCMAEEVCSMSWYTPMPIKKGSVVMRVDISSNGLGTFIPDKRYPFPRRGLGWTPGEFLTPGSPEEPVGDPRERMGRGEAATSCGTPEHWDLTCAYSAPAARFQMNINGFLKRDRDNNIQFTVGEELFNLMPQYFVGVSSRPLWHTVDQSPVLILGGIPNEKYVLMTDTSFKDFSLVEVNGVGQM

SEQ ID NO: 756841 - protein, 161 aa, Homo sapiens
QTPPPAAWLSLTPKGNLMVPVFIGCPPGKRLAFDITYTLEYSRLKNKHYFDCVNVNPEMPCFLFRDSVCPVPSPAQFTALLPPLLCALPPHSSPRRLPTLFPAASHFPPSRSSASRAKLISSSGLNPLQPHSFLPLLLDSRFGDRRLRQFPGQVKAWPACS

SEQ ID NO: 756842 - protein, 1272 aa, Homo sapiens
MCGPAMFPAGPPWPRVRVVQVLWALLAVLLASWRLWAIKDFQECTWQVVLNEFKRVGESGVSDSFFEQEPVDTVSSLFHMLVDSPIDPSEKYLGFPYYLKINYSCEEKPSEDLVRMGHLTGLKPLVLVTFQSPVNFYRWKIEQLQIQMEAAPFRSKEPCMAEEVCSMSWYTPMPIKKGSVVMRVDISSNGLGTFIPDKRFQMNINGFLKRDRDNNIQFTVGEELFNLMPQYFVGVSSRPLWHTVDQSPVLILGGIPNEKYVLMTDTSFKDFSLVELSIDSCWVGSFYCPHSGFTATIYDTIATESTLFIRQNQLVYYFTGTYTTLYERNRGSGSWIRVLASECIKKLCPVYFHSNGSEYIMALTTGKHEGYVHFGTIRDGQVSFEMLPRQWSVCEQIGVTTCSIIWSEYIAGEYTLLLLVESGYGNASKRFQVVSYNTASDDLELLYHIPEFIPEARGLEFLMILGTESYTSTAMAPKGIFCNPYNNLIFIWGNFLLQSSNKENFIYLADFPKELSIKYMARSFRGAVAIVTETEEIWYLLEGSYRVYQLFPSKGWQVHISLKLMQQSSLYASNETMLTLFYEDSKLYQLVYLMNNQKGQLVKRLVPVEQLLMYQQHTSHYDLERKGGYLMLSFIDFCPFSVMRLRSLPSPQRYTRQERYRARPPRVLERSGFHNENSLAIYQGLVYYLLWLHSVYDKVGVRRRAGRPETGLGQPGAGLEGEAWRLSPRCPIPSRCRAIPAAVRGPGARPHLALVGEQQTRPGRRSGLGAGKGAAPGHPSPCPTPGADSAPRIRYPKDYYFFLASNWRSAGGVSIEMDSYEKIYNLESAYELPERIFLDKGTEYSFAIFLSAQGHSFRTQSELGLRGTRVEPEGRGEGYQNLGAWGAGTPSEGRGLSVDVGVVLADPGCIEASVKQEVLINRNSVLFSITLKDKKLCYDQGISGHHLMETSMTVNVRSKPGGEGKRLAFDITYTLEYSRLKNKHYFDCVNVNPEMPCFLFRDSVCPVPSPAQFTALLPPLLCALPPHSSPRRLPTLFPAASHFPPSRSSASRAKLISSSGLNPSNPIVFYPFFLIQDLVTGDSGSFQGSYVLLVVGGGPTLDSLKDYSEDEIYRFNSPLDKTNSLIWTTRTTRTTKDSAFHIMSHESPGIEGVDTSTYCNYQLTFLLHIHGLPLSPKRALFIIMVSASVFVGLVIFYIAFCLLWPLVVKGCTMIRWKINNLIASESYYTYASISGISSMPSLRHSRMGSMFSSRMTEDRAEPKEAVERQLMT

SEQ ID NO: 756843 - protein, 997 aa, Homo sapiens
MCGPAMFPAGPPWPRVRVVQVLWALLAVLLASWRLWAIKDFQECTWQVVLNEFKRVGESGVSDSFFEQEPVDTVSSLFHMLVDSPIDPSEKYLGFPYYLKINYSCEEKPSEDLVRMGHLTGLKPLVLVTFQSPVNFYRWKIEQLQIQMEAAPFRSKEPCMAEEVCSMSWYTPMPIKKGSVVMRVDISSNGLGTFIPDKRFQMNINGFLKRDRDNNIQFTVGEELFNLMPQYFVGVSSRPLWHTVDQSPVLILGGIPNEKYVLMTDTSFKDFSLVELSIDSCWVGSFYCPHSGFTATIYDTIATESTLFIRQNQLVYYFTGTYTTLYERNRGSGSWIRVLASECIKKLCPVYFHSNGSEYIMALTTGKHEGYVHFGTIRDGQVSFEMLPRQWSVCEQIGVTTCSIIWSEYIAGEYTLLLLVESGYGNASKRFQVVSYNTASDDLELLYHIPEFIPEARGLEFLMILGTESYTSTAMAPKGIFCNPYNNLIFIWGNFLLQSSNKENFIYLADFPKELSIKYMARSFRGAVAIVTETEEIWYLLEGSYRVYQLFPSKGWQVHISLKLMQQSSLYASNETMLTLFYEDSKLYQLVYLMNNQKGQLVKRLVPVEQLLMYQQHTSHYDLERKGGYLMLSFIDFCPFSVMRLRSLPSPQRYTRQERYRARPPRVLERSGFHNENSLAIYQGLVYYLLWLHSVYDKDYYFFLASNWRSAGGVSIEMDSYEKIYNLESAYELPERIFLDKGTEYSFAIFLSAQGHSFRTQSELGLRGTRVEPEGRGEGYQNLGAWGAGTPSEGRGLSVDVGVVLADPGCIEASVKQEVLINRNSVLFSITLKDKKLCYDQGISGHHLMETSMTVNVRSKPGGEGKRLAFDITYTLEYSRLKNKHYFDCVNVNPEMPCFLFRDIYVLLVVGGGPTLDSLKDYSEDEIYRFNSPLDKTNSLIWTTRTTRTTKDSAFHIMSHESPGIEWLCLENAPCYDNVPQGIFAPEFFFKVLVSNR

SEQ ID NO: 756844 - protein, 932 aa, Homo sapiens
MCGPAMFPAGPPWPRVRVVQVLWALLAVLLASWRLWAIKDFQECTWQVVLNEFKRVGESGVSDSFFEQEPVDTVSSLFHMLVDSPIDPSEKYLGFPYYLKINYSCEEKSPVNFYRWKIEQLQIQMEAAPFRSKGFQMNINGFLKRDRDNNIQFTVGEELFNLMPQYFVGVSSRPLWHTVDQSPVLILGGIPNEKYVLMTDTSFKDFSLVELSIDSCWVGSFYCPHSGFTATIYDTIATESTLFIRQNQLVYYFTGTYTTLYERNRGSGSWIRVLASECIKKLCPVYFHSNGSEYIMALTTGKHEGYVHFGTIRDGQVSFEMLPRQWSVCEQIGVTTCSIIWSEYIAGEYTLLLLVESGYGNASKRFQVVSYNTASDDLELLYHIPEFIPEARGLEFLMILGTESYTSTAMAPKGIFCNPYNNLIFIWGNFLLQSSNKENFIYLADFPKELSIKYMARSFRGAVAIVTETEEIWYLLEGSYRVYQLFPSKGWQVHISLKLMQQSSLYASNETMLTLFYEDSKLYQLVYLMNNQKGQLVKRLVPVEQLLMYQQHTSHYDLERKGGYLMLSFIDFCPFSVMRLRSLPSPQRYTRQERYRARPPRVLERSGFHNENSLAIYQGLVYYLLWLHSVYDKDYYFFLASNWRSAGGVSIEMDSYEKIYNLESAYELPERIFLDKGTEYSFAIFLSAQGHSFRTQSELGLRGTRVEPEGRGEGYQNLGAWGAGTPSEGRGLSVDVGVVLADPGCIEASVKQEVLINRNSVLFSITLKDKKLCYDQGISGHHLMETSMTVNVRSKPGGEGKRLAFDITYTLEYSRLKNKHYFDCVNVNPEMPCFLFRDIYVLLVVGGGPTLDSLKDYSEDEIYRFNSPLDKTNSLIWTTRTTRTTKDSAFHIMSHESPGIEWLCLENAPCYDNVPQGIFAPEFFFKVLVSNR

SEQ ID NO: 756845 - protein, 1097 aa, Homo sapiens
MCGPAMFPAGPPWPRVRVVQVLWALLAVLLASWRLWAIKDFQECTWQVVLNEFKRVGESGVSDSFFEQEPVDTVSSLFHMLVDSPIDPSEKYLGFPYYLKINYSCEEKTESCAVAQTGVQWRDLGSLQPPPPVFKRCSCLGLPSELELQPSEDLVRMGHLTGLKPLVLVTFQSPVNFYRWKIEQLQIQMEAAPFRSKEPCMAEEVCSMSWYTPMPIKKGSVVMRVDISSNGLGTFIPDKRYPFPRRGLGWTPGEFLTPGSPEEPVGDPRERMGRGEAATSCGTPEHWDLTCAYSAPAARFQMNINGFLKRDRDNNIQFTVGEELFNLMPQYFVGVSSRPLWHTVDQSPVLILGGIPNEKYVLMTDTSFKDFSLVELSIDSCWVGSFYCPHSGFTATIYDTIATESTLFIRQNQLVYYFTGTYTTLYERNRGSGSWIRVLASECIKKLCPVYFHSNGSEYIMALTTGKHEGYVHFGTIRDGQVSFEMLPRQWSVCEQIGVTTCSIIWSEYIAGEYTLLLLVESGYGNASKRFQVVSYNTASDDLELLYHIPEFIPEARGLEFLMILGTESYTSTAMAPKGIFCNPYNNLIFIWGNFLLQSSNKENFIYLADFPKELSIKYMARSFRGAVAIVTETEEIWYLLEGSYRVYQLFPSKGWQVHISLKLMQQSSLYASNETMLTLFYEDSKLYQLVYLMNNQKGQLVKRLVPVEQLLMYQQHTSHYDLERKGGYLMLSFIDFCPFSVMRLRSLPSPQRYTRQERYRARPPRVLERSGFHNENSLAIYQGLVYYLLWLHSVYDKDYYFFLASNWRSAGGVSIEMDSYEKIYNLESAYELPERIFLDKGTEYSFAIFLSAQGHSFRTQSELGLRGTRVEPEGRGEGYQNLGAWGAGTPSEGRGLSVDVGVVLADPGCIEASVKQEVLINRNSVLFSITLKDKKLCYDQGISGHHLMETSMTVNVRSKPGGEGKRLAFDITYTLEYSRLKNKHYFDCVNVNPEMPCFLFRDIYVLLVVGGGPTLDSLKDYSEDEIYRFNSPLDKTNSLIWTTRTTRTTKDSAFHIMSHESPGIEWLCLENAPCYDNVPQGIFAPEFFFKVLVSNR

SEQ ID NO: 756846 - protein, 282 aa, Homo sapiens
MCGPAMFPAGPPWPRVRVVQVLWALLAVLLASWRLWAIKDFQECTWQVVLNEFKRVGESGVSDSFFEQEPVDTVSSLFHMLVDSPIDPSEKYLGFPYYLKINYSCEEKPSEDLVRMGHLTGLKPLVLVTFQSPVNFYRWKIEQLQIQMEAAPFRSKEPCMAEEVCSMSWYTPMPIKKGSVVMRVDISSNGLGTFIPDKRFQMNINGFLKRDRDNNIQFTVGEELFNLMPQYFVGVSSRPLWHTVDQSPVLILGGIPNEKYVLMTDTSFKDFSLVETGNGPTP

SEQ ID NO: 756847 - protein, 272 aa, Homo sapiens
GLCFQETHLGPHMQGNLMVPVFIGCPPGKRLAFDITYTLEYSRLKNKHYFDCVNVNPEMPCFLFRDSLFYPFFLIQDLVTGDSGSFQGSYVLLVVGGGPTLDSLKDYSEDEIYRFNSPLDKTNSLIWTTRTTRTTKDSAFHIMSHESPGIEGVDTSTYCNYQLTFLLHIHGLPLSPKRALFIIMVSASVFVGLVIFYIAFCLLWPLVVKGCTMIRWKINNLIASESYYTYASISGISSMPSLRHSRMGSMFSSRMTEDRAEPKEAVERQLMT

SEQ ID NO: 756848 - protein, 101 aa, Homo sapiens
RPPRVLERSGFHNENSLAIYQGLVYYLLWLHSVYDKVGVRRRAGRPETGLGQPGAGLEGEACGAERSGIGEQDWWWVGGGPGGGAWLEQDFQGKALGVWPG

SEQ ID NO: 756849 - protein, 70 aa, Homo sapiens
MESQESGESVGVPPVPPWQLFNLMPQYFVGVSSRPLWHTVDQSPVLILGGIPNEKYVLMTDTSFKDFSLV

SEQ ID NO: 756850 - protein, 997 aa, Homo sapiens; identical to SEQ ID NO: 756843

SEQ ID NO: 756851 - protein, 1194 aa, Homo sapiens
MCGPAMFPAGPPWPRVRVVQVLWALLAVLLASWRLWAIKDFQECTWQVVLNEFKRVGESGVSDSFFEQEPVDTVSSLFHMLVDSPIDPSEKYLGFPYYLKINYSCEEKPSEDLVRMGHLTGLKPLVLVTFQSPVNFYRWKIEQLQIQMEAAPFRSKEPCMAEEVCSMSWYTPMPIKKGSVVMRVDISSNGLGTFIPDKRFQMNINGFLKRDRDNNIQFTVGEELFNLMPQYFVGVSSRPLWHTVDQSPVLILGGIPNEKYVLMTDTSFKDFSLVELSIDSCWVGSFYCPHSGFTATIYDTIATESTLFIRQNQLVYYFTGTYTTLYERNRGSGSWIRVLASECIKKLCPVYFHSNGSEYIMALTTGKHEGYVHFGTIRDGQVSFEMLPRQWSVCEQIGVTTCSIIWSEYIAGEYTLLLLVESGYGNASKRFQVVSYNTASDDLELLYHIPEFIPEARGLEFLMILGTESYTSTAMAPKGIFCNPYNNLIFIWGNFLLQSSNKENFIYLADFPKELSIKYMARSFRGAVAIVTETEEIWYLLEGSYRVYQLFPSKGWQVHISLKLMQQSSLYASNETMLTLFYEDSKLYQLVYLMNNQKGQLVKRLVPVEQLLMYQQHTSHYDLERKGGYLMLSFIDFCPFSVMRLRSLPSPQRYTRQERYRARPPRVLERSGFHNENSLAIYQGLVYYLLWLHSVYDKPYADPVHDPTWRWWANNKQDQDYYFFLASNWRSAGGVSIEMDSYEKIYNLESAYELPERIFLDKGTEYSFAIFLSAQGHSFRTQSELGLRGTRVEPEGRGEGYQNLGAWGAGTPSEGRGLSVDVGVVLADPGCIEASVKQEVLINRNSVLFSITLKDKKLCYDQGISGHHLMETSMTVNVRSKPGGEGKRLAFDITYTLEYSRLKNKHYFDCVNVNPEMPCFLFRDSVCPVPSPAQFTALLPPLLCALPPHSSPRRLPTLFPAASHFPPSRSSASRAKLISSSGLNPSNPIVFYPFFLIQDLVTGDSGSFQGSYVLLVVGGGPTLDSLKDYSEDEIYRFNSPLDKTNSLIWTTRTTRTTKDSAFHIMSHESPGIEGVDTSTYCNYQLTFLLHIHGLPLSPKRALFIIMVSASVFVGLVIFYIAFCLLWPLVVKGCTMIRWKINNLIASESYYTYASISGISSMPSLRHSRMGSMFSSRMTEDRAEPKEAVERQLMT

SEQ ID NO: 756852 - protein, 282 aa, Homo sapiens; identical to SEQ ID NO: 756846

SEQ ID NO: 756853 - protein, 922 aa, Homo sapiens
IATWQGCGVCWGPLWGHDLRRVCGGRELSTFHGLEGPHRGPSGTHGVEAGMGSCGEIPGWSGAWNRPLGGPSSFSAQGLPAEPCMAEEVCSMSWYTPMPIKKGSVVMRVDISSNGLGTFIPDKRFQMNINGFLKRDRDNNIQFTVGEELFNLMPQYFVGVSSRPLWHTVDQSPVLILGGIPNEKYVLMTDTSFKDFSLVELSIDSCWVGSFYCPHSGFTATIYDTIATESTLFIRQNQLVYYFTGTYTTLYERNRGSGSWIRVLASECIKKLCPVYFHSNGSEYIMALTTGKHEGYVHFGTIRDGQVSFEMLPRQWSVCEQIGVTTCSIIWSEYIAGEYTLLLLVESGYGNASKRFQVVSYNTASDDLELLYHIPEFIPEARGLEFLMILGTESYTSTAMAPKGIFCNPYNNLIFIWGNFLLQSSNKENFIYLADFPKELSIKYMARSFRGAVAIVTETEEIWYLLEGSYRVYQLFPSKGWQVHISLKLMQQSSLYASNETMLTLFYEDSKLYQLVYLMNNQKGQLVKRLVPVEQLLMYQQHTSHYDLERKGGYLMLSFIDFCPFSVMRLRSLPSPQRYTRQERYRARPPRVLERSGFHNENSLAIYQGLVYYLLWLHSVYDKDYYFFLASNWRSAGGVSIEMDSYEKIYNLESAYELPERIFLDKGTEYSFAIFLSAQGHSFRTQSELGLRGTRVEPEGRGEGYQNLGAWGAGTPSEGRGLSVDVGVVLADPGCIEASVKQEVLINRNSVLFSITLKDKKLCYDQGISGHHLMETSMTVNVRSKPGGEGKRLAFDITYTLEYSRLKNKHYFDCVNVNPEMPCFLFRDIYVLLVVGGGPTLDSLKDYSEDEIYRFNSPLDKTNSLIWTTRTTRTTKDSAFHIMSHESPGIEWLCLENAPCYDNVPQGIFAPEFFFKVLVSNR

SEQ ID NO: 756854 - protein, 562 aa, Homo sapiens
MCGPAMFPAGPPWPRVRVVQVLWALLAVLLASWRLWAIKDFQECTWQVVLNEFKRVGESGVSDSFFEQEPVDTVSSLFHMLVDSPIDPSEKYLGFPYYLKINYSCEEKPSEDLVRMGHLTGLKPLVLVTFQSPVNFYRWKIEQLQIQMEAAPFRSKEPCMAEEVCSMSWYTPMPIKKGSVVMRVDISSNGLGTFIPDKRFQMNINGFLKRDRDNNIQFTVGEELFNLMPQYFVGVSSRPLWHTVDQSPVLILGGIPNEKYVLMTDTSFKDFSLVELSIDSCWVGSFYCPHSGFTATIYDTIATESTLFIRQNQLVYYFTGTYTTLYERNRGSGSWIRVLASECIKKLCPVYFHSNGSEYIMALTTGKHEGYVHFGTIRDGQVSFEMLPRQWSVCEQIGVTTCSIIWSEYIAGEYTLLLLVESGYGNASKRFQVVSYNTASDDLELLYHIPEFIPEARGLEFLMILGTESYTSTAMAPKGIFCNPYNNLIFIWGNFLLQSSNKENFIYLADFPKELSIKYMARSFRGAVAIVTETEEVGCPAPLPVPSLPTPKPQGPLFPPSQ

SEQ ID NO: 756855 - protein, 164 aa, Homo sapiens
MCGPAMFPAGPPWPRVRVVQVLWALLAVLLASWRLWAIKDFQECTWQVVLNEFKRVGESGVSDSFFEQEPVDTVSSLFHMLVDSPIDPSEKYLGFPYYLKINYSCEEKPSEDLVRMGHLTGLKPLVLVTFQSPVNFYRWKIEQLQIQMEAAPFRSKEPCMAEEV

SEQ ID NO: 756856 - protein, 195 aa, Homo sapiens
MADDLDFETGDAGASATFPMQCSALRKNGFVVLKGRPCKIVEMSTSKTGKHGHAKVHLVGIDIFTGKKYEDICPSTHNMDVPNIKRNDFQLIGIQDGYLSLLQDSGEVREDLRLPEGDLGKEIEQKYDCGEEILITVLSAMTEEAAVAIKAMAKITGSQGGGGGSSDPLNLQRPPPRAWPGSGPVLSWTPPTQFI

SEQ ID NO: 756857 - protein, 99 aa, Homo sapiens
NRARTAPPDGEVREDLRLPEGDLGKEIEQKYDCGEEILITVLSAMTEEAAVAIKAMAKITGSQGGGGGSSDPLNLQRPPPRAWPGSGPVLSWTPPTQFI

SEQ ID NO: 756858 - protein, 254 aa, Homo sapiens
MADDLDFETGDAGASATFPMQCSALRKNGFVVLKGRPCKIVEMSTSKTGKHGHAKVHLVGIDIFTGKKYEDICPSTHNMDVPNIKRNDFQLIGIQDGYLSLLQDSGEVREDLRLPEGDLGKEIEQKYDCGEEILVWCLPPCFCAQLCSVRFFLSSDISWLSLLLLQITVLSAMTEEAAVAIKAMAKITGSQRGWQAVISDLEAPPRLAVGRLVDPPFWFLVPPCGRLTRRGGGAFPGGGGRIDGGPVILLFGCG

SEQ ID NO: 756859 - protein, 108 aa, Homo sapiens
MADDLDFETGDAGASATFPMQCSALRKNGFVVLKGRPCKIVEMSTSKTGKHGHAKVHLVGIDIFTGKLNSLNNMKYFILIEEKNKHSEFFSKVKKDQLNKQKQKPTTQ

SEQ ID NO: 756860 - protein, 195 aa, Homo sapiens; identical to SEQ ID NO: 756856

SEQ ID NO: 756861 - protein, 247 aa, Homo sapiens
MADDLDFETGDAGASATFPMQCSALRKNGFVVLKGRPCKIVEMSTSKTGKHGHAKVHLVGIDIFTGKKYEDICPSTHNMDVPNIKRNDFQLIGIQDGYLSLLQDSGEVREDLRLPEGDLGKEIEQKYDCGEEILITVLSAMTEEAAVAIKAMAKITGSQGGGGGSSDPLNLQRPPPRAWPGSGPVLSWTPSKNYCTVIWEIPPLFGEALALTMILGQEQTKLCAVYNDLLLSRLISPVWGQRAGVRA

SEQ ID NO: 756862 - protein, 195 aa, Homo sapiens; identical to SEQ ID NO: 756856

SEQ ID NO: 756863 - protein, 195 aa, Homo sapiens; identical to SEQ ID NO: 756856

SEQ ID NO: 756864 - protein, 195 aa, Homo sapiens; identical to SEQ ID NO: 756856

SEQ ID NO: 756865 - protein, 195 aa, Homo sapiens; identical to SEQ ID NO: 756856

SEQ ID NO: 756866 - protein, 195 aa, Homo sapiens; identical to SEQ ID NO: 756856

SEQ ID NO: 756867 - protein, 195 aa, Homo sapiens; identical to SEQ ID NO: 756856

SEQ ID NO: 756868 - protein, 195 aa, Homo sapiens; identical to SEQ ID NO: 756856

SEQ ID NO: 756869 - protein, 195 aa, Homo sapiens; identical to SEQ ID NO: 756856

SEQ ID NO: 756870 - protein, 195 aa, Homo sapiens; identical to SEQ ID NO: 756856

SEQ ID NO: 756871 - protein, 195 aa, Homo sapiens; identical to SEQ ID NO: 756856

SEQ ID NO: 756872 - protein, 195 aa, Homo sapiens; identical to SEQ ID NO: 756856

SEQ ID NO: 756873 - protein, 195 aa, Homo sapiens; identical to SEQ ID NO: 756856

SEQ ID NO: 756874 - protein, 193 aa, Homo sapiens
MKHDFETGDAGASATFPMQCSALRKNGFVVLKGRPCKIVEMSTSKTGKHGHAKVHLVGIDIFTGKKYEDICPSTHNMDVPNIKRNDFQLIGIQDGYLSLLQDSGEVREDLRLPEGDLGKEIEQKYDCGEEILITVLSAMTEEAAVAIKAMAKITGSQGGGGGSSDPLNLQRPPPRAWPGSGPVLSWTPPTQFI

SEQ ID NO: 756875 - protein, 212 aa, Homo sapiens
LFQVTGLGFRLYDFIGRGSTFTDFETGDAGASATFPMQCSALRKNGFVVLKGRPCKIVEMSTSKTGKHGHAKVHLVGIDIFTGKKYEDICPSTHNMDVPNIKRNDFQLIGIQDGYLSLLQDSGEVREDLRLPEGDLGKEIEQKYDCGEEILITVLSAMTEEAAVAIKAMAKITGSQGGGGGSSDPLNLQRPPPRAWPGSGPVLSWTPPTQFI

SEQ ID NO: 756876 - protein, 195 aa, Homo sapiens; identical to SEQ ID NO: 756856

SEQ ID NO: 756877 - protein, 178 aa, Homo sapiens
EYDCGEEILIIGFVVLKGRPCKIVEMSTSKTGKHGHAKVHLVGIDIFTGKKYEDICPSTHNMDVPNIKRNDFQLIGIQDGYLSLLQDSGEVREDLRLPEGDLGKEIEQKYDCGEEILITVLSAMTEEAAVAIKAMAKITGSQGGGGGSSDPLNLQRPPPRAWPGSGPVLSWTPPTQFI

SEQ ID NO: 756878 - protein, 184 aa, Homo sapiens
RIERGEPKLRPLQPESYGFVVLKGRPCKIVEMSTSKTGKHGHAKVHLVGIDIFTGKKYEDICPSTHNMDVPNIKRNDFQLIGIQDGYLSLLQDSGEVREDLRLPEGDLGKEIEQKYDCGEEILITVLSAMTEEAAVAIKAMAKITGSQGGGGGSSDPLNLQRPPPRAWPGSGPVLSWTPPTQFI

SEQ ID NO: 756879 - protein, 279 aa, Homo sapiens
CYCVLSIGNQKGGEGVRPVCSSGGGGRGGGGGGSGLGGSGWARGERTGSSQCVRASWNRSLLKWQMTWTSRQEMQGPQPPSQCSAQHYVRMALWCSKAGHVRSSRCLLRRLASTATPRLEFHLRILPSPCLQYLWRSQQQAANSADFPLTLLLLSDCFCLALSLHTHSDNYTCSPVFSLFCGYPSVPASFSGSPSVSPALCQSLQFIGLYALAIQLLLPYSWFSLFLSSLEPLLSGCFHHVAQGFSNSTPSPGGTPASILSFQVTLLLRSPVLAFPLEL

SEQ ID NO: 756880 - protein, 195 aa, Homo sapiens; identical to SEQ ID NO: 756856

SEQ ID NO: 756881 - protein, 195 aa, Homo sapiens; identical to SEQ ID NO: 756856

SEQ ID NO: 756882 - protein, 99 aa, Homo sapiens; identical to SEQ ID NO: 756857

SEQ ID NO: 756883 - protein, 195 aa, Homo sapiens; identical to SEQ ID NO: 756856

SEQ ID NO: 756884 - protein, 191 aa, Homo sapiens
MADDLDFETGDAGASATFPMQCSALRKNGFVVLKGRPCKIVEMSTSKTGKHGHAKVHLVGIDIFTGKKYEDICPSTHNMDVPNIKRNDFQLIGIQDGYLSLLQDSGEVREDLRLPEGDLGKEIEQKYDCGEEILITVLSAMTEEAAVAIKAMAKITGSQGECDKSLTVPFTFCCPQQSCCSLNCFRLTFCP

SEQ ID NO: 756885 - protein, 112 aa, Homo sapiens
VVGDGEKGTAWHRSRGRCSVGDGSMQLGTGTGRDEDDGKVEQKYDCGEEILITVLSAMTEEAAVAIKAMAKITGSQGGGGGSSDPLNLQRPPPRAWPGSGPVLSWTPPTQFI

SEQ ID NO: 756886 - protein, 247 aa, Homo sapiens; identical to SEQ ID NO: 756861

SEQ ID NO: 756887 - protein, 200 aa, Homo sapiens
MADDLDFETGDAGASATFPMQCSALRKNGFVVLKGRPCKIVEMSTSKTGKHGHAKVHLVGIDIFTGKKYEDICPSTHNMDVPNIKRNDFQLIGIQDGYLSLLQDSGEVREDLRLPEGDLGKEIEQKYDCGEEILITVLSAMTEEAAVAIKAMAKITGSQGGGGGSSDPLNLQRPPPRAWPGSGPVLSWTPLLARSNGDPL

SEQ ID NO: 756888 - protein, 135 aa, Homo sapiens
KVLFIHLPKNQDSYEEGDLKWWYSSPNIKRNDFQLIGIQDGYLSLLQDSGEVREDLRLPEGDLGKEIEQKYDCGEEILITVLSAMTEEAAVAIKAMAKITGSQGECDKSLTVPFTFCCPQQSCCSLNCFRLTFCP

SEQ ID NO: 756889 - protein, 195 aa, Homo sapiens; identical to SEQ ID NO: 756856

SEQ ID NO: 756890 - protein, 173 aa, Homo sapiens
MADDLDFETGDAGASATFPMQCSALRKNGFVVLKGRPCKIVEMSTSKTGKHGHAKVHLVGIDIFTGKKYEDICPSTHNMDVPNIKRNDFQLIGIQDGYLSLLQDSGEVREDLRLPEGDLGKEIEQKYDCGEEILITVLSAMTEEAAVAIKAMAKITGSQDGGGGSSDAALARS

SEQ ID NO: 756891 - protein, 202 aa, Homo sapiens
CYCVLSIGNQKGGEGVRPVCSSGGGGRGGGGGGSGLGGSGWARGERTGSSQCVRASWNRSLLKWQMTWTSRQEMQGPQPPSQCSAQHYVRMALWCSKAGHVRSSRCLLRRLASTATPRLEFHLRILPSPCLQYLWRSQQQAANSADFPLTLLLLSDCFCLALSLHTHASQYLWRSPPASCPPVLTFPLTLLLQSDCFCLALT

SEQ ID NO: 756892 - protein, 279 aa, Homo sapiens; identical to SEQ ID NO: 756879

SEQ ID NO: 756893 - protein, 160 aa, Homo sapiens
MLPDILIQSTSKTGKHGHAKVHLVGIDIFTGKKYEDICPSTHNMDVPNIKRNDFQLIGIQDGYLSLLQDSGEVREDLRLPEGDLGKEIEQKYDCGEEILITVLSAMTEEAAVAIKAMAKITGSQGGGGGSSDPLNLQRPPPRAWPGSGPVLSWTPPTQFI

SEQ ID NO: 756894 - protein, 153 aa, Homo sapiens
MSKSESPKEPEQLRKLFIGGLSFEKLMAPQAPSTHNMDVPNIKRNDFQLIGIQDGYLSLLQDSGEVREDLRLPEGDLGKEIEQKYDCGEEILITVLSAMTEEAAVAIKAMAKITGSQGGGGGSSDPLNLQRPPPRAWPGSGPVLSWTPPTQFI

SEQ ID NO: 756895 - protein, 195 aa, Homo sapiens; identical to SEQ ID NO: 756856

SEQ ID NO: 756896 - protein, 195 aa, Homo sapiens; identical to SEQ ID NO: 756856

SEQ ID NO: 756897 - protein, 223 aa, Homo sapiens
MADDLDFETGDAGASATFPMQCSALRKNGFVVLKGRPCKIVEMSTSKTGKHGHAKVHLVGIDIFTGKKYEDICPSTHNMDVPNIKRNDFQLIGIQDGYLSLLQDSGEVREDLRLPEGDLGKEIEQKYDCGEEILVWCLPPCFCAQLCSVRFFLSSDISWLSLLLLQITVLSAMTEEAAVAIKAMAKITGSQGECDKSLTVPFTFCCPQQSCCSLNCFRLTFCP

SEQ ID NO: 756898 - protein, 216 aa, Homo sapiens
MADDLDFETGDAGASATFPMQCSALRKNGFVVLKGRPCKIVEMSTSKTGKHGHAKVHLVGIDIFTGKKYEDICPSTHNMDVPNIKRNDFQLIGIQDGYLSLLQDSGEVREDLRLPEGDLGKEIEQKYDCGEEILITVLSAMTEEAAVAIKAMAKITGSQDGGGGSSDRLWPGPKLDSSYTIYLTFYFGFPHPLNLSGSPCPSPSSLGQERAKLWPW

SEQ ID NO: 756899 - protein, 206 aa, Homo sapiens
MADDLDFETGDAGASATFPMQCSALRKNGFVVLKGRPCKIVEMSTSKTGKHGHAKVHLVGIDIFTGKKYEDICPSTHNMDVPNIKRNDFQLIGIQDGYLSLLQDSGEVREDLRLPEGDLGKEIEQKYDCGEEILITVLSAMTEEAAVAIKAMAKITGSQGGGGGSSDPLNLQRPPPRAWPGSGPVLSWTPWCLWPPWCLWPPWCLW

SEQ ID NO: 756900 - protein, 216 aa, Homo sapiens; identical to SEQ ID NO: 756898

SEQ ID NO: 756901 - protein, 91 aa, Homo sapiens
VVGDGEKGTAWHRSRGRCSVGDGSMQLGTGTGRDEDDGKVEQKYDCGEEILITVLSAMTEEAAVAIKAMAKITGSQGSGPVLSWTPPTQFI

SEQ ID NO: 756902 - protein, 132 aa, Homo sapiens
MADDLDFETGDAGASATFPMQCSALRKNGFVVLKGRPCKIVEMSTSKTGKHGHAKVHLVGIDIFTGKKYEDICPSTHNMDVPNIKRNDFQLIGIQDGYLSLLQDSGEVREDLRLPEGDLGKEMMTPPTHFFL

SEQ ID NO: 756903 - protein, 334 aa, Homo sapiens
MATRQRESSITSCCSTSSCDADDEGVRGTCEDASLCKRFAVSIGYWHDPYIQHFVRLSKERKAPEINRGYFARVHGVSQLIKAFLRKTECHCQIVNLGAGMDTTFWRLKDEDLLPSKYFEVDFPMIVTRKLHSIKCKPPLSSPILELHSEDTLQMDGHILDSKRYAVIGADLRDLSELEEKLKKCNMNTQLPTLLIAECVLVYMTPEQSANLLKWAANSFERAMFINYEQVNMGDRFGQIMIENLRRRQCDLAGVETCKSLESQKERLLSNGWETASAVDMMELYNRLPRAEVSRIESLEFLDEMELLEQLMRHYCLCWATKGGNELGLKEITY

SEQ ID NO: 756904 - protein, 186 aa, Homo sapiens
GRVGRPTHGHILDSKRYAVIGADLRDLSELEEKLKKCNMNTQLPTLLIAECVLVYMTPEQSANLLKWAANSFERAMFINYEQVNMGDRFGQIMIENLRRRQCDLAGVETCKSLESQKERLLSNGWETASAVDMMELYNRLPRAEVSRIESLEFLDEMELLEQLMRHYCLCWATKGGNELGLKEITY

SEQ ID NO: 756905 - protein, 334 aa, Homo sapiens; identical to SEQ ID NO: 756903

SEQ ID NO: 756906 - protein, 357 aa, Homo sapiens
MLPCARELPSAAPDSTLLLTAQHWVANLFILATLIGWTVRSFFLGRMETCCSHLGLRSGRRFAVSIGYWHDPYIQHFVRLSKERKAPEINRGYFARVHGVSQLIKAFLRKTECHCQIVNLGAGMDTTFWRLKDEDLLPSKYFEVDFPMIVTRKLHSIKCKPPLSSPILELHSEDTLQMDGHILDSKRYAVIGADLRDLSELEEKLKKCNMNTQLPTLLIAECVLVYMTPEQSANLLKWAANSFERAMFINYEQVNMGDRFGQIMIENLRRRQCDLAGVETCKSLESQKERLLSNGWETASAVDMMELYNRLPRAEVSRIESLEFLDEMELLEQLMRHYCLCWATKGGNELGLKEITY

SEQ ID NO: 756907 - protein, 427 aa, Homo sapiens
LGTRLGLNRPRLWLAPSPAARRPRFHVPGGHSSQEPPRPWPLGRGNPLSPPAVPPRAATQTTRACAAPAKMLPCARELPSAAPDSTLLLTAQHWVANLFILATLIGWTVRSFFLGRMETCCSHLGLRSGRRFAVSIGYWHDPYIQHFVRLSKERKAPEINRGYFARVHGVSQLIKAFLRKTECHCQIVNLGAGMDTTFWRLKDEDLLPSKYFEVDFPMIVTRKLHSIKCKPPLSSPILELHSEDTLQMDGHILDSKRYAVIGADLRDLSELEEKLKKCNMNTQLPTLLIAECVLVYMTPEQSANLLKWAANSFERAMFINYEQVNMGDRFGQIMIENLRRRQCDLAGVETCKSLESQKERLLSNGWETASAVDMMELYNRLPRAEVSRIESLEFLDEMELLEQLMRHYCLCWATKGGNELGLKEITY

SEQ ID NO: 756908 - protein, 234 aa, Homo sapiens
MDTTFWRLKDEDLLPSKYFEVDFPMIVTRKLHSIKCKPPLSSPILELHSEDTLQMDGHILDSKRYAVIGADLRDLSELEEKLKKCNMNTQLPTLLIAECVLVYMTPEQSANLLKWAANSFERAMFINYEQVNMGDRFGQIMIENLRRRQCDLAGVETCKSLESQKERLLSNGWETASAVDMMELYNRLPRAEVSRIESLEFLDEMELLEQLMRHYCLCWATKGGNELGLKEITY

SEQ ID NO: 756909 - protein, 279 aa, Homo sapiens
MATRQRESSITSCCSTSSCDADDEGVRGTCEDASLCKRFAVSIGYWHDPYIQHFVRLSKERKAPEINRGYFARVHGVSQLIKAFLRKTECHCQIVNLGAGMDTTFWRLKDEDLLPSKYFEVDFPMIVTRKLHSIKLPTLLIAECVLVYMTPEQSANLLKWAANSFERAMFINYEQVNMGDRFGQIMIENLRRRQCDLAGVETCKSLESQKERLLSNGWETASAVDMMELYNRLPRAEVSRIESLEFLDEMELLEQLMRHYCLCWATKGGNELGLKEITY

SEQ ID NO: 756910 - protein, 207 aa, Homo sapiens
SSFPSSHRCKPPLSSPILELHSEDTLQMDGHILDSKRYAVIGADLRDLSELEEKLKKCNMNTQLPTLLIAECVLVYMTPEQSANLLKWAANSFERAMFINYEQVNMGDRFGQIMIENLRRRQCDLAGVETCKSLESQKERLLSNGWETASAVDMMELYNRLPRAEVSRIESLEFLDEMELLEQLMRHYCLCWATKGGNELGLKEITY

SEQ ID NO: 756911 - protein, 334 aa, Homo sapiens; identical to SEQ ID NO: 756903

SEQ ID NO: 756912 - protein, 334 aa, Homo sapiens; identical to SEQ ID NO: 756903

SEQ ID NO: 756913 - protein, 334 aa, Homo sapiens; identical to SEQ ID NO: 756903

SEQ ID NO: 756914 - protein, 148 aa, Homo sapiens [sequence omitted]

SEQ ID NO: 756915 - protein, 227 aa, Homo sapiens
MATRQRESSITSCCSTSSCDADDEGVRGTCEDASLCKRFAVSIGYWHDPYIQHFVRLSKERKAPEINRGYFARVHGVSQLIKALPTLLIAECVLVYMTPEQSANLLKWAANSFERAMFINYEQVNMGDRFGQIMIENLRRRQCDLAGVETCKSLESQKERLLSNGWETASAVDMMELYNRLPRAEVSRIESLEFLDEMELLEQLMRHYCLCWATKGGNELGLKEITY

SEQ ID NO: 756916 - protein, 268 aa, Homo sapiens
MATRQRESSITSCCSTSSCDADDEGVRGTCEDASLCKRFAVSIGYWHDPYIQHFVRLSKERKAPEINRGYFARVHGVSQLIKAFLRKTECHCQIVNLGAGMDTTFWRLKDEDLLPSKYFEVDFPMIVTRKLHSIKCKPPLSSPILELHSEDTLQMDGHILDSKRYAVIGADLRDLSELEEKLKKCNMNTQLPTLLIAECVLVYMTPEQSANLLKWAANSFERAMFINYEQVNMGDRFGQIMIENLRRRQCDLAGVETCKSLESQDRIT

SEQ ID NO: 756917 - protein, 358 aa, Homo sapiens
MATRQRESSITSCCSTSSCDADDEGVRGTCEDASLCKRFAVSIGYWHDPYIQHFVRLSKERKAPEINRGYFARVHGVSQLIKAFLRKTECHCQIVNLGAGMDTTFWRLKDEDLLPSKYFEVDFPMIVTRKLHSIKCKPPLSSPILELHSEDTLQMDGHILDSKRYAVIGADLRDLSELEEKLKKCNMNTQLPTLLIAECVLVYMTPEQSANLLKWAANSFERAMFINYEQVNMGDRFGQIMIENLRRRQCDLAGVETCKSLESQKERLLSNGWETASAVDMMELYNRLPRAEVSRAEGDNLLICRRLMPSQKPKPLALLEETCKLPERWAGLVRRSHPTLLRSLGHYSGRTCSSSCSC

SEQ ID NO: 756918 - protein, 334 aa, Homo sapiens; identical to SEQ ID NO: 756903

SEQ ID NO: 756919 - protein, 314 aa, Homo sapiens
MATRQRESSITSCCSTSSCDADDEGVRGTCEDASLCKRFAVSIGYWHDPYIQHFVRLSKERKAPEINRGYFARVHGVSQLIKAFLRKTECHCQIVNLGAGMDTTFWRLKDEDLLPSKYFEVDFPMIVTRKLHSIKCKPPLSSPILELHSEDTLQMDGHILDSKRYAVIGADLRDLSELEEKLKKCNMNTQLPTLLIAECVLVYMTPEQSANLLKWAANSFERAMFINYEQVNMGDRFGQIMIENKERLLSNGWETASAVDMMELYNRLPRAEVSRIESLEFLDEMELLEQLMRHYCLCWATKGGNELGLKEITY

SEQ ID NO: 756920 - protein, 135 aa, Homo sapiens
MATRQRESSITSCCSTSSCDADDEGVRGTCEDASLCKRFAVSIGYWHDPYIQHFVRLSKERKAPEINRGYFARVHGVSQLIKAFLRKTECHCQIVNLGAGMDTTFWRLKDEDLLPSKYFEVDFPMIVTRKLHSIK

SEQ ID NO: 756921 - protein, 121 aa, Homo sapiens
MASPDRSKRKILKAKKTMPLSCRKQVEMLNKSRNVEALKTAIGSNVPSGNQSFSPSVITRTTEITKCSPSENGASSLDSNKNSISEKSKVFSQNCIKPVEEIVHSETKLEQVVCSYQKPSR

SEQ ID NO: 756922 - protein, 76 aa, Homo sapiens
  misc_feature (7)..(7): Xaa can be any naturally occurring amino acid
  misc_feature (10)..(10): Xaa can be any naturally occurring amino acid
  misc_feature (18)..(18): Xaa can be any naturally occurring amino acid
  misc_feature (36)..(36): Xaa can be any naturally occurring amino acid
KKVVDLXDIXQIPLCPRXPLDVCLKAHWLSIEGFQXAKADLLLSTQPGREEGSPLELERLKLEPHEGLLLRFPYAA

SEQ ID NO: 756923 - protein, 267 aa, Homo sapiens
LQDLMETRLSDQRSKERSLLHGDFHAFSAGPGLFSYIRHWDQNERFLVVLNFGDVGLSAGLQASDLPASASLPAKADLLLSTQPGLVEAPVMLWDESSFPDIPGAVSANMTVKGQSEDPGSLLSLFRRLSDQRSKERSLLHGDFHAFSAGPGLFSSDLQQILSLLESNKDLLLTSSYLSDSGSTGEHTKSLVTQYLNATGNRWCSWSLSQARLLTSFLPAQLLRLYQLMLFTLPGTPVFSYGDEIGLDAAALPGQAVRRAPLLSWNA

SEQ ID NO: 756924 - protein, 229 aa, Homo sapiens
MSQDTEVDMKEVELNELEPEKQPMNAASGAAMSLAGAEKNGLVKIKVAEDEAEAAAAAKFTGLSKEELLKVAGSPGWVRTRWALLLLFWLGWLGMLAGAVVIIVRAPRCRELPAQKWWHTGALYRIGDLQAFQGHGAGNLAGLKGRLDYLSSLKVKGLVLGPIHKNQKDDVAQTDLLADRPQFWLQGKILTVSCNRLKKRASVSFWTLLPTTGVRTRGSPLRLTLWPPR

SEQ ID NO: 756925 - protein, 229 aa, Homo sapiens; identical to SEQ ID NO: 756924

SEQ ID NO: 756926 - protein, 229 aa, Homo sapiens; identical to SEQ ID NO: 756924

SEQ ID NO: 756927 - protein, 229 aa, Homo sapiens; identical to SEQ ID NO: 756924

SEQ ID NO: 756928 - protein, 229 aa, Homo sapiens; identical to SEQ ID NO: 756924

SEQ ID NO: 756929 - protein, 229 aa, Homo sapiens; identical to SEQ ID NO: 756924

SEQ ID NO: 756930 - protein, 299 aa, Homo sapiens
MELQPPEASIAVVSIPRQLPGSHSEAGVQGLSAGDDSETGSDCVTQAGLQLLASSDPPALASKNAEVTGTMSQDTEVDMKEVELNELEPEKQPMNAASGAAMSLAGAEKNGLVKIKVAEDEAEAAAAAKFTGLSKEELLKVAGSPGWVRTRWALLLLFWLGWLGMLAGAVVIIVRAPRCRELPAQKWWHTGALYRIGDLQAFQGHGAGNLAGLKGRLDYLSSLKVKGLVLGPIHKNQKDDVAQTDLLADRPQFWLQGKILTVSCNRLKKRASVSFWTLLPTTGVRTRGSPLRLTLWPPR

SEQ ID NO: 756931 - protein, 330 aa, Homo sapiens
MELQPPEASIAVVSIPRQLPGSHSEAGVQGLSAGDDSELGSHCVAQTGLELLASGDPLPSASQNAEMIETGSDCVTQAGLQLLASSDPPALASKNAEVTGTMSQDTEVDMKEVELNELEPEKQPMNAASGAAMSLAGAEKNGLVKIKVAEDEAEAAAAAKFTGLSKEELLKVAGSPGWVRTRWALLLLFWLGWLGMLAGAVVIIVRAPRCRELPAQKWWHTGALYRIGDLQAFQGHGAGNLAGLKGRLDYLSSLKVKGLVLGPIHKNQKDDVAQTDLLADRPQFWLQGKILTVSCNRLKKRASVSFWTLLPTTGVRTRGSPLRLTLWPPR

SEQ ID NO: 756932 - protein, 362 aa, Homo sapiens
MELQPPEASIAVVSIPRQLPGSHSEAGVQGLSAGDDSELGSHCVAQTGLELLASGDPLPSASQNAEMIETGSDCVTQAGLQLLASSDPPALASKNAEVTVETGFHHVSQADIEFLTSIDPTASASGSAGITGTMSQDTEVDMKEVELNELEPEKQPMNAASGAAMSLAGAEKNGLVKIKVAEDEAEAAAAAKFTGLSKEELLKVAGSPGWVRTRWALLLLFWLGWLGMLAGAVVIIVRAPRCRELPAQKWWHTGALYRIGDLQAFQGHGAGNLAGLKGRLDYLSSLKVKGLVLGPIHKNQKDDVAQTDLLADRPQFWLQGKILTVSCNRLKKRASVSFWTLLPTTGVRTRGSPLRLTLWPPR

SEQ ID NO: 756933 - protein, 292 aa, Homo sapiens
MELQPPEASIAVVSIPRQLPGSHSEAGVQGLSAGDDSGTGSRAKLGRRSPLVGPFRESMSGRTMSQDTEVDMKEVELNELEPEKQPMNAASGAAMSLAGAEKNGLVKIKVAEDEAEAAAAAKFTGLSKEELLKVAGSPGWVRTRWALLLLFWLGWLGMLAGAVVIIVRAPRCRELPAQKWWHTGALYRIGDLQAFQGHGAGNLAGLKGRLDYLSSLKVKGLVLGPIHKNQKDDVAQTDLLADRPQFWLQGKILTVSCNRLKKRASVSFWTLLPTTGVRTRGSPLRLTLWPPR

SEQ ID NO: 756934 - protein, 229 aa, Homo sapiens; identical to SEQ ID NO: 756924

SEQ ID NO: 756935 - protein, 277 aa, Homo sapiens
MELQPPEASIAVVSIPRQLPGSHSEAGVQGLSAGDDSGTMSQDTEVDMKEVELNELEPEKQPMNAASGAAMSLAGAEKNGLVKINFPPKKKGGGVAEDEAEAAAAAKFTGLSKEELLKVAGSPGWVRTRWALLLLFWLGWLGMLAGAVVIIVRAPRCRELPAQKWWHTGALYRIGDLQAFQGHGAGNLAGLKGRLDYLSSLKVKGLVLGPIHKNQKDDVAQTDLLADRPQFWLQGKILTVSCNRLKKRASVSFWTLLPTTGVRTRGSPLRLTLWPPR

SEQ ID NO: 756936 - protein, 229 aa, Homo sapiens; identical to SEQ ID NO: 756924

SEQ ID NO: 756937 - protein, 108 aa, Homo sapiens
MPLAIAGAAESLSQARLLTSFLPAQLLRLYQLMLFTLPGTPVFSYGDEIGLDAAALPGQPMEAPVMLWDESSFPDIPGAVSANMTVKGQSEDPGSLLSLFRRLSDQRK

SEQ ID NO: 756938 - protein, 229 aa, Homo sapiens; identical to SEQ ID NO: 756924

SEQ ID NO: 756939 - protein, 229 aa, Homo sapiens; identical to SEQ ID NO: 756924

SEQ ID NO: 756940 - protein, 229 aa, Homo sapiens; identical to SEQ ID NO: 756924

SEQ ID NO: 756941 - protein, 227 aa, Homo sapiens
MSQDTEVDMKEVELNELEPEKQPMNAASGAAMSLAGAEKNGLVKIKVAEDEAEAAAAAKFTGLSKEELLKVAGSPGWVRTRWALLLLFWLGWLGMLAGAVVIIVRAPRCRELPAQKWWHTGALYRIGDLQAFQGHGAGNLAGLKGRLDYLSSLKVKGLVLGPIHKNQKDDVAQTDLLADRPQFWLQGKILTVSCNRLKKRKKQSRCQFLGPLTPQTYPGVEENSLGF

SEQ ID NO: 756942 - protein, 291 aa, Homo sapiens
MELQPPEASIAVVSIPRQLPGSHSEAGVQGLSAGDDSETGSDCVTQAGLQLLASSDPPALASKNAEVTGTMSQDTEVDMKEVELNELEPEKQPMNAASGAAMSLAGAEKNGLVKIKVAEDEAEAAAAAKFTGLSKEELLKVAGSPGWVRTRWALLLLFWLGWLGMLAGAVVIIVRAPRCRELPAQKWWHTGALYRIGDLQAFQGHGAGNLAGLKGRLDYLSSLKVKGLVLGPIHKNQKDDVAQTDLLADRPQFWLQGKILTVSCNRLKKRSGYPGVPKETARKDLARGKVG

SEQ ID NO: 756943 - protein, 229 aa, Homo sapiens; identical to SEQ ID NO: 756924

SEQ ID NO: 756944 - protein, 229 aa, Homo sapiens; identical to SEQ ID NO: 756924

SEQ ID NO: 756945 - protein, 330 aa, Homo sapiens; identical to SEQ ID NO: 756931

SEQ ID NO: 756946 - protein, 229 aa, Homo sapiens; identical to SEQ ID NO: 756924

SEQ ID NO: 756947 - protein, 229 aa, Homo sapiens; identical to SEQ ID NO: 756924

SEQ ID NO: 756948 - protein, 268 aa, Homo sapiens
MELQPPEASIAVVSIPRQLPGSHSEAGVQGLSAGDDSGTMSQDTEVDMKEVELNELEPEKQPMNAASGAAMSLAGAEKNGLVKIKVAEDEAEAAAAAKFTGLSKEELLKVAGSPGWVRTRWALLLLFWLGWLGMLAGAVVIIVRAPRCRELPAQKWWHTGALYRIGDLQAFQGHGAGNLAGLKGRLDYLSSLKVKGLVLGPIHKNQKDDVAQTDLLADRPQFWLQGKILTVSCNRLKKRASVSFWTLLPTTGVRTRGSPLRLTLWPPR

SEQ ID NO: 756949 - protein, 442 aa, Homo sapiens
MSQDTEVDMKEVELNELEPEKQPMNAASGAAMSLAGAEKNGLVKIKVAEDEAEAAAAAKFTGLSKEELLKVAGSPGWVRTRWALLLLFWLGWLGMLAGAVVIIVRAPRCRELPAQKWWHTGALYRIGDLQAFQGHGAGNLAGLKGRLDYLSSLKVKGLVLGPIHKNQKDDVAQTDLLADRPQFWLQGKILTVSCNRLKKRTSMIASSSVVLGIRVILDLTPNYRGENSWFSTQVDTVATKVKDALEFWLQAGVDGFQVRDIENLKDASSFLAEWQNITKGFSEDRLLIAGTNSSDLQQILSLLESNKDLLLTSSYLSDSGSTGEHTKSLVTQYLNATGNRWCSWSLSQARLLTSFLPAQLLRLYQLMLFTLPGTPVFSYGDEIGLDAAALPGQPMEAPVMLWDESSFPDIPGAVSANMTVKGQSEDPGSLLSLFRRLSDQRK

SEQ ID NO: 756950 - protein, 229 aa, Homo sapiens; identical to SEQ ID NO: 756924

SEQ ID NO: 756951 - protein, 107 aa, Homo sapiens
MSQDTEVDMKEVELNELEPEKQPMNAASGAAMSLAGAEKNGLVKIKVAEDEAEAAAAAKFTGLSKEELLFSATGMRLAWMQLPFLDSLWRLQSCCGMSPASLTSQGL

SEQ ID NO: 756952 - protein, 229 aa, Homo sapiens; identical to SEQ ID NO: 756924

SEQ ID NO: 756953 - protein, 229 aa, Homo sapiens; identical to SEQ ID NO: 756924

SEQ ID NO: 756954 - protein, 221 aa, Homo sapiens
MSQDTEVDMKEVELNELEPEKQPMNAASGAAMSLAGAEKNGLVKIKVAEDEAEAAAAAKFTGLSKEELLKVAGSPGWVRTRWALLLLFWLGWLGMLAGAVVIIVRAPRCRELPAQKWWHTGALYRIGDLQAFQGHGAGNLAGLKGRLDYLSSLKVKGLVLGPIHKNQKDDVAQTDLLADRPQFWLQGKILTVSCNRLKKRSGYPGVPKETARKDLARGKVG

SEQ ID NO: 756955 - protein, 106 aa, Homo sapiens
MSVKGGGDFKQGDQEDLVDNFGSEHTPSGCRIVSPLLPLFGTSSLQRDLVYRQWNFPDATQYVTLQQIEEANMRIISSMESETQFAKMKNNVTLLTILFGYTIMFN

SEQ ID NO: 756956 - protein, 230 aa, Homo sapiens
LPAPPLVSSKMASGGSGGVSVPALWSEVNRYGQNGDFTRALKTVNKILQINKDDVTALHCKVVCLIQNGSFKEALNVINTHTKVLANNSLSFEKAYCEYRLNRIENALKTIESANQQTDKLKELYGQVLYRLERYDECLAVYRDLVRNSQDDYDEERKTNLSAVVAAQSNWEKVVPENLGLQEGTHELCYNTACALIGQGQLNQAMKILQKAEGWKFVKLICKYNVHITL

SEQ ID NO: 756957 - protein, 681 aa, Homo sapiens
LPAPPLVSSKMASGGSGGVSVPALWSEVNRYGQNGDFTRALKTVNKILQINKDDVTALHCKVVCLIQNGSFKEALNVINTHTKVLANNSLSFEKAYCEYRLNRIENALKTIESANQQTDKLKELYGQVLYRLERYDECLAVYRDLVRNSQDDYDEERKTNLSAVVAAQSNWEKVVPENLGLQEGTHELCYNTACALIGQGQLNQAMKILQKAEDLCRRSLSEDTDGTEEDPQAELAIIHGQMAYILQLQGRTEEALQLYNQIIKLKPTDVGLLAVIANNIITINKDQNVFDSKKKVKLTNAEGVEFKLSKKQLQAIEFNKALLAMYTNQAEQCRKISASLQSQSPEHLLPVLIQAAQLCREKQHTKAIELLQEFSDQHPENAAEIKLTMAQLKISQGNISKACLILRSIEELKHKPGMVSALVTMYSHEEDIDSAIEVFTQAIQWYQNHQPKSPAHLSLIREAANFKLKYGRKKEAISDLQQLWKQNPKDIHTLAQLISAYSLVDPEKAKALSKHLPSSDSMSLKVDVEALENSAGATYIRKKGGKVTGDSQPKEQGQGDLKKKKKKKKGKLPKNYDPKVTPDPERWLPMRERSYYRGRKKGKKKDQIGKGTQGATAGASSELDASKTVSSPPTSPRPGSAATVSASTSNIIPPRHQKPAGAPATKKKQQQKKKKGGKGGW

SEQ ID NO: 756958 - protein, 681 aa, Homo sapiens; identical to SEQ ID NO: 756957

SEQ ID NO: 756959 - protein, 681 aa, Homo sapiens; identical to SEQ ID NO: 756957

SEQ ID NO: 756960 - protein, 681 aa, Homo sapiens; identical to SEQ ID NO: 756957

SEQ ID NO: 756961 - protein, 230 aa, Homo sapiens; identical to SEQ ID NO: 756956

SEQ ID NO: 756962 - protein, 415 aa, Homo sapiens
RTRGSTHASGPTRPITINKDQNVFDSKKKVKLTNAEGVEFKLSKKQLQAIEFNKALLAMYTNQAEQCRKISASLQSQSPEHLLPVLIQAAQLCREKQHTKAIELLQEFSDQHPENAAEIKLTMAQLKISQGNISKACLILRSIEELKHKPGMVSALVTMYSHEEDIDSAIEVFTQAIQWYQNHQPKSPAHLSLIREAANFKLKYGRKKEAISDLQQLWKQNPKDIHTLAQLISAYSLVDPEKAKALSKHLPSSDSMSLKVDVEALENSAGATYIRKKGGKVTGDSQPKEQGQGDLKKKKKKKKGKLPKNYDPKVTPDPERWLPMRERSYYRGRKKGKKKDQIGKGTQGATAGASSELDASKTVSSPPTSPRPGSAATVSASTSNIIPPRHQKPAGAPATKKKQQQKKKKGGKGGW

SEQ ID NO: 756963 - protein, 656 aa, Homo sapiens
LPAPPLVSSKMASGGSGGVSVPALWSEVNRYGQNGDFTRALKTVNKILQINKDDVTALHCKVVCLIQNGSFKEALNVINTHTKVLANNSLSFEKAYCEYRLNRIENALKTIESANQQTDKLKELYGQVLYRLERYDECLAVYRDLVRNSQDDYDEERKTNLSAVVAAQSNWEKVVPENLGLQEGTHELCYNTACALIGQGQLNQAMKILQKAEDLCRRSLSEDTDGTEEDPQAELAIIHGQMAYILQLQGRTEEALQLYNQIIKLKPTDVGLLAVIANNIITINKDQNVFDSKKKVKLTNAEGVEFKLSKKQLQAIEFNKALLAMYTNQAEQCRKISASLQSQSPEHLLPVLIQAAQLCREKQHTKAIELLQEFSDQHPENAAEIKLTMAQLKISQGNISKACLILRSIEELKHKPGMVSALVTMYSHEEDIDSAIEVFTQAIQWYQNHQPKSPAHLSLIREAANFKLKYGRKKEAISDLQQLWKQNPKDIHTLAQLISAYSLVDPEKAKALSKHLPSSDSMSLKVDVEALENSAGATYIRKKGGKVTGDSQPKEQGQGDLKKKKKKKKGKLPKNYDPKVTPDPERWLPMRERSYYRGRKKGKKKDQIGKGTQGATAGASSELDASKTVSSPHPPPIWTAKFSGLPRDIIENYLYE

SEQ ID NO: 756964 - protein, 647 aa, Homo sapiens
LPAPPLVSSKMASGGSGGVSVPALWSEVNRYGQNGDFTRALKTVNKILQINKDDVTALHCKVVCLIQNGSFKEALNVINTHTKVLANNSLSFEKAYCEYRLNRIENALKTIESANQQTDKLKELYGQVLYRLERYDECLAVYRDLVRNSQDDYDEERKTNLSAVVAAQSNWEKVVPENLGLQEGTHELCYNTACALIGQGQLNQAMKILQKAEDLCRRSLSEDTDGTEEDPQAELAIIHGQMAYILQLQGRTEEALQLYNQIIKLKPTDVGLLAVIANNIITINKDQNVFDSKKKVKLTNAEGVEFKLSKKQLQAIEFNKALLAMYTNQAEQCRKISASLQSQSPEHLLPVLIQAAQLCREKQHTKAIELLQEFSDQHPENAAEIKLTMAQLKISQGNISKACLILRSIEELKHKPGMVSALVTMYSHEEDIDSAIEVFTQAIQWYQNHQPKSPAHLSLIREAANFKLKYGRKKEAISDLQQLWKQNPKDIHTLAQLISAYSLVDPEKAKALSKHLPSSDSMSLKVDVEALENSAGATYIRKKGGKVTGDSQPKEQGQGDLKKKKKKKKGKLPKNYDPKVTPDPERWLPMRERSYYRGRKKGKKKDQIGKGTQGATAGASSELDASKTVSSPPTSPRATKLRSCRVT

SEQ ID NO: 756965 - protein, 257 aa, Homo sapiens [sequence omitted]

SEQ ID NO: 756966 - protein, 264 aa, Homo sapiens [sequence omitted]

SEQ ID NO: 756967 - protein, 557 aa, Homo sapiens
LPAPPLVSSKMASGGSGGVSVPALWSEVNRYGQNGDFTRALKTVNKILQINKDDVTALHCKVVCLIQNGSFKEALNVINTHTKVLANNSLSFEKAYCEYRLNRIENALKTIESANQQTDKLKELYGQVLYRLERYDECLAVYRDLVRNSQDDYDEERKTNLSAVVAAQSNWEKVVPENLGLQEGTHELCYNTACALIGQGQLNQAMKILQKAEDLCRRSLSEDTDGTEEDPQAELAIIHGQMAYILQLQGRTEEALQLYNQIIKLKPTDVGLLAVIANNIITINKDQNVFDSKKKVKLTNAEGVEFKLSKKQLQAIEFNKALLAMYTNQAEQCRKISASLQSQSPEHLLPVLIQAAQLCREKQHTKAIELLQEFSDQHPENAAEIKLTMAQLKISQGNISKACLILRSIEELKHKPGMVSALVTMYSHEEDIDSAIEVFTQAIQWYQNHQPKSPAHLSLIREAANFKLKYGRKKEAISDLQQLWKQNPKDIHTLAQLISAYSLVDPEKAKALSKHLPSSDSMSLKVDVEALENSAGATYIRKKGGKVTGDSQPKEQG

SEQ ID NO: 756968 - protein, 244 aa, Homo sapiens
PKVLGLQYFNATTNAMPLDWIGLQAVRIEKIKYGRKKEAISDLQQLWKQNPKDIHTLAQLISAYSLVDPEKAKALSKHLPSSDSMSLKVDVEALENSAGATYIRKKGGKVTGDSQPKEQGQGDLKKKKKKKKGKLPKNYDPKVTPDPERWLPMRERSYYRGRKKGKKKDQIGKGTQGATAGASSELDASKTVSSPPTSPRPGSAATVSASTSNIIPPRHQKPAGAPATKKKQQQKKKKGGKGGW

SEQ ID NO: 756969 - protein, 441 aa, Homo sapiens
LPAPPLVSSKMASGGSGGVSVPALWSEVNRYGQNGDFTRALKTVNKILQINKDDVTALHCKVVCLIQNGSFKEALNVINTHTKVLANNSLSFEKAYCEYRLNRIENALKTIESANQQTDKLKELYGQVLYRLERYDECLAVYRDLVRNSQDDYDEERKTNLSAVVAAQSNWEKVVPENLGLQEGTHELCYNTACALIGQGQLNQAMKILQKAEDLCRRSLSEDTDGTEEDPQAELAIIHGQMAYILQLQGRTEEALQLYNQIIKLKPTDVGLLAVIANNIITINKDQNVFDSKKKVKLTNAEGVEFKLSKKQLQAIEFNKALLAMYTNQAEQCRKISASLQSQSPEHLLPVLIQAAQLCREKQHTKAIELLQEFSDQHPENAAEIKLTMAQLKISQGNISKACLILRSIEELKHKPGMVSALVTMYSHQLLQFVCASITPV

SEQ ID NO: 756970 - protein, 223 aa, Homo sapiens
LPAPPLVSSKMASGGSGGVSVPALWSEVNRYGQNGDFTRALKTVNKILQINKDDVTALHCKVVCLIQNGSFKEALNVINTHTKVLANNSLSFEKAYCEYRLNRIENALKTIESANQQTDKLKELYGQVLYRLERYDECLAVYRDLVRNSQDDYDEERKTNLSAVVAAQSNWEKVVPENLGLQEGTHELCYNTACALIGQGQLNQAMKILQKAEDLAAVHYQTH

SEQ ID NO: 756971 - protein, 124 aa, Homo sapiens
MTHLSFLYNRYAGKLPKNYDPKVTPDPERWLPMRERSYYRGRKKGKKKDQIGKGTQGATAGASSELDASKTVSSPPTSPRPGSAATVSASTSNIIPPRHQKPAGAPATKKKQQQKKKKGGKGGW

SEQ ID NO: 756972 - protein, 107 aa, Homo sapiens
MAQLKISQGNISKACLILRSIEELKHKPGMVSALVTMYSHEEDIDSAIEVFTQAIQWYQNHQPKSPAHLSLIREAANFKLKYGRKKEAISVPRQQRYQPPTDILIVV

SEQ ID NO: 756973 - protein, 681 aa, Homo sapiens; identical to SEQ ID NO: 756957

SEQ ID NO: 756974 - protein, 683 aa, Homo sapiens
KDTPPPTIIKKKMASGGSGGVSVPALWSEVNRYGQNGDFTRALKTVNKILQINKDDVTALHCKVVCLIQNGSFKEALNVINTHTKVLANNSLSFEKAYCEYRLNRIENALKTIESANQQTDKLKELYGQVLYRLERYDECLAVYRDLVRNSQDDYDEERKTNLSAVVAAQSNWEKVVPENLGLQEGTHELCYNTACALIGQGQLNQAMKILQKAEDLCRRSLSEDTDGTEEDPQAELAIIHGQMAYILQLQGRTEEALQLYNQIIKLKPTDVGLLAVIANNIITINKDQNVFDSKKKVKLTNAEGVEFKLSKKQLQAIEFNKALLAMYTNQAEQCRKISASLQSQSPEHLLPVLIQAAQLCREKQHTKAIELLQEFSDQHPENAAEIKLTMAQLKISQGNISKACLILRSIEELKHKPGMVSALVTMYSHEEDIDSAIEVFTQAIQWYQNHQPKSPAHLSLIREAANFKLKYGRKKEAISDLQQLWKQNPKDIHTLAQLISAYSLVDPEKAKALSKHLPSSDSMSLKVDVEALENSAGATYIRKKGGKVTGDSQPKEQGQGDLKKKKKKKKGKLPKNYDPKVTPDPERWLPMRERSYYRGRKKGKKKDQIGKGTQGATAGASSELDASKTVSSPPTSPRPGSAATVSASTSNIIPPRHQKPAGAPATKKKQQQKKKKGGKGGW

SEQ ID NO: 756975 - protein, 681 aa, Homo sapiens; identical to SEQ ID NO: 756957

SEQ ID NO: 756976 - protein, 682 aa, Homo sapiens
LPAPPLVSSKMASGGSGGVSVPALWSEVNRYGQNGDFTRALKTVNKILQINKDDVTALHCKVVCLIQNGSFKEALNVINTHTKVLANNSLSFEKAYCEYRLNRIENALKTIESANQQTDKLKELYGQVLYRLERYDECLAVYRDLVRNSQDDYDEERKTNLSAVVAAQSNWEKVVPENLGLQEGTHELCYNTACALIGQGQLNQAMKILQKAEDLCRRSLSEDTDGTEEDPQAELAIIHGQMAYILQLQGRTEEALQLYNQIIKLKPTDVGLLAVIANNIITINKDQNVFDSKKKVKLTNAEGVEFKLSKKQLQAIEFNKALLAMYTNQAEQCRKISASLQSQSPEHLLPVLIQAAQLCREKQHTKAIELLQEFSDQHPENAAEIKLTMAQLKISQGNISKACLILRSIEELKHKPGMVSALVTMYSHEEDIDSAIEVFTQAIQWYQNHQPKSPAHLSLIREAANFKLKYGRKKEAISDLQQLWKQNPKDIHTLAQLISAYSLVDPEKAKALSKHLPSSDSMSLKVDVEALENSAGATYIRKKGGKVTGDSQPKEQGQGDLKKKKKKKKGKLPKNYDPKVTPDPERWLPMRERSYYRGRKKGKKKDQIGKGTQGATAGASSELDASKTVSSPPTSPRPGSAATVSASTSNIIPPRHQKPAGAPATKKKQQQKKKKVSVTLGI

SEQ ID NO: 756977 - protein, 558 aa, Homo sapiens
LPAPPLVSSKMASGGSGGVSVPALWSEVNRYGQNGDFTRALKTVNKILQINKDDVTALHCKVVCLIQNGSFKEALNVINTHTKVLANNSLSFEKAYCEYRLNRIENALKTIESANQQTDKLKELYGQVLYRLERYDECLAVYRDLVRNSQDDYDEERKTNLSAVVAAQSNWEKVVPENLGLQEGTHELCYNTACALIGQGQLNQAMKILQKAEDLCRRSLSEDTDGTEEDPQAELAIIHGQMAYILQLQGRTEEALQLYNQIIKLKPTDVGLLAVIANNIITINKDQNVFDSKKKVKLTNAEGVEFKLSKKQLQAIEFNKALLAMYTNQAEQCRKISASLQSQSPEHLLPVLIQAAQLCREKQHTKAIELLQEFSDQHPENAAEIKLTMAQLKISQGNISKACLILRSIEELKHKPGMVSALVTMYSHEEDIDSAIEVFTQAIQWYQNHQPKSPAHLSLIREAANFKLKYGRKKEAISDLQQLWKQNPKDIHTLAQLISAYSLVDPEKAKALSKHLPSSDSMSLKVDVEALENSAGATYIRKKGGKVTGDSQPKEQGA

SEQ ID NO: 756978 - protein, 427 aa, Homo sapiens
HGGIHDASSGDCGVFAQVQCPEKTEGCHPHDHACLQELLSCQKPIEQEVGWRCQAKKQLQAIEFNKALLAMYTNQAEQCRKISASLQSQSPEHLLPVLIQAAQLCREKQHTKAIELLQEFSDQHPENAAEIKLTMAQLKISQGNISKACLILRSIEELKHKPGMVSALVTMYSHEEDIDSAIEVFTQAIQWYQNHQPKSPAHLSLIREAANFKLKYGRKKEAISDLQQLWKQNPKDIHTLAQLISAYSLVDPEKAKALSKHLPSSDSMSLKVDVEALENSAGATYIRKKGGKVTGDSQPKEQGQGDLKKKKKKKKGKLPKNYDPKVTPDPERWLPMRERSYYRGRKKGKKKDQIGKGTQGATAGASSELDASKTVSSPPTSPRPGSAATVSASTSNIIPPRHQKPAGAPATKKKQQQKKKKGGKGGW

SEQ ID NO: 756979 - protein, 412 aa, Homo sapiens
KLAAVQTANNIITINKDQNVFDSKKKVKLTNAEGVEFKLSKKQLQAIEFNKALLAMYTNQAEQCRKISASLQSQSPEHLLPVLIQAAQLCREKQHTKAIELLQEFSDQHPENAAEIKLTMAQLKISQGNISKACLILRSIEELKHKPGMVSALVTMYSHEEDIDSAIEVFTQAIQWYQNHQPKSPAHLSLIREAANFKLKYGRKKEAISDLQQLWKQNPKDIHTLAQLISAYSLVDPEKAKALSKHLPSSDSMSLKVDVEALENSAGATYIRKKGGKVTGDSQPKEQGQGDLKKKKKKKKGKLPKNYDPKVTPDPERWLPMRERSYYRGRKKGKKKDQIGKGTQGATAGASSELDASKTVSSPPTSPRPGSAATVSASTSNIIPPRHQKPAGAPATKKKQQQKKKKGGKGGW

SEQ ID NO: 756980 - protein, 293 aa, Homo sapiens [sequence omitted]

SEQ ID NO: 756981 - protein, 284 aa, Homo sapiens
VVFDVMSHIDDRKTLAHKPGMVSALVTMYSHEEDIDSAIEVFTQAIQWYQNHQPKSPAHLSLIREAANFKLKYGRKKEAISDLQQLWKQNPKDIHTLAQLISAYSLVDPEKAKALSKHLPSSDSMSLKVDVEALENSAGATYIRKKGGKVTGDSQPKEQGQGDLKKKKKKKKGKLPKNYDPKVTPDPERWLPMRERSYYRGRKKGKKKDQIGKGTQGATAGASSELDASKTVSSPPTSPRPGSAATVSASTSNIIPPRHQKPAGAPATKKKQQQKKKKGGKGGW

SEQ ID NO: 756982 - protein, 560 aa, Homo sapiens
LPAPPLVSSKMASGGSGGVSVPALWSEVNRYGQNGDFTRALKTVNKILQINKDDVTALHCKVVCLIQNGSFKEALNVINTHTKVLANNSLSFEKAYCEYRLNRIENALKTIESANQQTDKLKELYGQVLYRLERYDECLAVYRDLVRNSQDDYDEERKTNLSAVVAAQSNWEKVVPENLGLQEGTHELCYNTACALIGQGQLNQAMKILQKAEDLCRRSLSEDTDGTEEDPQAELAIIHGQMAYILQLQGRTEEALQLYNQIIKLKPTDVGLLAVIANNIITINKDQNVFDSKKKVKLTNAEGVEFKLSKKQLQAIEFNKALLAMYTNQAEQCRKISASLQSQSPEHLLPVLIQAAQLCREKQHTKAIELLQEFSDQHPENAAEIKLTMAQLKISQGNISKACLILRSIEELKHKPGMVSALVTMYSHEEDIDSAIEVFTQAIQWYQNHQPKSPAHLSLIREAANFKLKYGRKKEAISDLQQLWKQNPKDIHTLAQLISAYSLVDPEKAKALSKHLPSSDSMSLKVDVEALENSAGATYIRKKGGKVTGDSQPKEQGQGD

SEQ ID NO: 756983 - protein, 464 aa, Homo sapiens
LPAPPLVSSKMASGGSGGVSVPALWSEVNRYGQNGDFTRALKTVNKILQINKDDVTALHCKVVCLIQNGSFKEALNVINTHTKVLANNSLSFEKAYCEYRLNRIENALKTIESANQQTDKLKELYGQVLYRLERYDECLAVYRDLVRNSQDDYDEERKTNLSAVVAAQSNWEKVVPENLGLQEGTHELCYNTACALIGQGQLNQAMKILQKAEDLCRRSLSEDTDGTEEDPQAELAIIHGQMAYILQLQGRTEEALQLYNQIIKLKPTDVGLLAVIANNIITINKDQNVFDSKKKVKLTNAEGVEFKLSKKQLQAIEFNKALLAMYTNQAEQCRKISASLQSQSPEHLLPVLIQAAQLCREKQHTKAIELLQEFSDQHPENAAEIKLTMAQLKISQGNISKACLILRSIEELKHKPGMVSALVTMYSHEEDIDSAIEVFTQAIQWYQNHQPKSPALLSRTNEQV

SEQ ID NO: 756984 - protein, 102 aa, Homo sapiens
MDGPWFTKATGKKWLWTRGRKKGKKKDQIGKGTQGATAGASSELDASKTVSSPPTSPRPGSAATVSASTSNIIPPRHQKPAGAPATKKKQQQKKKKGGKGGW

SEQ ID NO: 756985 - protein, 230 aa, Homo sapiens; identical to SEQ ID NO: 756956

SEQ ID NO: 756986 - protein, 87 aa, Homo sapiens [sequence omitted]

SEQ ID NO: 756987 - protein, 490 aa, Homo sapiens
MDPAVALVLCLSCLFLLSLWRQSSGRGRLPSGPTPLPIIGNILQLDVKDMSKSLTNLSKIYGPVFTLYFGLERMVVLHGYEVVKEALIDLGEEFSGRGHFPLAERANRGFGIVFSNGKRWKEIRRFSLMTLRNFGMGKRSIEDRVQEEARCLVEELRKTKASPCDPTFILGCAPCNVICSIIFQKRFDYKDQQFLNLMEKLNENIRIVSTPWIQICNNFPTIIDYFPGTHNKLLKNLAFMESDILEKVKEHQESMDINNPRDFIDCFLIKMEKEKQNQQSEFTIENLVITAADLLGAGTETTSTTLRYALLLLLKHPEVTAKVQEEIERVVGRNRSPCMQDRGHMPYTDAVVHEVQRYIDLIPTSLPHAVTCDVKFRNYLIPKGTTILTSLTSVLHDNKEFPNPEMFDPRHFLDEGGNFKKSNYFMPFSAGKRICVGEGLARMELFLFLTFILQNFNLKSLIDPKDLDTTPVVNGFASVPPFYQLCFIPV

SEQ ID NO: 756988 - protein, 752 aa, Homo sapiens
SCRIRHENTGLGILFSNGKRWKEIRRFCLMTLRNFGMGKRSIEDRVQEEARCLVEELRKTNASPCDPTFILGCAPCNVICSVIFHDRFDYKDQRFLNLMEKFNENLRILSSSMDPGSHNKIAENFAYIKSYVLERIKEHQESLDMNSARDFIDCFLIKMEQEKHNQQSEFTVESLIATVTDMFGAGTETTSTTLRYGLLLLLKYPEVTAKVQEEIECVVGRNRSPCMQDRSHMPYTDAVVHEIQRYIDLLPTNLPHAVTCDVKFKNYLIPKGTTIITSLTSVLHNDKEFPNPEMFDPGHFLDKSGNFKKSDYFMPFSAALKNYGPVFTLYFGLERMVVLHGYEVVKEALIDLGEEFSGRGHFPLAERANRGFGIVFSNGKRWKEIRRFSLMTLRNFGMGKRSIEDRVQEEARCLVEELRKTKASPCDPTFILGCAPCNVICSIIFQKRFDYKDQQFLNLMEKLNENIRIVSTPWIQICNNFPTIIDYFPGTHNKLLKNLAFMESDILEKVKEHQESMDINNPRDFIDCFLIKMEKEKQNQQSEFTIENLVITAADLLGAGTETTSTTLRYALLLLLKHPEVTAKVQEEIERVVGRNRSPCMQDRGHMPYTDAVVHEVQRYIDLIPTSLPHAVTCDVKFRNYLIPKGTTILTSLTSVLHDNKEFPNPEMFDPRHFLDEGGNFKKSNYFMPFSAGKRICVGEGLARMELFLFLTFILQNFNLKSLIDPKDLDTTPVVNGFASVPPFYQLCFIPV

SEQ ID NO: 756989 - protein, 440 aa, Homo sapiens
MDPAVALVLCLSCLFLLSLWRQSSGRGRLPSGPTPLPIIGNILQLDVKDMSKSLTNFSKVYGPVFTVYFGLKPIVVLHGYEAVKEALIDHGEEFSGRGSFPVAEKVNKGLGILFSNGKRWKEIRRFCLMTLRNFGMGKRSIEDRVQEEARCLVEELRKTNASPCDPTFILGCAPCNVICSVIFHDRFDYKDQRFLNLMEKFNENLRILSSPWIQVCNNFPALIDYLPGSHNKIAENFAYIKSYVLERIKEHQESLDMNSARDFIDCFLIKMEQEKHNQQSEFTVESLIATVTDMFGAGTETTSTTLRYIDLLPTNLPHAVTCDVKFKNYLIPKGTTIITSLTSVLHNDKEFPNPEMFDPGHFLDKSGNFKKSDYFMPFSAGKRMCMGEGLARMELFLFLTTILQNFNLKSQVDPKDIDITPIANAFGRVPPLYQLCFIPV

SEQ ID NO: 756990 - protein, 490 aa, Homo sapiens
MDPAVALVLCLSCLFLLSLWRQSSGRGRLPSGPTPLPIIGNILQLDVKDMSKSLTNFSKVYGPVFTVYFGLKPIVVLHGYEAVKEALIDHGEEFSGRGSFPVAEKVNKGLGILFSNGKRWKEIRRFCLMTLRNFGMGKRSIEDRVQEEARCLVEELRKTNASPCDPTFILGCAPCNVICSVIFHDRFDYKDQRFLNLMEKFNENLRILSSPWIQVCNNFPALIDYLPGSHNKIAENFAYIKSYVLERIKEHQESLDMNSARDFIDCFLIKMEQEKHNQQSEFTVESLIATVTDMFGAGTETTSTTLRYGLLLLLKYPEVTAKVQEEIECVVGRNRSPCMQDRSHMPYTDAVVHEIQRYIDLLPTNLPHAVTCDVKFKNYLIPKGTTIITSLTSVLHNDKEFPNPEMFDPGHFLDKSGNFKKSDYFMPFSAGKRMCMGEGLARMELFLFLTTILQNFNLKSQVDPKDIDITPIANAFGRVPPLYQLCFIPV

SEQ ID NO: 756991 - protein, 864 aa, Homo sapiens
MDPAVALVLCLSCLFLLSLWRQSSGRGRLPSGPTPLPIIGNILQLDVKDMSKSLTNFSKVYGPVFTVYFGLKPIVVLHGYEAVKEALIDHGEEFSGRGSFPVAEKVNKGLGILFSNGKRWKEIRRFCLMTLRNFGMGKRSIEDRVQEEARCLVEELRKTNASPCDPTFILGCAPCNVICSVIFHDRFDYKDQRFLNLMEKFNENLRILSSPWIQVCNNFPALIDYLPGSHNKIAENFAYIKSYVLERIKEHQESLDMNSARDFIDCFLIKMEQEKHNQQSEFTVESLIATVTDMFGAGTETTSTTLRYGLLLLLKYPEVTAKVQEEIECVVGRNRSPCMQDRSHMPYTDAVVHEIQRYIDLLPTNLPHAVTCDVKFKNYLIPKGTTIITSLTSVLHNDKEFPNPEMFDPGHFLDKSGNFKKSDYFMPFSAAPKIYGPVFTLYFGLERMVVLHGYEVVKEALIDLGEEFSGRGHFPLAERANRGFGIVFSNGKRWKEIRRFSLMTLRNFGMGKRSIEDRVQEEARCLVEELRKTKASPCDPTFILGCAPCNVICSIIFQKRFDYKDQQFLNLMEKLNENIRIVSTPWIQICNNFPTIIDYFPGTHNKLLKNLAFMESDILEKVKEHQESMDINNPRDFIDCFLIKMEKEKQNQQSEFTIENLVITAADLLGAGTETTSTTLRYALLLLLKHPEVTAKVQEEIERVVGRNRSPCMQDRGHMPYTDAVVHEVQRYIDLIPTSLPHAVTCDVKFRNYLIPKGTTILTSLTSVLHDNKEFPNPEMFDPRHFLDEGGNFKKSNYFMPFSAGKRICVGEGLARMELFLFLTFILQNFNLKSLIDPKDLDTTPVVNGFASVPPFYQLCFIPV

SEQ ID NO: 756992 - protein, 73 aa, Homo sapiens
MLRDHAIRVPEPYGVMRREYQHPPSRGRKNQQHAGTSPCGTALGDPRLPDGPTQVGTPGSQKRDWMEPEGRGS

SEQ ID NO: 756993 - protein, 113 aa, Homo sapiens
TSAPALSPPATLAMRTLTILTAVLLVALQAKAEPLQAEDDPLQAKAYEADAQEQRGANDQDFAVSFAEDASSSLRALGSTRAFTCHCRRSCYSTEYSYGTCTVMGINHRFCCL

SEQ ID NO: 756994 - protein, 75 aa, Homo sapiens
  misc_feature (10)..(10): Xaa can be any naturally occurring amino acid
SNPGGKMRPXTEEETRVMFEKIAKYIGENLQLLVDRPDGTYCFRLHNDRVYYRRKKGHSYVSSVLWVFPRATRNE

SEQ ID NO: 756995 - protein, 97 aa, Homo sapiens
  misc_feature (32)..(32): Xaa can be any naturally occurring amino acid
CGSVQGRRGTRGPQGIPGGLDQMFRLSFCGKXMTRGRICGQLCFQCPLGVSKSNKKRINLCHRSFSQFRGLAAHNLENSFGFDQVRKRWEEKVKQQQ

SEQ ID NO: 756996 - protein, 108 aa, Homo sapiens
SEYLPAWGLVGISWDVFAYTHFATESCLLTQGIAHHDPRAPCRTSSQSRQNFCHLRIFLKMRDGDPGNRKLTGTKAVAAEGAATASQALRGYKRKKTCSRLPGLKQTR

SEQ ID NO: 756997 - protein, 694 aa, Homo sapiens [sequence omitted]

SEQ ID NO: 756998 - protein, 127 aa, Homo sapiens
MAPQVPPGEKVEALCMEEEMVRVTQWPFNWRSRCLEYYKNDHAKKPIRIIDLNLCQQVDAGLTFNKKEFENSYIFDINTIDRIFYLVADSEEEMNKWVRCICDICGFNPTEEAWKRRWFVLRSGARM

SEQ ID NO: 756999 - protein, 129 aa, Homo sapiens
MEEEMVRVTQWPFNWRSRCLEYYKNDHAKKPIRIIDLNLCQQVDAGLTFNKKEFENSYIFDINTIDRIFYLVADSEEEMNKWVRCICDICGFNPTEEGKFKILLFNLNSSFLLHFQKCHTILCYFSYTI

SEQ ID NO: 757000 - protein, 118 aa, Homo sapiens
MAPQVPPGEKVEALCMEEEMVRVTQWPFNWRSRCLEYYKNDHAKKPIRIIDLNLCQQVDAGLTFNKKEFENSYIFDINTIDRIFYLVADSEEEMNKWVRCICDICGFNPTEEGSHFVV

SEQ ID NO: 757001 - protein, 190 aa, Homo sapiens
FLFCPLSSQRTESPYKPVHLGLGPTDKVAAIDEFDNAHFTLLGVPNKPLQCLDITATGQKLRNRYHEGKLAPIAPGINRVDWPCFTRAIEDWSHFVSSAGEFKLPCLRKRAEGLSGYAVRYLKPDVTQTWRYCLNQNPSLDRYGQKPLPFDSLNTFRSFGSSYRLECNGLISAHCNLRLPGSSNSPASAF

SEQ ID NO: 757002 - protein, 248 aa, Homo sapiens
FLFCPLSSQRTESPYKPVHLGLGPTDKVAAIAMARIIDLVPWDDGSTHVYASPAILLPMERQRNQLAGVKQQLYHPALPTLRHMDRDTVKACLPDEHCQSTTYCRKDEFDNAHFTLLGVPNKPLQCLDITATGQKLRNRYHEGKLAPIAPGINRVDWPCFTRAIEDWSHFVSSAGEFKLPCLRKRAEGLSGYAVRYLKPDVTQTWRYCLNQNPSLDRYGQKPLPFDSLNTFRSFGSSYSRVNYLTPWH

SEQ ID NO: 757003 - protein, 730 aa, Homo sapiens
ADTHGHTETPDTHIHMHTQMHTHAHTCTETHRCTPPKCRKKYALTNIQAAMGLSDPAAQPLLGNGSANIKLVKNGENQLRKAAEQGQQDPNKNLSPTAVINITSEKLEGKEPHPQDSSSCEILPSQPRRTKSFLNYYADLETSARELEQNRGNHHGTAEEKSQPVQGQASTIIGNGDLLLQKPNRPQSSPEDGQVATVSSSPETKKDHPKTGAKTDCALHRIQNLAPSDEESSWTTLSQDSASPSSPDETDIWSDHSFQTDPDLPPGWKRVSDIAGTYYWHIPTGTTQWERPVSIPADLQGSRKGSLSSVTPSPTPENEKQPWSDFAVLNGGKINSDIWKDLHAATVNPDPSLKEFEGATLRYASLKLRNAPHPDDDDSCSINSDPEAKCFAVRSLGWVEMAEEDLAPGKSSVAVNNCIRQLSYCKNDIRDTVGIWGEGKDMYLILENDMLSLVDPMDRSVLHSQPIVSIRVWGVGRDNGRDFAYVARDKDTRILKCHVFRCDTPAKAIATSLHEICSKIMAERKNAKALACSSLQERANVNLDVPLQVDFPTPKTELVQKFHVQYLGMLPVDKPVGMDILNSAIENLMTSSNKEDWLSVNMNVADATVTVISEKNEEEVLVECRVRFLSFMGVGKDVHTFAFIMDTGNQRFECHVFWCEPNAGNVSEAVQAACMLRYQKCLVARPPSQKVRPPPPPADSVTRRVTTNVKRGVLSLIDTLKQKRPVTEMP

SEQ ID NO: 757004 - protein, 758 aa, Homo sapiens
MSEVLPADSGVDTLAVFMASSGTTDVTNRNSPATPPNTLNLRSSHNELLNAEIKHTETKNSTPPKCRKKYALTNIQAAMGLSDPAAQPLLGNGSANIKLVKNGENQLRKAAEQGQQDPNKNLSPTAVINITSEKLEGKEPHPQDSSSCEILPSQPRRTKSFLNYYADLETSARELEQNRGNHHGTAEEKSQPVQGQASTIIGNGDLLLQKPNRPQSSPEDGQVATVSSSPETKKDHPKTGAKTDCALHRIQNLAPSDEESSWTTLSQDSASPSSPDETDIWSDHSFQTDPDLPPGWKRVSDIAGTYYWHIPTGTTQWERPVSIPADLQGSRKGSLSSVTPSPTPENEKQPWSDFAVLNGGKINSDIWKDLHAATVNPDPSLKEFEGATLRYASLKLRNAPHPDDDDSCSINSDPEAKCFAVRSLGWVEMAEEDLAPGKSSVAVNNCIRQLSYCKNDIRDTVGIWGEGKDMYLILENDMLSLVDPMDRSVLHSQPIVSIRVWGVGRDNGRDFAYVARDKDTRILKCHVFRCDTPAKAIATSLHEICSKIMAERKNAKALACSSLQERANVNLDVPLQVDFPTPKTELVQKFHVQYLGMLPVDKPVGMDILNSAIENLMTSSNKEDWLSVNMNVADATVTVISEKNEEEVLVECRVRFLSFMGVGKDVHTFAFIMDTGNQRFECHVFWCEPNAGNVSEAVQAACMLRYQKCLVARPPSQKVRPPPPPADSVTRRVTTNVKRGVLSLIDTLKQKRPVTEMP

SEQ ID NO: 757005 - protein, 758 aa, Homo sapiens; identical to SEQ ID NO: 757004

SEQ ID NO: 757006 - protein, 300 aa, Homo sapiens
MSEVLPADSGVDTLAVFMASSGTTDVTNRNSPATPPNTLNLRSSHNELLNAEIKHTETKNSTPPKCRKKYALTNIQAAMGLSDPAAQPLLGNGSANIKLVKNGENQLRKAAEQGQQDPNKNLSPTAVINITSEKLEGKEPHPQDSSSCEILPSQPRRTKSFLNYYADLETSARELEQNRGNHHGTAEEKSQPVQGQASTIIGNGDLLLQKPNRPQSSPEDGQVATVSSSPETKKDHPKTGAKTDCALHRIQNLAPSDEESSWTTLSQDSASPSSPDETGTPGEGVASAGTFFFLSFQLLE

SEQ ID NO: 757007 - protein, 472 aa, Homo sapiens
MAGASRLLFLWLGCFCVSLAQGERPKPPFPELRKAVPGDRTAGGGPDSELQPQDKVSEHMLRLYDRYSTVQAARTPGSLEGGSQPWRPRLLREGNTVRSFRAAAAETLERKGLYIFNLTSLTKSENILSATLYFCIGELGNISLSCPVSGGCSHHAQRKHIQIDLSAWTLKFSRNQSQLLGHLSVDMAKSHRDIMSWLSKDITQFLRKAKENEEFLIGFNITSKGRQLPKRRLPFPEPYILVYANDAAISEPESVVSSLQGHRNFPTGTVPKWDSHIRAALSIERRKKRSTGVLLPLQNNELPGAEYQYKKDEVWEERKPYKTLQAQAPEKSKNKKKQRKGPHRKSQTLQFDEQTLKKARRKQWIEPRNCARRYLKVDFADIGWSEWIISPKSFDAYYCSGACQFPMPKSLKPSNHATIQSIVRAVGVVPGIPEPCCVPEKMSSLSILFFDENKNVVLKVYPNMTVESCACR

SEQ ID NO: 757008 - protein, 1 aa, Homo sapiens
M

SEQ ID NO: 757009 - protein, 505 aa, Homo sapiens
IGMALRAKAEVCMAVPWLSLQRAQALGTRAARVPRTVLPFEAMPQRPGNRWLRLLQIWREQGYEDLHLEVHQTFQELGPIFRYDLGGAGMVCVMLPEDVEKLQQVDSLHPHRMSLEPWVAYRQHRGHKCGVFLLNGPEWRFNRLRLNPEVLSPNAVQRFLPMVDAVARDFSQALKKKVLQNARGSLTLDVQPSIFHYTIEASNLALFGERLGLVGHSPSSASLNFLHALEVMFKSTVQLMFMPRSLSRWTSPKVWKEHFEAWDCIFQYGDNCIQKIYQELAFSRPQQYTSIVAELLLNAELSPDAIKANSMELTAGSVDTTVFPLLMTLFELARNPNVQQALRQESLAAAASISEHPQKATTELPLLRAALKETLRLYPVGLFLERVVSSDLVLQNYHIPAGTLVRVFLYSLGRNPALFPRPERYNPQRWLDIRGSGRNFYHVPFGFGMRQCLGRRLAEAEMLLLLHHVLKHLQVETLTQEDIKMVYSFILRPSMFPLLTFRAIN

SEQ ID NO: 757010 - protein, 505 aa, Homo sapiens; identical to SEQ ID NO: 757009

SEQ ID NO: 757011 - protein, 505 aa, Homo sapiens; identical to SEQ ID NO: 757009

SEQ ID NO: 757012 - protein, 505 aa, Homo sapiens; identical to SEQ ID NO: 757009

SEQ ID NO: 757013 - protein, 505 aa, Homo sapiens; identical to SEQ ID NO: 757009

SEQ ID NO: 757014 - protein, 505 aa, Homo sapiens; identical to SEQ ID NO: 757009

SEQ ID NO: 757015 - protein, 505 aa, Homo sapiens; identical to SEQ ID NO: 757009

SEQ ID NO: 757016 - protein, 505 aa, Homo sapiens; identical to SEQ ID NO: 757009

SEQ ID NO: 757017 - protein, 505 aa, Homo sapiens; identical to SEQ ID NO: 757009

SEQ ID NO: 757018 - protein, 505 aa, Homo sapiens; identical to SEQ ID NO: 757009

SEQ ID NO: 757019 - protein, 505 aa, Homo sapiens; identical to SEQ ID NO: 757009

SEQ ID NO: 757020 - protein, 505 aa, Homo sapiens; identical to SEQ ID NO: 757009

SEQ ID NO: 757021 - protein, 505 aa, Homo sapiens; identical to SEQ ID NO: 757009

SEQ ID NO: 757022 - protein, 537 aa, Homo sapiens
IGMALRAKAEVCMAVPWLSLQRAQALGTRAARVPRTVLPFEAMPQRPGNRWLRLLQIWREQGYEDLHLEVHQTFQELGPIFRYDLGGAGMVCVMLPEDVEKLQQVDSLHPHRMSLEPWVAYRQHRGHKCGVFLLNGPEWRFNRLRLNPEVLSPNAVQRFLPMVDAVARDFSQALKKKVLQNARGSLTLDVQPSIFHYTIEASNLALFGERLGLVGHSPSSASLNFLHALEVMFKSTVQLMFMPRSLSRWTSPKVWKEHFEAWDCIFQYDQHRGGAPVECGTVARCHQGQLYGTHCRERGHGQAGNQPHPERVMPSLPPRHCLPMSHGAHVSHPQAMGPTFLTWDCDVINTFETVFPLLMTLFELARNPNVQQALRQESLAAAASISEHPQKATTELPLLRAALKETLRLYPVGLFLERVVSSDLVLQNYHIPAGTLVRVFLYSLGRNPALFPRPERYNPQRWLDIRGSGRNFYHVPFGFGMRQCLGRRLAEAEMLLLLHHVLKHLQVETLTQEDIKMVYSFILRPSMFPLLTFRAIN

SEQ ID NO: 757023 - protein, 471 aa, Homo sapiens
IGMALRAKAEVCMAVPWLSLQRAQALGTRAARVPRTVLPFEAMPQRPGNRWLRLLQIWREQGYEDLHLEVHQTFQELGPIFRYDLGGAGMVCVMLPEDVEKLQQVDSLHPHRMSLEPWVAYRQHRGHKCGVFLLNGPEWRFNRLRLNPEVLSPNAVQRFLPMVDAVARDFSQALKKKVLQNARGSLTLDVQPSIFHYTIEASNLALFGERLGLVGHSPSSASLNFLHALEVMFKSTVQLMFMPRSLSRWTSPKVWKEHFEAWDCIFQYDQHRGGAPVECGTVARCHQGQLYGTHCRERGHGQAGNQPHPERVMPSLPPRHCLPMSHGAHVSHPQAMGPTFLTWDCDVINTFETVFPLLMTLFELARNPNVQQALRQESLAAAASISEHPQKATTELPLLRAALKETLRLYPVGLFLERVVSSDLVLQNYHIPAGVLKHLQVETLTQEDIKMVYSFILRPSMFPLLTFRAIN

SEQ ID NO: 757024 - protein, 505 aa, Homo sapiens; identical to SEQ ID NO: 757009

SEQ ID NO: 757025 - protein, 505 aa, Homo sapiens; identical to SEQ ID NO: 757009

SEQ ID NO: 757026 - protein, 450 aa, Homo sapiens
IGMALRAKAEVCMAVPWLSLQRAQALGTRAARVPRTVLPFEAMPQRPGNRWLRLLQIWREQGYEDLHLEVHQTFQELGPIFRYDLGGAGMVCVMLPEDVEKLQQVDSLHPHRMSLEPWVAYRQHRGHKCGVFLLNGPEWRFNRLRLNPEVLSPNAVQRFLPMVDAVARDFSQALKKKVLQNARGSLTLDVQPSIFHYTIEASNLALFGERLGLVGHSPSSASLNFLHALEVMFKSTVQLMFMPRSLSRWTSPKVWKEHFEAWDCIFQYDQHRGGAPVECGTVARCHQGQLYGTHCRERGHGQAGNQPHPERVMPSLPPRHCLPMSHGAHVSHPQAMGPTFLTWDCDVINTFETVFPLLMTLFELARNPNVQQALRQESLAAAASISEHPQKATTELPLLRAALKETLRLYPVGLFLERVVSSDLVLQNYHIPAGEIKHVMCFQNTVVGEA

SEQ ID NO: 757027 - protein, 331 aa, Homo sapiens
IGMALRAKAEVCMAVPWLSLQRAQALGTRAARVPRTVLPFEAMPQRPGNRWLRLLQIWREQGYEDLHLEVHQTFQELGPIFRYDLGGAGMVCVMLPEDVEKLQQVDSLHPHRMSLEPWVAYRQHRGHKCGVFLLNGPEWRFNRLRLNPEVLSPNAVQRFLPMVDAVARDFSQALKKKVLQNARGSLTLDVQPSIFHYTIEASNLALFGERLGLVGHSPSSASLNFLHALEVMFKSTVQLMFMPRSLSRWTSPKVWKEHFEAWDCIFQYGDNCIQKIYQELAFSRPQQYTSIVAELLLNAELSPDAIKANSMELTAGSVDTVRPATSPTQRG

SEQ ID NO: 757028 - protein, 698 aa, Homo sapiens
LVQFGTRLDGHTMRLLTLLGLLCGSVATPLGPKWPEPVFGRLASPGFPGEYANDQERRWTLTAPPGYRLRLYFTHFDLELSHLCEYDFVKLSSGAKVLATLCGQESTDTERAPGKDTFYSLGSSLDITFRSDYSNEKPFTGFEAFYAAEDIDECQVAPGEAPTCDHHCHNHLGGFYCSCRAGYVLHRNKRTCSALCSGQVFTQRSGELSSPEYPRPYPKLSSCTYSISLEEGFSVILDFVESFDVETHPETLCPYDFLKIQTDREEHGPFCGKTLPHRIETKSNTVTITFVTDESGDHTGWKIHYTSTAHACPYPMAPPNGHVSPVQAKYILKDSFSIFCETGYELLQGHLPLKSFTAVCQKDGSWDRPMPACSIVDCGPPDDLPSGRVEYITGPGVTTYKAVIQYSCEETFYTMKVNDGKYVCEADGFWTSSKGEKSLPVCEPVCGLSARTTGGRIYGGQKAKPGDFPWQVLILGGTTAAGALLYDNWVLTAAHAVYEQKHDASALDIRMGTLKRLSPHYTQAWSEAVFIHEGYTHDAGFDNDIALIKLNNKVVINSNITPICLPRKEAESFMRTDDIGTASGWGLTQRGFLARNLMYVDIPIVDHQKCTAAYEKPPYPRGSVTANMLCAGLESGGKDSCRGDSGGALVFLDSETERWFVGGIVSWGSMNCGEAGQYGVYTKVINYIPWIENIISDF

SEQ ID NO: 757029 - protein, 193 aa, Homo sapiens
PGQLDGHTMRLLTLLGLLCGSVATPLGPKWPEPVFGRLASPGFPGEYANDQERRWTLTAPPGYRLRLYFTHFDLELSHLCEYDFVKLSSGAKVLATLCGQESTDTERAPGKDTFYSLGSSLDITFRSDYSNEKPFTGFEAFYAAEDIDECQVAPGEAPTCDHHCHNHLGGFYCSCRAGYVLHRNKRTCSEQSL

SEQ ID NO: 757030 - protein, 252 aa, Homo sapiens
APALPMRLLTLLGLLCGSVATPLGPKWPEPVFGRLASPGFPGEYANDQERRWTLTAPPGYRLRLYFTHFDLELSHLCEYDFVKLSSGAKVLATLCGQESTDTERAPGKDTFYSLGSSLDITFRSDYSNEKPFTGFEAFYAAEDIDECQVAPGEAPTCDHHCHNHLGGFYCSCRAGYVLHRNKRTCSGEGGCLGPNAPSPGIPGAPQGHCCSAQGCGGPGPWTLGASRPCCLQLPFSALLPLSAARLISATLP

SEQ ID NO: 757031 - protein, 383 aa, Homo sapiens
MAPPNGHVSPVQAKYILKDSFSIFCETGYELLQGHLPLKSFTAVCQKDGSWDRPMPACSIVDCGPPDDLPSGRVEYITGPGVTTYKAVIQYSCEETFYTMKVNDGKYVCEADGFWTSSKGEKSLPVCEPVCGLSARTTGGRIYGGQKAKPGDFPWQVLILGGTTAAGALLYDNWVLTAAHAVYEQKHDASALDIRMGTLKRLSPHYTQAWSEAVFIHEGYTHDAGFDNDIALIKLNNKVVINSNITPICLPRKEAESFMRTDDIGTASGWGLTQRGFLARNLMYVDIPIVDHQKCTAAYEKPPYPRGSVTANMLCAGLESGGKDSCRGDSGGALVFLDSETERWFVGGIVSWGSMNCGEAGQYGVYTKVINYIPWIENIISDF

SEQ ID NO: 757032 - protein, 202 aa, Homo sapiens
LVQFGTRLDGHTMRLLTLLGLLCGSVATPLGPKWPEPVFGRLASPGFPGEYANDQERRWTLTAPPGYRLRLYFTHFDLELSHLCEYDFVKLSSGAKVLATLCGQESTDTERAPGKDTFYSLGSSLDITFRSDYSNEKPFTGFEAFYAAEDIDECQVAPGEAPTCDHHCHNHQTHTTHTHTRQTKKPKHNKTTNTQQTNHQNP

SEQ ID NO: 757033 - protein, 98 aa, Homo sapiens
MIPGGLSEAKPATPEIQEIVDKVKPQLEEKTNETYGKLEAVQYKTQVVAGTNYYIKVRAGDNKYMHLKVFKSLPGQNEDLVLTGYQVDKNKDDELTGF

SEQ ID NO: 757034 - protein, 91 aa, Homo sapiens
LSPVFPFPHAPPFTSVKPQLEEKTNETYGKLEAVQYKTQVVAGTNYYIKVRAGDNKYMHLKVFKSLPGQNEDLVLTGYQVDKNKDDELTGF

SEQ ID NO: 757035 - protein, 98 aa, Homo sapiens; identical to SEQ ID NO: 757033

SEQ ID NO: 757036 - protein, 112 aa, Homo sapiens
MPFLLQQEWSISAKMIPGGLSEAKPATPEIQEIVDKVKPQLEEKTNETYGKLEAVQYKTQVVAGTNYYIKVRAGDNKYMHLKVFKSLPGQNEDLVLTGYQVDKNKDDELTGF

SEQ ID NO: 757037 - protein, 154 aa, Homo sapiens
HHQNGISAQVGLQDATSPIIEELITFHDHALIIIFLICFLPDMPFLLQQEWSISAKMIPGGLSEAKPATPEIQEIVDKVKPQLEEKTNETYGKLEAVQYKTQVVAGTNYYIKVRAGDNKYMHLKVFKSLPGQNEDLVLTGYQVDKNKDDELTGF

SEQ ID NO: 757038 - protein, 171 aa, Homo sapiens
MRVGGTANVTLTGMPRGLLFASWFSRPVRWKPGEHHFWTLRPCRASVISTTQVQQLLPDMPFLLQQEWSISAKMIPGGLSEAKPATPEIQEIVDKVKPQLEEKTNETYGKLEAVQYKTQVVAGTNYYIKVRAGDNKYMHLKVFKSLPGQNEDLVLTGYQVDKNKDDELTGF

SEQ ID NO: 757039 - protein, 150 aa, Homo sapiens
SGFAIDVQRVTGVREEEGGVLEISISLFKPKIGMTLPDMPFLLQQEWSISAKMIPGGLSEAKPATPEIQEIVDKVKPQLEEKTNETYGKLEAVQYKTQVVAGTNYYIKVRAGDNKYMHLKVFKSLPGQNEDLVLTGYQVDKNKDDELTGF

SEQ ID NO: 757040 - protein, 112 aa, Homo sapiens; identical to SEQ ID NO: 757036

SEQ ID NO: 757041 - protein, 112 aa, Homo sapiens; identical to SEQ ID NO: 757036

SEQ ID NO: 757042 - protein, 154 aa, Homo sapiens; identical to SEQ ID NO: 757037

SEQ ID NO: 757043 - protein, 136 aa, Homo sapiens
MRVGGTANVTLTGMPRGLLFASWFSRPVRWKPGEHHFWTLRPCRASVISTTQVQQLLPDMPFLLQQEWSISAKMIPGGLSEAKPATPEIQEIVDKVKPQLEEKTNETYGKLEAVQYKTQVVAGTNYYIKVRVQHLL

SEQ ID NO: 757044 - protein, 302 aa, Homo sapiens
ERPVSFSPPPTCPPKVAISQRRKSTSFLEAQTHHFQPLLRTVGQSLLPPGGSPTNWTPEAVVMLGTTASRVTGESCEIQVHPMFEPSQVYSDYRPGLVLPEEAHYFIPQEAVYVAGVHYQARVAEQYEGIPYNSSVLSSPMKQIPEQKPVQGGPTSSSVFEFPSGQAFLVGHLQNLRLDSGLGPGSPLSSISAPISTDATRLKFHPVFVPHSAPAVLTHNNESRSNCVFEFHVHTPSSSSGEGGGILPQRVYRNRQVAVDLNQEELPPQSVGLHGYLQPVTEEKHNYHAPELTVSVVEPIGQ

SEQ ID NO: 757045 - protein, 199 aa, Homo sapiens
  misc_feature (6)..(6): Xaa can be any naturally occurring amino acid
QHQTNXTYTLQYRKHHKVIVAEQYEGIPYNSSVLSSPMKQIPEQKPVQGGPTSSSVFEFPSGQAFLVGHLQNLRLDSGLGPGSPLSSISAPISTDATRLKFHPVFVPHSAPAVLTHNNESRSNCVFEFHVHTPSSSSGEGGGILPQRVYRNRQVAVDLNQEELPPQSVGLHGYLQPVTEEKHNYHAPELTVSVVEPIGQ

SEQ ID NO: 757046 - protein, 105 aa, Homo sapiens
MNKSPAAKEVFKERIGYTHMLEVLKSLGQPPLELLKELMNMAVEGDHTSVGILGISNVQPLLLLIQWLPELQSHDLQIFISDWLKRICCINRQSRTTCVNANMGI

SEQ ID NO: 757047 - protein, 637 aa, Homo sapiens
MMPFPVTTQGPPQPAPPPNRYGVSSPISLAVPKETDCLLTQRLIETLRPFGVFEEEEELQRRILVLEKLNNLVKEWIREISESKSLPQSVIENVGGKIFTFGSYRLGVHTKGADIDALCVAPSHVDRSDFFTSFYAKLKLQEEVKDLRAVEEAFVPVIKLCFDGIEIDILFARLALQTIPEDLDLRDDSLLKNLDIRCIRSLNGCRVTDEILHLVPNIDNFRLTLRAIKLWAKCHNIYSNILGFLGGVSWAMLVARTCQLYPNAVASTLVRKFFLVFSEWEWPNPVLLKEPEERNLNLPVWDPRVNPSDRYHLMPIITPAYPQQNSTYNVSISTRMVMIEEFKQGLAITHEILLSKAEWSKLFEAPSFFQKYKHYIVLLASASTEKQHLEWVGLVESKIRILVGSLEKNEFITLAHVNPQSFPAPKENPDMEEFRTMWVIGLGLKKPDNSEILSIDLTYDIQSFTDTVYRQAVNSKMFEMGMKITAMHLRRKELHQLLPHHVLQDKKAHSTEGRRLTDLNDSSFDLSAGCENSMSVPSSTSTMKTGPLISSSQGRNSPALAVMTASVANIQATEFSLQQVNTNESSGVALNESIPHAVSQPAISPSPKAMVARVVSSTCLISHPDLQETQQQTYLIL

SEQ ID NO: 757048 - protein, 1374 aa, Homo sapiens
NSEHTAVISLCSGMLGTFRSHDGDYFIEPLQSMDEQEDEEEQNKPHIIYRRSAPQREPSTGRHACDTSEHKNRHSKDKKKTRARKWGERINLAGDVAALNSGLATEAFSAYGNKTDNTREKRTHRRTKRFLSYPRFVEVLVVADNRMVSYHGENLQHYILTLMSIVASIYKDPSIGNLINIVIVNLIVIHNEQDGPSISFNAQTTLKNFCQWQHSKNSPGGIHHDTAVLLTRQDICRAHDKCDTLGLAELGTICDPYRSCSISEDSGLSTAFTIAHELGHVFNMPHDDNNKCKEEGVKSPQHVMAPTLNFYTNPWMWSKCSRKYITEFLDTGYGECLLNEPESRPYPLPVQLPGILYNVNKQCELIFGPGSQVCPYMMQCRRLWCNNVNGVHKGCRTQHTPWADGTECEPGKHCKYGFCVPKEMDVPVTDGSWGSWSPFGTCSRTCGGGIKTAIRECNRPEPKNGGKYCVGRRMKFKSCNTEPCLKQKRDFRDEQCAHFDGKHFNINGLLPNVRWVPKYSGILMKDRCKLFCRVAGNTAYYQLRDRVIDGTPCGQDTNDICVQGLCRQAGCDHVLNSKARRDKCGVCGGDNSSCKTVAGTFNTVHYGYNTVVRIPAGATNIDVRQHSFSGETDDDNYLALSSSKGEFLLNGNFVVTMAKREIRIGNAVVEYSGSETAVERINSTDRIEQELLLQVLSVGKLYNPDVRYSFNIPIEDKPQQFYWNSHGPWQACSKPCQGERKRKLVCTRESDQLTVSDQRCDRLPQPGHITEPCGTDCDLRWHVASRSECSAQCGLGYRTLDIYCAKYSRLDGKTEKVDDGFCSSHPKPSNREKCSGECNTGGWRYSAWTECSKSCDGGTQRRRAICVNTRNDVLDDSKCTHQEKVTIQRCSEFPCPQWKSGDWSECLVTCGKGHKHRQVWCQFGEDRLNDRMCDPETKPTSMQTCQQPECASWQAGPWGQCSVTCGQGYQLRAVKCIIGTYMSVVDDNDCNAATRPTDTQDCELPSCHPPPAAPETRRSTYSAPRTQWRFGSWTPCSATCGKGTRMRYVSCRDENGSVADESACATLPRPVAKEECSVTPCGQWKALDWSSCSVTCGQGRATRQVMCVNYSDHVIDRSECDQDYIPETDQDCSMSPCPQRTPDSGLAQHPFQNEDYRPRSASPSRTHVLGGNQWRTGPWGACSSTCAGGSQRRVVVCQDENGYTANDCVERIKPDEQRACESGPCPQWAYGNWGECTKLCGGGIRTRLVVCQRSNGERFPDLRLVKFLINLPIVSSVTHMLVHTTLHGVLALGARVLSLVVEGINNEMFTAWQKMEAIKKVITVSTWLSHMGTESAEEEDAPNGKLVLCLLSALCPVAEAYSRGMWAVRSEHTK

SEQ ID NO: 757049 - protein, 1780 aa, Homo sapiens
NSEHTAVISLCSGMLGTFRSHDGDYFIEPLQSMDEQEDEEEQNKPHIIYRRSAPQREPSTGRHACDTSEHKNRHSKDKKKTRARKWGERINLAGDVAALNSGLATEAFSAYGNKTDNTREKRTHRRTKRFLSYPRFVEVLVVADNRMVSYHGENLQHYILTLMSIVASIYKDPSIGNLINIVIVNLIVIHNEQDGPSISFNAQTTLKNFCQWQHSKNSPGGIHHDTAVLLTRQDICRAHDKCDTLGLAELGTICDPYRSCSISEDSGLSTAFTIAHELGHVFNMPHDDNNKCKEEGVKSPQHVMAPTLNFYTNPWMWSKCSRKYITEFLDTGYGECLLNEPESRPYPLPVQLPGILYNVNKQCELIFGPGSQVCPYMMQCRRLWCNNVNGVHKGCRTQHTPWADGTECEPGKHCKYGFCVPKEMDVPVTDGSWGSWSPFGTCSRTCGGGIKTAIRECNRPEPKNGGKYCVGRRMKFKSCNTEPCLKQKRDFRDEQCAHFDGKHFNINGLLPNVRWVPKYSGILMKDRCKLFCRVAGNTAYYQLRDRVIDGTPCGQDTNDICVQGLCRQAGCDHVLNSKARRDKCGVCGGDNSSCKTVAGTFNTVHYGYNTVVRIPAGATNIDVRQHSFSGETDDDNYLALSSSKGEFLLNGNFVVTMAKREIRIGNAVVEYSGSETAVERINSTDRIEQELLLQVLSVGKLYNPDVRYSFNIPIEDKPQQFYWNSHGPWQACSKPCQGERKRKLVCTRESDQLTVSDQRCDRLPQPGHITEPCGTDCDLRWHVASRSECSAQCGLGYRTLDIYCAKYSRLDGKTEKVDDGFCSSHPKPSNREKCSGECNTGGWRYSAWTECSKSCDGGTQRRRAICVNTRNDVLDDSKCTHQEKVTIQRCSEFPCPQWKSGDWSECLVTCGKGHKHRQVWCQFGEDRLNDRMCDPETKPTSMQTCQQPECASWQAGPWGQCSVTCGQGYQLRAVKCIIGTYMSVVDDNDCNAATRPTDTQDCELPSCHPPPAAPETRRSTYSAPRTQWRFGSWTPCSATCGKGTRMRYVSCRDENGSVADESACATLPRPVAKEECSVTPCGQWKALDWSSCSVTCGQGRATRQVMCVNYSDHVIDRSECDQDYIPETDQDCSMSPCPQRTPDSGLAQHPFQNEDYRPRSASPSRTHVLGGNQWRTGPWGACSSTCAGGSQRRVVVCQDENGYTANDCVERIKPDEQRACESGPCPQWAYGNWGECTKLCGGGIRTRLVGAVSGPTVNGFQICRLVKFLINLPIVSSVTHMLVHTTLHGVLALGARVLSLVVEGINNEMFTAWQKMEAIKKVITVSTWLSHMGTESAEEEDAPNGKLVLCLLSAAVSCGRGVQQRHVGCQIGTHKIARETECNPYTRPESERDCQGPRCPLYTWRAEEWQECTKTCGEGSRYRKVVCVDDNKNEVHGARCDVSKRPVDRESCSLQPCEYVWITGEWSECSVTCGKGYKQRLVSCSEIYTGKENYEYSYQTTINCPGTQPPSVHPCYLRDCPVSATWRVGNWGSCSVSCGVGVMQRSVQCLTNEDQPSHLCHTDLKPEERKTCRNVYNCELPQNCKEVKRLKGASEDGEYFLMIRGKLLKIFCAGMHSDHPKEYVTLVHGDSENFSEVYGHRLHNPTECPYNGSRRDDCQCRKDYTAAGFSSFQKIRIDLTSMQIITTDLQFARTSEGHPVPFATAGDCYSAAKCPQGRFSINLYGTGLSLTESARWISQGNYAVSDIKKSPDGTRVVGKCGGYCGKCTPSSGTGLEVRVL

SEQ ID NO: 757050 - protein, 1374 aa, Homo sapiens; identical to SEQ ID NO: 757048

SEQ ID NO: 757051 - protein, 1780 aa, Homo sapiens; identical to SEQ ID NO: 757049

SEQ ID NO: 757052 - protein, 256 aa, Homo sapiens
PRLSPRVCRLGEVPHPERAANGPAPSAQTLLSAAPGSGSAARCFRPGCRGPGCTLSARLRPPEAPAGVRAASGPAETERLEDEAAAAGRRMGANQLVVLNVYDMGLTQSLRLECSVTITAHCSLDLLGSELVPSDGFLVSLTSRMKPQTLVYWMNEYTSSIGIGVFHSGIEVYGREFAYGGHPYPFSGIFEISPGNASELGETFKFKEAVVLGSTDFLEDDIEKIVEELGKEYKGNAYHLMHKNCNHFSSALSEVS

SEQ ID NO: 757053 - protein, 247 aa, Homo sapiens
PRLSPRVCRLGEVPHPERAANGPAPSAQTLLSAAPGSGSAARCFRPGCRGPGCTLSARLRPPEAPAGVRAASGPAETERLEDEAAAAGRRMGANQLVVLNVYDMYWMNEYTSSIGIGVFHSGIEVYGREFAYGGHPYPFSGIFEISPGNASELGETFKFKEAVVLGSTDFLEDDIEKIVEELGKEYKGNAYHLMHKNCNHFSSALSEILCGKEIPRWINRLAYFSSCIPFLQSCLPKEVAHARSPAV

SEQ ID NO: 757054 - protein, 174 aa, Homo sapiens
MRLTFLKKIAQLNYLEILVVLLSYTLKTTFQYWMNEYTSSIGIGVFHSGIEVYGREFAYGGHPYPFSGIFEISPGNASELGETFKFKEAVVLGSTDFLEDDIEKIVEELGKEYKGNAYHLMHKNCNHFSSALSEILCGKEIPRWINRLAYFSSCIPFLQSCLPKEVAHARSPAV

SEQ ID NO: 757055 - protein, 247 aa, Homo sapiens; identical to SEQ ID NO: 757053

SEQ ID NO: 757056 - protein, 247 aa, Homo sapiens; identical to SEQ ID NO: 757053

SEQ ID NO: 757057 - protein, 133 aa, Homo sapiens
PRLSPRVCRLGEVPHPERAANGPAPSAQTLLSAAPGSGSAARCFRPGCRGPGCTLSARLRPPEAPAGVRAASGPAETERLEDEAAAAGRRMGANQLVVLNVYDMYWMNEYTSSIGIGVFHSGIEVYGREKLLF

SEQ ID NO: 757058 - protein, 247 aa, Homo sapiens; identical to SEQ ID NO: 757053

SEQ ID NO: 757059 - protein, 113 aa, Homo sapiens
IQNSFSSVDSLWERDSSLDQSTCLLQLLYTLSTELPPEGGGSRPQPCSLVSAKNSRMNWRKQRMLPHPLPWQALQQAPDPGATLNYKCLQSHTFRTVSGSRISLEKSKQRSIL

SEQ ID NO: 757060 - protein, 247 aa, Homo sapiens; identical to SEQ ID NO: 757053

SEQ ID NO: 757061 - protein, 2413 aa, Homo sapiens
MGISTVILEMCLLWGQVLSTGGWIPRTTDYASLIPSEVPLDPTVAEGSPFPSESTLESTAAEGSPISLESTLESTVAEGSLIPSESTLESTVAEGSDSGLALRLVNGDGRCQGRVEILYRGSWGTVCDDSWDTNDANVVCRQLGCGWAMSAPGNAWFGQGSGPIALDDVRCSGHESYLWSCPHNGWLSHNCGHGEDAGVICSAAQPQSTLRPESWPVRISPPVPTEGSESSLALRLVNGGDRCRGRVEVLYRGSWGTVCDDYWDTNDANVVCRQLGCGWAMSAPGNAQFGQGSGPIVLDDVRCSGHESYLWSCPHNGWLTHNCGHSEDAGVICSAPQSRPTPSPDTWPTSHASTAGPESSLALRLVNGGDRCQGRVEVLYRGSWGTVCDDSWDTSDANVVCRQLGCGWATSAPGNARFGQGSGPIVLDDVRCSGYESYLWSCPHNGWLSHNCQHSEDAGVICSAAHSWSTPSPDTLPTITLPASTVGSESSLALRLVNGGDRCQGRVEVLYRGSWGTVCDDSWDTNDANVVCRQLGCGWAMLAPGNARFGQGSGPIVLDDVRCSGNESYLWSCPHNGWLSHNCGHSEDAGVICSGPESSLALRLVNGGDRCQGRVEVLYRGSWGTVCDDSWDTNDANVVCRQLGCGWATSAPGNARFGQGSGPIVLDDVRCSGHESYLWSCPNNGWLSHNCGHHEDAGVICSAAQSRSTPRPDTLSTITLPPSTVGSESSLTLRLVNGSDRCQGRVEVLYRGSWGTVCDDSWDTNDANVVCRQLGCGWATSAPGNARFGQGSGPIVLDDVRCSGHESYLWSCPHNGWLSHNCGHHEDAGVICSVSQSRPTPSPDTWPTSHASTAGSESSLALRLVNGGDRCQGRVEVLYRGSWGTVCDDSWDTSDANVVCRQLGCGWATSAPGNARFGQGSGPIVLDDVRCSGYESYLWSCPHNGWLSHNCQHSEDAGVICSAAHSWSTPSPDTLPTITLPASTVGSESSLALRLVNGGDRCQGRVEVLYQGSWGTVCDDSWDTNDANVVCRQLGCGWAMSAPGNARFGQGSGPIVLDDVRCSGHESYLWSCPHNGWLSHNCGHSEDAGVICSASQSRPTPSPDTWPTSHASTAGSESSLALRLVNGGDRCQGRVEVLYRGSWGTVCDDYWDTNDANVVCRQLGCGWAMSAPGNARFGQGSGPIVLDDVRCSGHESYLWSCPHNGWLSHNCGHHEDAGVICSASQSQPTPSPDTWPTSHASTAGSESSLALRLVNGGDRCQGRVEVLYRGSWGTVCDDYWDTNDANVVCRQLGCGWATSAPGNARFGQGSGPIVLDDVRCSGHESYLWSCPHNGWLSHNCGHHEDAGVICSASQSQPTPSPDTWPTSHASTAGSESSLALRLVNGGDRCQGRVEVLYRGSWGTVCDDYWDTNDANVVCRQLGCGWATSAPGNARFGQGSGPIVLDDVRCSGHESYLWSCPHNGWLSHNCGHHEDAGVICSASQSQPTPSPDTWPTSRASTAGSESTLALRLVNGGDRCRGRVEVLYQGSWGTVCDDYWDTNDANVVCRQLGCGWAMSAPGNAQFGQGSGPIVLDDVRCSGHESYLWSCPHNGWLSHNCGHHEDAGVICSAAQSQSTPRPDTWLTTNLPALTVGSESSLALRLVNGGDRCRGRVEVLYRGSWGTVCDDSWDTNDANVVCRQLGCGWAMSAPGNARFGQGSGPIVLDDVRCSGNESYLWSCPHKGWLTHNCGHHEDAGVICSATQINSTTTDWWHPTTTTTARPSSNCGGFLFYASGTFSSPSYPAYYPNNAKCVWEIEVNSGYRINLGFSNLKLEAHHNCSFDYVEIFDGSLNSSLLLGKICNDTRQIFTSSYNRMTIHFRSDISFQNTGFLAWYNSFPSDATLRLVNLNSSYGLCAGRVEIYHGGTWGTVCDDSWTIQEAEVVCRQLGCGRAVSALGNAYFGSGSGPITLDDVECSGTESTLWQCRNRGWFSHNCNHREDAGVICSGNHLSTPAPFLNITRPNTDYSCGGFLSQPSGDFSSPFYPGNYPNNAKCVWDIEVQNNYRVTVIFRDVQLEGGCNYDYIEVFDGPYRSSPLIARVCDGARGSFTSSSNFMSIRFISDHSITRRGFRAEYYSSPSNDSTNLLCLPNHMQASVSRSYLQSLGFSASDLVISTWNGYYECRPQITPNLVIFTIPYSGCGTFKQADNDTIDYSNFLTAAVSGGIIKRRTDLRIHVSCRMLQNTWVDTMYIANDTIHVANNTIQVEEVQYGNFDVNISFYTSSSFLYPVTSRPYYVDLNQDLYVQAEILHSDAVLTLFVDTCVASPYSNDFTSLTYDLIRSGCVRDDTYGPYSSPSLRIARFRFRAFHFLNRFPSVYLRCKMVVCRAYDPSSRCYRGCVLRSKRDVGSYQEKVDVVLGPIQLQTPPRREEEPR

SEQ ID NO: 757062 - protein, 2403 aa, Homo sapiens
MGISTVILEMCLLWGQVLSTGGWIPRTTDYASLIPSEVPLDPTVAEGSPFPSESTLESTAAEGSPISLESTLESTVAEGSLIPSESTLESTVAEGSDSGLALRLVNGDGRCQGRVEILYRGSWGTVCDDSWDTNDANVVCRQLGCGWAMSAPGNAWFGQGSGPIALDDVRCSGHESYLWSCPHNGWLSHNCGHGEDAGVICSAAQPQSTLRPESWPVRISPPVPTEGSESSLALRLVNGGDRCRGRVEVLYRGSWGTVCDDYWDTNDANVVCRQLGCGWAMSAPGNAQFGQGSGPIVLDDVRCSGHESYLWSCPHNGWLTHNCGHSEDAGVICSAPQSRPTPSPDTWPTSHASTAGPESSLALRLVNGGDRCQGRVEVLYRGSWGTVCDDSWDTSDANVVCRQLGCGWATSAPGNARFGQGSGPIVLDDVRCSGYESYLWSCPHNGWLSHNCQHSEDAGVICSDTLPTITLPASTVGSESSLALRLVNGGDRCQGRVEVLYRGSWGTVCDDSWDTNDANVVCRQLGCGWAMLAPGNARFGQGSGPIVLDDVRCSGNESYLWSCPHNGWLSHNCGHSEDAGVICSGPESSLALRLVNGGDRCQGRVEVLYRGSWGTVCDDSWDTNDANVVCRQLGCGWATSAPGNARFGQGSGPIVLDDVRCSGHESYLWSCPNNGWLSHNCGHHEDAGVICSAAQSRSTPRPDTLSTITLPPSTVGSESSLTLRLVNGSDRCQGRVEVLYRGSWGTVCDDSWDTNDANVVCRQLGCGWATSAPGNARFGQGSGPIVLDDVRCSGHESYLWSCPHNGWLSHNCGHHEDAGVICSVSQSRPTPSPDTWPTSHASTAGSESSLALRLVNGGDRCQGRVEVLYRGSWGTVCDDSWDTSDANVVCRQLGCGWATSAPGNARFGQGSGPIVLDDVRCSGYESYLWSCPHNGWLSHNCQHSEDAGVICSAAHSWSTPSPDTLPTITLPASTVGSESSLALRLVNGGDRCQGRVEVLYQGSWGTVCDDSWDTNDANVVCRQLGCGWAMSAPGNARFGQGSGPIVLDDVRCSGHESYLWSCPHNGWLSHNCGHSEDAGVICSASQSRPTPSPDTWPTSHASTAGSESSLALRLVNGGDRCQGRVEVLYRGSWGTVCDDYWDTNDANVVCRQLGCGWAMSAPGNARFGQGSGPIVLDDVRCSGHESYLWSCPHNGWLSHNCGHHEDAGVICSASQSQPTPSPDTWPTSHASTAGSESSLALRLVNGGDRCQGRVEVLYRGSWGTVCDDYWDTNDANVVCRQLGCGWATSAPGNARFGQGSGPIVLDDVRCSGHESYLWSCPHNGWLSHNCGHHEDAGVICSASQSQPTPSPDTWPTSHASTAGSESSLALRLVNGGDRCQGRVEVLYRGSWGTVCDDYWDTNDANVVCRQLGCGWATSAPGNARFGQGSGPIVLDDVRCSGHESYLWSCPHNGWLSHNCGHHEDAGVICSASQSQPTPSPDTWPTSRASTAGSESTLALRLVNGGDRCRGRVEVLYQGSWGTVCDDYWDTNDANVVCRQLGCGWAMSAPGNAQFGQGSGPIVLDDVRCSGHESYLWSCPHNGWLSHNCGHHEDAGVICSAAQSQSTPRPDTWLTTNLPALTVGSESSLALRLVNGGDRCRGRVEVLYRGSWGTVCDDSWDTNDANVVCRQLGCGWAMSAPGNARFGQGSGPIVLDDVRCSGNESYLWSCPHKGWLTHNCGHHEDAGVICSATQINSTTTDWWHPTTTTTARPSSNCGGFLFYASGTFSSPSYPAYYPNNAKCVWEIEVNSGYRINLGFSNLKLEAHHNCSFDYVEIFDGSLNSSLLLGKICNDTRQIFTSSYNRMTIHFRSDISFQNTGFLAWYNSFPSDATLRLVNLNSSYGLCAGRVEIYHGGTWGTVCDDSWTIQEAEVVCRQLGCGRAVSALGNAYFGSGSGPITLDDVECSGTESTLWQCRNRGWFSHNCNHREDAGVICSGNHLSTPAPFLNITRPNTDYSCGGFLSQPSGDFSSPFYPGNYPNNAKCVWDIEVQNNYRVTVIFRDVQLEGGCNYDYIEVFDGPYRSSPLIARVCDGARGSFTSSSNFMSIRFISDHSITRRGFRAEYYSSPSNDSTNLLCLPNHMQASVSRSYLQSLGFSASDLVISTWNGYYECRPQITPNLVIFTIPYSGCGTFKQADNDTIDYSNFLTAAVSGGIIKRRTDLRIHVSCRMLQNTWVDTMYIANDTIHVANNTIQVEEVQYGNFDVNISFYTSSSFLYPVTSRPYYVDLNQDLYVQAEILHSDAVLTLFVDTCVASPYSNDFTSLTYDLIRSGCVRDDTYGPYSSPSLRIARFRFRAFHFLNRFPSVYLRCKMVVCRAYDPSSRCYRGCVLRSKRDVGSYQEKVDVVLGPIQLQTPPRREEEPR

SEQ ID NO: 757063 - protein, 1785 aa, Homo sapiens
MGISTVILEMCLLWGQVLSTGGWIPRTTDYASLIPSEVPLDPTVAEGSPFPSESTLESTAAEGSPISLESTLESTVAEGSLIPSESTLESTVAEGSDSGLALRLVNGDGRCQGRVEILYRGSWGTVCDDSWDTNDANVVCRQLGCGWAMSAPGNAWFGQGSGPIALDDVRCSGHESYLWSCPHNGWLSHNCGHGEDAGVICSAAQPQSTLRPESWPVRISPPVPTEGSESSLALRLVNGGDRCRGRVEVLYRGSWGTVCDDYWDTNDANVVCRQLGCGWAMSAPGNAQFGQGSGPIVLDDVRCSGHESYLWSCPHNGWLTHNCGHSEDAGVICSAPQSRPTPSPDTWPTSHASTAGPESSLALRLVNGGDRCQGRVEVLYRGSWGTVCDDSWDTSDANVVCRQLGCGWATSAPGNARFGQGSGPIVLDDVRCSGYESYLWSCPHNGWLSHNCQHSEDAGVICSAAHSWSTPSPDTLPTITLPASTVGSESSLALRLVNGGDRCQGRVEVLYQGSWGTVCDDSWDTNDANVVCRQLGCGWAMSAPGNARFGQGSGPIVLDDVRCSGHESYLWSCPHNGWLSHNCGHSEDAGVICSASQSRPTPSPDTWPTSHASTAGSESSLALRLVNGGDRCQGRVEVLYRGSWGTVCDDYWDTNDANVVCRQLGCGWAMSAPGNARFGQGSGPIVLDDVRCSGHESYLWSCPHNGWLSHNCGHHEDAGVICSASQSQPTPSPDTWPTSHASTAGSESSLALRLVNGGDRCQGRVEVLYRGSWGTVCDDYWDTNDANVVCRQLGCGWATSAPGNARFGQGSGPIVLDDVRCSGHESYLWSCPHNGWLSHNCGHHEDAGVICSASQSQPTPSPDTWPTSRASTAGSESTLALRLVNGGDRCRGRVEVLYQGSWGTVCDDYWDTNDANVVCRQLGCGWAMSAPGNAQFGQGSGPIVLDDVRCSGHESYLWSCPHNGWLSHNCGHHEDAGVICSAAQSQSTPRPDTWLTTNLPALTVGSESSLALRLVNGGDRCRGRVEVLYRGSWGTVCDDSWDTNDANVVCRQLGCGWAMSAPGNARFGQGSGPIVLDDVRCSGNESYLWSCPHKGWLTHNCGHHEDAGVICSATQINSTTTDWWHPTTTTTARPSSNCGGFLFYASGTFSSPSYPAYYPNNAKCVWEIEVNSGYRINLGFSNLKLEAHHNCSFDYVEIFDGSLNSSLLLGKICNDTRQIFTSSYNRMTIHFRSDISFQNTGFLAWYNSFPSDATLRLVNLNSSYGLCAGRVEIYHGGTWGTVCDDSWTIQEAEVVCRQLGCGRAVSALGNAYFGSGSGPITLDDVECSGTESTLWQCRNRGWFSHNCNHREDAGVICSGNHLSTPAPFLNITRPNTDYSCGGFLSQPSGDFSSPFYPGNYPNNAKCVWDIEVQNNYRVTVIFRDVQLEGGCNYDYIEVFDGPYRSSPLIARVCDGARGSFTSSSNFMSIRFISDHSITRRGFRAEYYSSPSNDSTNLLCLPNHMQASVSRSYLQSLGFSASDLVISTWNGYYECRPQITPNLVIFTIPYSGCGTFKQADNDTIDYSNFLTAAVSGGIIKRRTDLRIHVSCRMLQNTWVDTMYIANDTIHVANNTIQVEEVQYGNFDVNISFYTSSSFLYPVTSRPYYVDLNQDLYVQAEILHSDAVLTLFVDTCVASPYSNDFTSLTYDLIRSGCVRDDTYGPYSSPSLRIARFRFRAFHFLNRFPSVYLRCKMVVCRAYDPSSRCYRGCVLRSKRDVGSYQEKVDVVLGPIQLQTPPRREEEPR

SEQ ID NO: 757064 - protein, 2311 aa, Homo sapiens
MGISTVILEMCLLWGQVLSTGGWIPRTTDYASLIPSEVPLDPTVAEGSPFPSESTLESTAAEGSPISLESTLESTVAEGSLIPSESTLESTVAEGSDSGLALRLVNGDGRCQGRVEILYRGSWGTVCDDSWDTNDANVVCRQLGCGWAMSAPGNAWFGQGSGPIALDDVRCSGHESYLWSCPHNGWLSHNCGHGEDAGVICSAAQPQSTLRPESWPVRISPPVPTEGSESSLALRLVNGGDRCRGRVEVLYRGSWGTVCDDYWDTNDANVVCRQLGCGWAMSAPGNAQFGQGSGPIVLDDVRCSGHESYLWSCPHNGWLTHNCGHSEDAGVICSAPQSRPTPSPDTWPTSHASTAGPESSLALRLVNGGDRCQGRVEVLYRGSWGTVCDDSWDTSDANVVCRQLGCGWATSAPGNARFGQGSGPIVLDDVRCSGYESYLWSCPHNGWLSHNCQHSEDAGVICSAAHSWSTPSPDTLPTITLPASTVGSESSLALRLVNGGDRCQGRVEVLYRGSWGTVCDDSWDTNDANVVCRQLGCGWAMLAPGNARFGQGSGPIVLDDVRCSGNESYLWSCPHNGWLSHNCGHSEDAGVICSGPESSLALRLVNGGDRCQGRVEVLYRGSWGTVCDDSWDTNDANVVCRQLGCGWATSAPGNARFGQGSGPIVLDDVRCSGHESYLWSCPNNGWLSHNCGHHEDAGVICSAAQSRSTPRPDTLSTITLPPSTVGSESSLTLRLVNGSDRCQGRVEVLYRGSWGTVCDDSWDTNDANVVCRQLGCGWATSAPGNARFGQGSGPIVLDDVRCSGHESYLWSCPHNGWLSHNCGHHEDAGVICSVSQSRPTPSPDTWPTSHASTAGSESSLALRLVNGGDRCQGRVEVLYRGSWGTVCDDSWDTSDANVVCRQLGCGWATSAPGNARFGQGSGPIVLDDVRCSGYESYLWSCPHNGWLSHNCQHSEDAGVICSAAHSWSTPSPDTLPTITLPASTVGSESSLALRLVNGGDRCQGRVEVLYQGSWGTVCDDSWDTNDANVVCRQLGCGWAMSAPGNARFGQGSGPIVLDDVRCSGHESYLWSCPHNGWLSHNCGHSEDAGVICSASQSRPTPSPDTWPTSHASTAGSESSLALRLVNGGDRCQGRVEVLYRGSWGTVCDDYWDTNDANVVCRQLGCGWAMSAPGNARFGQGSGPIVLDDVRCSGHESYLWSCPHNGWLSHNCGHHEDAGVICSASQSQPTPSPDTWPTSHASTAGSESSLALRLVNGGDRCQGRVEVLYRGSWGTVCDDYWDTNDANVVCRQLGCGWATSAPGNARFGQGSGPIVLDDVRCSGHESYLWSCPHNGWLSHNCGHHEDAGVICSASQSQPTPSPDTWPTSHASTAGSESSLALRLVNGGDRCQGRVEVLYRGSWGTVCDDYWDTNDANVVCRQLGCGWATSAPGNARFGQGSGPIVLDDVRCSGHESYLWSCPHNGWLSHNCGHHEDAGVICSASQSQPTPSPDTWPTSRASTAGSESTLALRLVNGGDRCRGRVEVLYQGSWGTVCDDYWDTNDANVVCRQLGCGWAMSAPGNAQFGQGSGPIVLDDVRCSGHESYLWSCPHNGWLSHNCGHHEDAGVICSAAQSQSTPRPDTWLTTNLPALTVGSESSLALRLVNGGDRCRGRVEVLYRGSWGTVCDDSWDTNDANVVCRQLGCGWAMSAPGNARFGQGSGPIVLDDVRCSGNESYLWSCPHKGWLTHNCGHHEDAGVICSATQINSTTTDWWHPTTTTTARPSSNCGGFLFYASGTFSSPSYPAYYPNNAKCVWEIEVNSGYRINLGFSNLKLEAHHNCSFDYVEIFDGSLNSSLLLGKICNDTRQIFTSSYNRMTIHFRSDISFQNTGFLAWYNSFPSDATLRLVNLNSSYGLCAGRVEIYHGGTWGTVCDDSWTIQEAEVVCRQLGCGRAVSALGNAYFGSGSGPITLDDVECSGTESTLWQCRNRGWFSHNCNHREDAGVICSGNHLSTPAPFLNITRPNTDYSCGGFLSQPSGDFSSPFYPGNYPNNAKCVWDIEVQNNYRVTVIFRDVQLEGGCNYDYIEVFDGPYRSSPLIARVCDGARGSFTSSSNFMSIRFISDHSITRRGFRAEYYSSPSNDSTNLLCLPNHMQASVSRSYLQSLGFSASDLVISTWNGYYECRPQITPNLVIFTIPYSGCGTFKQADNDTIDYSNFLTAAVSGGIIKRRTDLRIHVSCRMLQNTWVDTMYIANDTIHVANNTIQVEEVQYGNFDVNISFYTSSSFLYPVTLRLSPTLCCTWSYGVESDLVPASPKAHGPWRTRCRARSREF

SEQ ID NO: 757065 - protein, 2296 aa, Homo sapiens
MGISTVILEMCLLWGQVLSTGGWIPRTTDYASLIPSEVPLDPTVAEGSPFPSESTLESTAAEGSPISLESTLESTVAEGSLIPSESTLESTVAEGSDSGLALRLVNGDGRCQGRVEILYRGSWGTVCDDSWDTNDANVVCRQLGCGWAMSAPGNAWFGQGSGPIALDDVRCSGHESYLWSCPHNGWLSHNCGHGEDAGVICSAAQPQSTLRPESWPVRISPPVPTEGSESSLALRLVNGGDRCRGRVEVLYRGSWGTVCDDYWDTNDANVVCRQLGCGWAMSAPGNAQFGQGSGPIVLDDVRCSGHESYLWSCPHNGWLTHNCGHSEDAGVICSAPQSRPTPSPDTWPTSHASTAGPESSLALRLVNGGDRCQGRVEVLYRGSWGTVCDDSWDTSDANVVCRQLGCGWATSAPGNARFGQGSGPIVLDDVRCSGYESYLWSCPHNGWLSHNCQHSEDAGVICSAAHSWSTPSPDTLPTITLPASTVGSESSLALRLVNGGDRCQGRVEVLYRGSWGTVCDDSWDTNDANVVCRQLGCGWAMLAPGNARFGQGSGPIVLDDVRCSGNESYLWSCPHNGWLSHNCGHSEDAGVICSGPESSLALRLVNGGDRCQGRVEVLYRGSWGTVCDDSWDTNDANVVCRQLGCGWATSAPGNARFGQGSGPIVLDDVRCSGHESYLWSCPNNGWLSHNCGHHEDAGVICSAAQSRSTPRPDTLSTITLPPSTVGSESSLTLRLVNGSDRCQGRVEVLYRGSWGTVCDDSWDTNDANVVCRQLGCGWATSAPGNARFGQGSGPIVLDDVRCSGHESYLWSCPHNGWLSHNCGHHEDAGVICSVSQSRPTPSPDTWPTSHASTAGSESSLALRLVNGGDRCQGRVEVLYRGSWGTVCDDSWDTSDANVVCRQLGCGWATSAPGNARFGQGSGPIVLDDVRCSGYESYLWSCPHNGWLSHNCQHSEDAGVICSAAHSWSTPSPDTLPTITLPASTVGSESSLALRLVNGGDRCQGRVEVLYQGSWGTVCDDSWDTNDANVVCRQLGCGWAMSAPGNARFGQGSGPIVLDDVRCSGHESYLWSCPHNGWLSHNCGHSEDAGVICSASQSRPTPSPDTWPTSHASTAGSESSLALRLVNGGDRCQGRVEVLYRGSWGTVCDDYWDTNDANVVCRQLGCGWAMSAPGNARFGQGSGPIVLDDVRCSGHESYLWSCPHNGWLSHNCGHHEDAGVICSASQSQPTPSPDTWPTSHASTAGSESSLALRLVNGGDRCQGRVEVLYRGSWGTVCDDYWDTNDANVVCRQLGCGWATSAPGNARFGQGSGPIVLDDVRCSGHESYLWSCPHNGWLSHNCGHHEDAGVICSASQSQPTPSPDTWPTSHASTAGSESSLALRLVNGGDRCQGRVEVLYRGSWGTVCDDYWDTNDANVVCRQLGCGWATSAPGNARFGQGSGPIVLDDVRCSGHESYLWSCPHNGWLSHNCGHHEDAGVICSASQSQPTPSPDTWPTSRASTAGSESTLALRLVNGGDRCRGRVEVLYQGSWGTVCDDYWDTNDANVVCRQLGCGWAMSAPGNAQFGQGSGPIVLDDVRCSGHESYLWSCPHNGWLSHNCGHHEDAGVICSAAQSQSTPRPDTWLTTNLPALTVGSESSLALRLVNGGDRCRGRVEVLYRGSWGTVCDDSWDTNDANVVCRQLGCGWAMSAPGNARFGQGSGPIVLDDVRCSGNESYLWSCPHKGWLTHNCGHHEDAGVICSATQINSTTTDWWHPTTTTTARPSSNCGGFLFYASGTFSSPSYPAYYPNNAKCVWEIEVNSGYRINLGFSNLKLEAHHNCSFDYVEIFDGSLNSSLLLGKICNDTRQIFTSSYNRMTIHFRSDISFQNTGFLAWYNSFPSDATLRLVNLNSSYGLCAGRVEIYHGGTWGTVCDDSWTIQEAEVVCRQLGCGRAVSALGNAYFGSGSGPITLDDVECSGTESTLWQCRNRGWFSHNCNHREDAGVICSGNHLSTPAPFLNITRPNTDYSCGGFLSQPSGDFSSPFYPGNYPNNAKCVWDIEVQNNYRVTVIFRDVQLEGGCNYDYIEVFDGPYRSSPLIARVCDGARGSFTSSSNFMSIRFISDHSITRRGFRAEYYSSPSNDSTNLLCLPNHMQASVSRSYLQSLGFSASDLVISTWNGYYECRPQITPNLVIFTIPYSGCGTFKQADNDTIDYSNFLTAAVSGGIIKRRTDLRIHVSCRMLQNTWVDTMYIANDTIHVANNTIQVEEVQYGNFDVNISFYTSSSFLYPVTPPPPRLMVLGGPVAGRGQESSDLDGP

SEQ ID NO: 757066 - protein, 110 aa, Homo sapiens
GNYNVSNLKQGPAYQLIEIKYASFKKFGPQGQKFARGASVGGRSQTPLSTGAQTPDSGTWDVPLGVIFQLRLSPTLCCTWSYGVESDLVPASPKAHGPWRTRCRARSREF

SEQ ID NO: 757067 - protein, 172 aa, Homo sapiens
GGKKEREKGGRVASRGLGRHPHAPKRARPPRGAPGRRPRPSAAPRWPRPRTPRPARRGPAPSGIMAQVAVSTLPVEEESSSETRMVVTFLVSALESMCKELAKSKAEVACIAVYETDVFVVGTERGCAFVNARTDFQKDFAKYCRCFNFILCIPNLKRIAGKTSTVFSSKLS

SEQ ID NO: 757068 - protein, 111 aa, Homo sapiens
MAPKHKSSDAGNLDRPKRSRKVLPLSEKVKVLDLIRKDKKSYAEVAKIYGKNESSIREIVKKEKEIRASFAVSPPTAKVTATVRDKCLVKMEQALHLWVEEMNRKRVPIDS

SEQ ID NO: 757069 - protein, 111 aa, Homo sapiens; identical to SEQ ID NO: 757068

SEQ ID NO: 757070 - protein, 122 aa, Homo sapiens
SVQRAGFRVTYWPVASISHDGMQVHSGETEILRKAVEDYFCFCYGKALGTTVMVPVPYEKMLRDQSAVVVQGLPEGVAFQHPENYDLATLKWILENKAGISFIINRWPWDGNRCGEIHSITK

SEQ ID NO: 757071 - protein, 55 aa, Homo sapiens
MVTDAERSIVSPSESCGPINVKTEPMEDSGISLKAEAVSVKKESEDPNYYQYNMQ

SEQ ID NO: 757072 - protein, 320 aa, Homo sapiens
GGKKEREKGGRVASRGLGRHPHAPKRARPPRGAPGRRPRPSAAPRWPRPRTPRPARRGPAPSGIMAQVAVSTLPVEEESSSETRMVVTFLVSALESMCKELAKSKAEVACIAVYETDVFVVGTERGCAFVNARTDFQKDFAKYCVAEGLCEVKPPCPVNGMQVHSGETEILRKAVEDYFCFCYGKALGTTVMVPVPYEKMLRDQSAVVVQGLPEGVAFQHPENYDLATLKWILENKAGISFIINRPFLGPESQLGGPGMVTDAERSIVSPSESCGPINVKTEPMEDSGGYQDAFRIKYRPSVVAHACNPSNLGGRGRRIT

SEQ ID NO: 757073 - protein, 313 aa, Homo sapiens
GGKKEREKGGRVASRGLGRHPHAPKRARPPRGAPGRRPRPSAAPRWPRPRTPRPARRGPAPSGIMAQVAVSTLPVEEESSSETRMVVTFLVSALESMCKELAKSKAEVACIAVYETDVFVVGTERGCAFVNARTDFQKDFAKYCVAEGLCEVKPPCPVNGMQVHSGETEILRKAVEDYFCFCYGKALGTTVMVPVPYEKMLRDQSAVVVQGLPEGVAFQHPENYDLATLKWILENKAGISFIINRPFLGPESQLGGPGMVTDAERSIVSPSESCGPINVKTEPMEDSGISLKAEAVSVKKESEDPNYYQYNMQ

SEQ ID NO: 757074 - protein, 121 aa, Homo sapiens
GGKKEREKGGRVASRGLGRHPHAPKRARPPRGAPGRRPRPSAAPRWPRPRTPRPARRGPAPSGIMAQVAVSTLPVEEESSSETRMVVTFLVSALESMRSGLHRSVRNRRVCRRNRERMRFC

SEQ ID NO: 757075 - protein, 172 aa, Homo sapiens; identical to SEQ ID NO: 757067

SEQ ID NO: 757076 - protein, 534 aa, Homo sapiens
MKQEGSARRRGADKAKPPPGGGEQEPPPPPAPQDVEMKEEAATGGGSTGEADGKTAAAAAEHSQRELDTVTLEDIKEHVKQLEKAVSGKEPRFVLRALRMLPSTSRRLNHYVLYKAVQGFFTSNNATRDFLLPFLEEPMDTEADLQFRPRTGKAASTPLLPEVEAYLQLLVVIFMMNSKRYKEAQKISDDLMQKISTQNRRALDLVAAKCYYYHARVYEFLDKLDVVRSFLHARLRTATLRHDADGQATLLNLLLRNYLHYSLYDQAEKLVSKSVFPEQANNNEWARYLYYTGRIKAIQLEYSEARRTMTNALRKAPQHTAVGFKQTVHKLLIVVELLLGEIPDRLQFRQPSLKRSLMPYFLLTQAVRTGNLAKFNQVLDQFGEKFQADGTYTLIIRLRHNVIKTGVRMISLSYSRISLADIAQKLQLDSPEDAEFIVAKAIRDGVIEASINHEKGYVQSKEMIDIYSTREPQLAFHQRISFCLDIHNMSVKAMRFPPKSYNKDLESAEERREREQQDLEFAKEMAEDDDDSFP

SEQ ID NO: 757077 - protein, 534 aa, Homo sapiens; identical to SEQ ID NO: 757076

SEQ ID NO: 757078 - protein, 534 aa, Homo sapiens; identical to SEQ ID NO: 757076

SEQ ID NO: 757079 - protein, 589 aa, Homo sapiens
MKQEGSARRRGADKAKPPPGGGEQEPPPPPAPQDVEMKEEAATGGGSTGEADGKTAAAAAEHSQRELDTVTLEDIKEHVKQLEKAVSGKEPRFVLRALRMLPSTSRRLNHYVLYKAVQGFFTSNNATRDFLLPFLEEPMDTEADLQFRPRTGKAASTPLLPEVEAYLQLLVVIFMMNSKRYKEAQKISDDLMQKISTQNRRALDLVAAKCYYYHARVYEFLDKLDVVRSFLHARLRTATLRHDADGQATLLNLLLRNYLHYSLYDQAEKLVSKSVFPEQANNNEWARYLYYTGEQRGPTHKSEGVSGLPGANFPRGGAEEAHLAPWLVGGELDDPTLLTNFSSPPLPGRIKAIQLEYSEARRTMTNALRKAPQHTAVGFKQTVHKLLIVVELLLGEIPDRLQFRQPSLKRSLMPYFLLTQAVRTGNLAKFNQVLDQFGEKFQADGTYTLIIRLRHNVIKTGVRMISLSYSRISLADIAQKLQLDSPEDAEFIVAKAIRDGVIEASINHEKGYVQSKEMIDIYSTREPQLAFHQRISFCLDIHNMSVKAMRFPPKSYNKDLESAEERREREQQDLEFAKEMAEDDDDSFP

SEQ ID NO: 757080 - protein, 570 aa, Homo sapiens
MKQEGSARRRGADKAKPPPGGGEQEPPPPPAPQDVEMKEEAATGGGSTGEADGKTAAAAAEHSQRELDTVTLEDIKEHVKQLEKAVSGKEPRFVLRALRMLPSTSRRLNHYVLYKAVQGFFTSNNATRDFLLPFLEEPMDTEADLQFRPRTGKAASTPLLPEVEAYLQLLVVIFMMNSKRYKEAQKISDDLMQKISTQNRRALDLVAAKCYYYHARVYEFLDKLDVVRSFLHARLRTATLRHDADGQATLLNLLLRNYLHYSLYDQAEKLVSKSVFPEQANNNEWARYLYYTGRIKAIQLEYSEARRTMTNALRKAPQHTAVGFKQTVHKLLIVVELLLGEIPDRLQFRQPSLKRSLMPYFLLTQGKAGFPTPEPTEAPFSGASYMPVPICIIQSTPVLPAAVRTGNLAKFNQVLDQFGEKFQADGTYTLIIRLRHNVIKTGVRMISLSYSRISLADIAQKLQLDSPEDAEFIVAKAIRDGVIEASINHEKGYVQSKEMIDIYSTREPQLAFHQRISFCLDIHNMSVKAMRFPPKSYNKDLESAEERREREQQDLEFAKEMAEDDDDSFP

SEQ ID NO: 757081 - protein, 562 aa, Homo sapiens
LTADGRRAIVSPWHVVPVKPLVVRMNARMVLCAAGCLLAADKAKPPPGGGEQEPPPPPAPQDVEMKEEAATGGGSTGEADGKTAAAAAEHSQRELDTVTLEDIKEHVKQLEKAVSGKEPRFVLRALRMLPSTSRRLNHYVLYKAVQGFFTSNNATRDFLLPFLEEPMDTEADLQFRPRTGKAASTPLLPEVEAYLQLLVVIFMMNSKRYKEAQKISDDLMQKISTQNRRALDLVAAKCYYYHARVYEFLDKLDVVRSFLHARLRTATLRHDADGQATLLNLLLRNYLHYSLYDQAEKLVSKSVFPEQANNNEWARYLYYTGRIKAIQLEYSEARRTMTNALRKAPQHTAVGFKQTVHKLLIVVELLLGEIPDRLQFRQPSLKRSLMPYFLLTQAVRTGNLAKFNQVLDQFGEKFQADGTYTLIIRLRHNVIKTGVRMISLSYSRISLADIAQKLQLDSPEDAEFIVAKAIRDGVIEASINHEKGYVQSKEMIDIYSTREPQLAFHQRISFCLDIHNMSVKAMRFPPKSYNKDLESAEERREREQQDLEFAKEMAEDDDDSFP

SEQ ID NO: 757082 - protein, 494 aa, Homo sapiens
MKQEGSARRRGADKAKPPPGGGEQEPPPPPAPQDVEMKEEAATGGGSTGEADGKTAAAAAEHSQRELDTVTLEDIKEHVKQLEKAVSGKEPRFVLRALRMLPSTSRRLNHYVLYKAVQGFFTSNNATRDFLLPFLEEPMDTEADLQFRPRTGKAASTPLLPEVEAYLQLLVVIFMMNSKRYKEAQKISDDLMQKISTQNRRALDLVAAKCYYYHARVYEFLDKLDVVRSFLHARLRTATLRHDADGQATLLNLLLRNYLHYSLYDQAEKLVSKSVFPEQANNNEWARYLYYTGRIKAIQLEYSEARRTMTNALRKAPQHTAVGFKQTVHKLLIVVELLLGEIPDRLQFRQPSLKRSLMPYFLLTQAVRTGNLAKFNQVLDQFGEKFQADGTYTLIIRLRHNVIKTGVRMISLSYSRISLADIAQKLQLDSPEDAEFIVAKAIRDGVIEASINHEKGYVQSKEMIDIYSTREPQLAFHQRISFCLDIHNMSVKGW

SEQ ID NO: 757083 - protein, 534 aa, Homo sapiens; identical to SEQ ID NO: 757076

SEQ ID NO: 757084 - protein, 523 aa, Homo sapiens
MKQEGSARRRGADKAKPPPGGGEQEPPPPPAPQDVEMKEEAATGGGSTGEADGKTAAAAAEHSQRELDTVTLEDIKEHVKQLEKAVSGKEPRFVLRALRMLPSTSRRLNHYVLYKAVQGFFTSNNATRDFLLPFLEEPMDTEADLQFRPRTGKAASTPLLPEVEAYLQLLVVIFMMNSKRYKEAQKISDDLMQKISTQNRRALDLVAAKCYYYHARVYEFLDKLDVVRSFLHARLRTATLRHDADGQATLLNLLLRNYLHYSLYDQAEKLVSKSVFPEQANNNEWARYLYYTGRIKAIQLEYSEARRTMTNALRKAPQHTAVGFKQTVHKLLIVVELLLGEIPDRLQFRQPSLKRSLMPYFLLTQAVRTGNLAKFNQVLDQFGEKFQADGTYTLIIRLRHNVIKTGVRMISLSYSRISLADIAQKLQLDSPEDAEFIVAKAIRDGVIEASINHEKGYVQSKEMIDIYSTREPQLAFHQRISFCLDIHNMSVKAMRFPPKSYNKDLESAEFAKEMAEDDDDSFP

SEQ ID NO: 757085 - protein, 289 aa, Homo sapiens
NQARYEAWVVGNYLHYSLYDQAEKLVSKSVFPEQANNNEWARYLYYTGRIKAIQLEYSEARRTMTNALRKAPQHTAVGFKQTVHKLLIVVELLLGEIPDRLQFRQPSLKRSLMPYFLLTQAVRTGNLAKFNQVLDQFGEKFQADGTYTLIIRLRHNVIKTGVRMISLSYSRISLADIAQKLQLDSPEDAEFIVAKAIRDGVIEASINHEKGYVQSKEMIDIYSTREPQLAFHQRISFCLDIHNMSVKAMRFPPKSYNKDLESAEERREREQQDLEFAKEMAEDDDDSFP

SEQ ID NO: 757086 - protein, 520 aa, Homo sapiens
MKQEGSARRRGADKAKPPPGGGEQEPPPPPAPQDVEMKEEAATGGGSTGEADGKTAAAAAEHSQRELDTVTLEDIKEHVKQLEKAVSGKEPRFVLRALRMLPSTSRRLNHYVLYKAVQGFFTSNNATRDFLLPFLEEPMDTEADLQFRPRTGKAASTPLLPEVEAYLQLLVVIFMMNSKRYKEAQKISDDLMQKISTQNRRALDLVAAKCYYYHARVYEFLDKLDVVRSFLHARLRTATLRHDADGQATLLNLLLRNYLHYSLYDQAEKLVSKSVFPEQANNNEWARYLYYTGRIKAIQLEYSEARRTMTNALRKAPQHTAVGFKQTVHKLLIVVELLLGEIPDRLQFRQPSLKRSLMPYFLLTQAVRTGNLAKFNQVLDQFGEKFQADGTYTLIIRLRHNVIKTGVRMISLSYSRISLADIAQKLQLDSPEDAEFIVAKAIRDGVIEASINHEKGYVQSKEMIDIYSTREPQLAFHQRISFCLDIHNMSVKAMRFPPKSYNKDLESAENDLGGKPHVRT

SEQ ID NO: 757087 - protein, 518 aa, Homo sapiens
MKQEGSARRRGADKAKPPPGGGEQEPPPPPAPQDVEMKEEAATGGGSTGEADGKTAAAAAEHSQRELDTVTLEDIKEHVKQLEKAVSGKEPRFVLRALRMLPSTSRRLNHYVLYKAVQGFFTSNNATRDFLLPFLEEPMDTEADLQFRPRTGKAASTPLLPEVEAYLQLLVVIFMMNSKRYKEAQKISDDLMQKISTQNRRALDLVAAKCYYYHARVYEFLDKLDVVRSFLHARLRTATLRHDADGQATLLNLLLRNYLHYSLYDQAEKLVSKSVFPEQANNNEWARYLYYTGRIKAIQLEYSEARRTMTNALRKAPQHTAVGFKQTVHKLLIVVELLLGEIPDRLQFRQPSLKRSLMPYFLLTQAVRTGNLAKFNQVLDQFGEKFQADGTYTLIIRLRHNVIKTGVRMISLSYSRISLADIAQKLQLDSPEDAEFIVAKAIRDGVIEASINHEKGYVQSKEMIDIYSTREPQLAFHQRISFCLDIHNMSVKVRSPWLQSHAWQQHTPPPPERAAGIR

SEQ ID NO: 757088 - protein, 490 aa, Homo sapiens
MKQEGSARRRGADKAKPPPGGGEQEPPPPPAPQDVEMKEEAATGGGSTGEADGKTAAAAAEHSQRELDTVTLEDIKEHVKQLEKAVSGKEPRFVLRALRMLPSTSRRLNHYVLYKAVQGFFTSNNATRDFLLPFLEEPMDTEADLQFRPRTGKAASTPLLPEVEAYLQLLVVIFMMNSKRYKEAQKISDDLMQKISTQNRRALDLVAAKCYYYHARVYEFLDKLDVVRSFLHARLRTATLRHDADGQATLLNLLLRNYLHYSLYDQAEKLVSKSVFPEQANNNEWARYLYYTGRIKAIQLEYSEARRTMTNALRKAPQHTAVGFKQTVHKLLIVVELLLGEIPDRLQFRQPSLKRSLMPYFLLTQAVRTGNLAKFNQVLDQFGEKFQADGTYTLIIRLRHNVIKTGVRMISLSYSRISLADIAQKLQLDSPEDAEFIVAKAIRDGVIEASINHEKGYVQSKEMIDIYSTREPQLAFHQRPWIGHSPYYKV

SEQ ID NO: 757089 - protein, 525 aa, Homo sapiens
MKQEGSARRRGADKAKPPPGGGEQEPPPPPAPQDVEMKEEAATGGGSTGEADGKTAAAAAEHSQRELDTVTLEDIKEHVKQLEKAVSGKEPRFVLRALRMLPSTSRRLNHYVLYKAVQGFFTSNNATRDFLLPFLEEPMDTEADLQFRPRTGKAASTPLLPEVEAYLQLLVVIFMMNSKRYKEAQKISDDLMQKISTQNRRALDLVAAKCYYYHARVYEFLDKLDVVRSFLHARLRTATLRHDADGQATLLNLLLRNYLHYSLYDQAEKLVSKSVFPEQANNNEWARYLYYTGRIKAIQLEYSEARRTMTNALRKAPQHTAVGFKQTVHKLLIVVELLLGEIPDRLQFRQPSLKRSLMPYFLLTQAVRTGNLAKFNQVLDQFGEKFQADGTYTLIIRLRHNVIKTGVRMISLSYSRISLADIAQKLQLDSPEDAEFIVAKAIRDGVIEASINHEKGYVQSKEMNFPTHSSYAAFVQGVGVLGASHPDLPQGSSPAGDLLYSRQEGGQATSPGRVLASSVGAGGEG

SEQ ID NO: 757090 - protein, 170 aa, Homo sapiens
SLGGAWRGSWGGSIGRRFGEKFQADGTYTLIIRLRHNVIKTGVRMISLSYSRISLADIAQKLQLDSPEDAEFIVAKAIRDGVIEASINHEKGYVQSKEMIDIYSTREPQLAFHQRISFCLDIHNMSVKAMRFPPKSYNKDLESAEERREREQQDLEFAKEMAEDDDDSFP

SEQ ID NO: 757091 - protein, 466 aa, Homo sapiens
MKQEGSARRRGADKAKPPPGGGEQEPPPPPAPQDVEMKEEAATGGGSTGEADGKTAAAAAEHSQRELDTVTLEDIKEHVKQLEKAVSGKEPRFVLRALRMLPSTSRRLNHYVLYKAVQGFFTSNNATRDFLLPFLEEPMDTEADLQFRPRTGKAASTPLLPEVEAYLQLLVVIFMMNSKRYKEAQKISDDLMQKISTQNRRALDLVAAKCYYYHARVYEFLDKLDVVRSFLHARLRTATLRHDADGQATLLNLLLRNYLHYSLYDQAEKLVSKSVFPEQANNNEWARYLYYTGRIKAIQLEYSEARRTMTNALRKAPQHTAVGFKQTVHKLLIVVELLLGEIPDRLQFRQPSLKRSLMPYFLLTQAVRTGNLAKFNQVLDQFGEKFQADGTYTLIIRLRHNVIKTGVRMISLSYSRISLADIAQKLQLDSPEDAEFIVAKAIRDGVIEASINHEKGYVQSKEMREG

SEQ ID NO: 757092 - protein, 97 aa, Homo sapiens
LGLESFQRIPVASINHEKGYVQSKEMIDIYSTREPQLAFHQRISFCLDIHNMSVKAMRFPPKSYNKDLESAEERREREQQDLEFAKEMAEDDDDSFP

SEQ ID NO: 757093 - protein, 142 aa, Homo sapiens
SCNLGRGHNVIKTGVRMISLSYSRISLADIAQKLQLDSPEDAEFIVAKAIRDGVIEASINHEKGYVQSKEMIDIYSTREPQLAFHQRISFCLDIHNMSVKAMRFPPKSYNKDLESAEERREREQQDLEFAKEMAEDDDDSFP

SEQ ID NO: 757094 - protein, 539 aa, Homo sapiens
MKQEGSARRRGADKAKPPPGGGEQEPPPPPAPQDVEMKEEAATGGGSTGEADGKTAAAAAEHSQRELDTVTLEDIKEHVKQLEKAVSGKEPRFVLRALRMLPSTSRRLNHYVLYKAVQGFFTSNNATRDFLLPFLEEPMDTEADLQFRPRTGKAASTPLLPEVEAYLQLLVVIFMMNSKRYKEAQKISDDLMQKISTQNRRALDLVAAKCYYYHARVYEFLDKLDVVRSFLHARLRTATLRHDADGQATLLNLLLRNYLHYSLYDQAEKLVSKSVFPEQANNNEWARYLYYTGRIKAIQLEYSEARRTMTNALRKAPQHTAVGFKQTVHKLLIVVELLLGEIPDRLQFRQPSLKRSLMPYFLLTQGKAGFPTPEPTEAPFSGASYMPVPICIIQSTPVLPAAVRTGNLAKFNQVLDQFGEKFQADGTYTLIIRLRHNVIKTGVRMISLSYSRISLADIAQKLQLDSPEDAEFIVAKAIRDGVIEASINHEKGYVQSKEMIDIYSTREPQLAFHQRGRIVLCTPLGSGGLELGCLGLYVF

SEQ ID NO: 757095 - protein, 304 aa, Homo sapiens
MKQEGSARRRGADKAKPPPGGGEQEPPPPPAPQDVEMKEEAATGGGSTGEADGKTAAAAAEHSQRELDTVTLEDIKEHVKQLEKAVSGKEPRFVLRALRMLPSTSRRLNHYVLYKAVQGFFTSNNATRDFLLPFLEEPMDTEADLQFRPRTGKAASTPLLPEVEAYLQLLVVIFMMNSKRYKEAQKISDDLMQKISTQNRRALDLVAAKCYYYHARVYEFLDKLDVVRSFLHARLRTATLRHDADGQATLLNLLLRNYLHYSLYDQAEKLVSKSVFPEQANNNEWARYLYYTGRIQEAIPGLEG

SEQ ID NO: 757096 - protein, 265 aa, Homo sapiens
MKQEGSARRRGADKAKPPPGGGEQEPPPPPAPQDVEMKEEAATGGGSTGEADGKTAAAAAEHSQRELDTVTLEDIKEHVKQLEKAVSGKEPRFVLRALRMLPSTSRRLNHYVLYKAVQGFFTSNNATRDFLLPFLEEPMDTEADLQFRPRTGKAASTPLLPEVEAYLQLLVVIFMMNSKRYKEAQKISDDLMQKISTQNRRALDLVAAKCYYYHARVYEFLDKLDVVRSFLHARLRTATLRHDADGQATSPGRVLASSVGAGGEG

SEQ ID NO: 757097 - protein, 136 aa, Homo sapiens
PSSQPTGCRPGPSHMESSTGKASPRCHIHCVPPFPPPCPVKRVGRLFLFFQHFPQGTVIIPLMPTHRGDAGSAGCVSASPASFPRSSPLFAVPQAMRFPPKSYNKDLESAEERREREQQDLEFAKEMAEDDDDSFP

SEQ ID NO: 757098 - protein, 188 aa, Homo sapiens
MKQEGSARRRGADKAKPPPGGGEQEPPPPPAPQDVEMKEEAATGGGSTGEADGKTAAAAAEHSQRELDTVTLEDIKEHVKQLEKAVSGKEPRFVLRALRMLPSTSRRLNHYVLYKAVQGFFTSNNATRDFLLPFLEEPMDTEADLQFRPRTGKAASTPLLPEVEAYLQLLVVIFMMNSKRYKEVSRMQ

SEQ ID NO: 757099 - protein, 116 aa, Homo sapiens
LCLKFPEASLFKHQSSVSQVLGLANVKAISSLGQKLPTLMGSSCCMVECPLSQPTACPGISKGSCQVCVTPTQKVKLAFEPRGLALWMCITSKGKEMTSFWLRGLARGLRSSDYLD

SEQ ID NO: 757100 - protein, 207 aa, Homo sapiens
MIREAFAEDSGRFTCSAVNEAGTVSTSCYLAVQVSEEFEKETTAVTEKFTTEEKRFVESRDVVMTDTSLTEEQAGPGEPAAPYFITKPVVQKLVEGGSVVFGCQVGGNPKPHVYWKKSGVPLTTGYRYKVSYNKQTGECKLVISMTFADDAGEYTIVVRNKHGETSASASLLEEADYELLMKSQQEMLYQTQVTAFVQEPKVGETAP

SEQ ID NO: 757101 - protein, 648 aa, Homo sapiens
ITSLPPSSLTMNRQVCKKSFSGRSQGFSGRSAVVSGSSRMSCVARSGGAGGGACGFRSGAGSFGSRSLYNLGSNKSISISVAAGSSRAGGFGGGRSSCGFAGGYGGGFGGSYGGGFGGGRGVGSGFGGAGGFGGAGGFGGPGVFGGPGSFGGPGGFGPGGFPGGIQEVIVNQSLLQPLNVEIDPQIGQVKAQEREQIKTLNNKFASFIDKVRFLEQQNKVLETKWELLQQQTTGSGPSSLEPCFESYISFLCKQLDSLLGERGNLEGELKSMQDLVEDFKKKYEDEINKRTAAENEFVGLKKDVDAAFMNKVELQAKVDSLTDEVSFLRTLYEMELSQMQSHASDTSVVLSMDNNRCLDLGSIIAEVRTQYEEIAQRSKSEAEALYQTKLGELQTTAGRHGDDLRNTKSEIMELNRMIQRLRAEIENVKKQNANLQTAIAEAEQRGEMALKDANAKLQDLQTALQKAKDDLARLLRDYQELMNVKLALDVEIATYRKLLEGEECRMSGECQSAVCISVVSNVTSTSGSSGSSRGVFGGVSGSGSGGYKGGSSSSSSSGYGVSGGSGSGYGGVSSGSTGGRGSSGSYQSSSSGSRLGGAGSISVSHSGMGSSSGSIQTSGGSGYKSGGGGSTSIRFSQTTSSSQHSSTK

SEQ ID NO: 757102 - protein, 169 aa, Homo sapiens
MRDRRGPLGTCLAQVQQAGGGDSDKLSCSLKKRMPEGPWPADAPSWMNKPVVDGNSQSEALSLEMRKDPSGAGLWLHSGGPVLPYVRESVRRNPASAATPSTAVGLFPAPTECFARVSCSGVEALGRRDWLGGGPRATDGHRGQCPKGEPRVVTTATPSKSAGNGKFSG

SEQ ID NO: 757103 - protein, 169 aa, Homo sapiens; identical to SEQ ID NO: 757102

SEQ ID NO: 757104 - protein, 123 aa, Homo sapiens
MNKPVVDGNSQSEALSLEMRKDPSGAGLWLHSGGPVLPYVRESVRRNPASAATPSTAVGLFPAPTECFARVSCSGVEALGRRDWLGGGPRATDGHRGQCPKGEPRVVTTATPSKSAGNGKFSG

SEQ ID NO: 757105 - protein, 169 aa, Homo sapiens; identical to SEQ ID NO: 757102

SEQ ID NO: 757106 - protein, 73 aa, Homo sapiens
HTFSVGIMAIMNMSHCCRDFVYGQFWGQFMARFGGLFPTLPCYTSSSSTFLYKLSEIQSGIFLTEAYNLTIFS

SEQ ID NO: 757107 - protein, 36 aa, Homo sapiens
SSTYSSQKPWKHLIPPTLHTIPSDSSGSSNFAQILP

SEQ ID NO: 757108 - protein, 71 aa, Homo sapiens
KMLKMYQSSKKAKEGTEDASPTKQKSPISFFQCVYLDGYNGYGFQFPFTPADRPGESSGQANSPGQKQQGQ

SEQ ID NO: 757109 - protein, 71 aa, Homo sapiens; identical to SEQ ID NO: 757108

SEQ ID NO: 757110 - protein, 80 aa, Homo sapiens
QRDQPACWLAGVMSLGLKKLLASREHGAVVSESVMGAAHQDGNQARPRPCGLSSVEGERLQAPDFTTGWPTVASGPNKDV

SEQ ID NO: 757111 - protein, 1159 aa, Homo sapiens
WPKRLLCPLGSPAEAPFHVQSDPQRAFFAVLAAARLSIWYSRPSVLIVTYKEPAKSSTQFGSYKQAEWRPDSTMIAVSTANGYILFFHITSTRGDKYLYEPVYPKGSPQMKGTPHFKEEQCAPALNLEMRKILDLQAPIMSLQSVLEDLLVATSDGLLHLIHWEGMTNGRKAINLCTVPFSVDLQSSRVGSFLGFTDVHIRDMEYCATLDGFAVVFNDGKVGFITPVSSRFTAEQLHGVWPQDVVDGTCVAVNNKYRLMAFGCVSGSVQVYTIDNSTGAMLLSHKLELTAKQYPDIWNKTGAVKLMRWSPDNSVVIVTWEYGGLSLWSVFGAQLICTLGGDFAYRSDGTKKDPLKINSMSWGAEGYHLWVISGFGSQNTEIESDLRSVVKQPSILLFQFIKSVLTVNPCMSNQEQVLLQGEDRLYLNCGEASQTQNPRSSSTHSEHKPSREKSPFADGGLESQGLSTLLGHRHWHVVQISSTYLESNWPIRFSAIDKLGQNIAVVGKFGFAHYSLLTKKWKLFGNITQEQNMIVTGGLAWWNDFMVLACYNINDRQEELRVYLRTSNLDNAFAHVTKAQAETLLLSVFQDMVIVFRADCSICLYSIERKSDGPNTTAGIQVLQEVSMSRYIPHPFLVVSVTLTSVSTENGITLKMPQQARGAESIMLNLAGQLIMMQRDRSGPQIREKDSNPNNQRKLLPFCPPVVLAQSVENVWTTCRANKQKRHLLEALWLSCGGAGMKVWLPLFPRDHRKPHSFLSQRIMLPFHINIYPLAVLFEDALVLGAVNDTLLYDSLYTRNNAREQLEVLFPFCVVERTSQIYLHHILRQLLVRNLGEQALLLAQSCATLPYFPHVLELMLHEVLEEEATSREPIPDPLLPTVAKFITEFPLFLQTVVHCARKTEYALWNYLFAAVGNPKDLFEECLMAQDLDTAASYLIILQNMEVPAVSRQHATLLFNTALEQGKWDLCRHMIRFLKAIGSGESETPPSTPTAQEPSSSGGFEFFRNRSISLSQSAENVPASKFSLQKTLSMPSGPSGKRWSKDSDCAENMYIDMMLWRHARRLLEDVRLKDLGCFAAQLGFELISWLCKERTRAARVDNFVIALKRLHKDFLWPLPIIPASSISSPFKNGKYRTGNVDFMSLVQGELYFTPCIYTFCY

SEQ ID NO: 757112 - protein, 1252 aa, Homo sapiens
MTNGRKAINLCTVPFSVDLQSSRVGSFLGFTDVHIRDMEYCATLDGFAVVFNDGKVGFITPVSSRFTAEQLHGVWPQDVVDGTCVAVNNKYRLMAFGCVSGSVQVYTIDNSTGAMLLSHKLELTAKQYPDIWNKTGAVKLMRWSPDNSVVIVTWEYGGLSLWSVFGAQLICTLGGDFAYRSDGTKKDPLKINSMSWGAEGYHLWVISGFGSQNTEIESDLRSVVKQPSILLFQFIKSVLTVNPCMSNQEQVLLQGEDRLYLNCGEASQTQNPRSSSTHSEHKPSREKSPFADGGLESQGLSTLLGHRHWHVVQISSTYLESNWPIRFSAIDKLGQNIAVVGKFGFAHYSLLTKKWKLFGNITQEQNMIVTGGLAWWNDFMVLACYNINDRQEELRVYLRTSNLDNAFAHVTKAQAETLLLSVFQDMVIVFRADCSICLYSIERKSDGPNTTAGIQVLQEVSMSRYIPHPFLVVSVTLTSVSTENGITLKMPQQARGAESIMLNLAGQLIMMQRDRSGPQIREKDSNPNNQRKLLPFCPPVVLAQSVENVWTTCRANKQKRHLLEALWLSCGGAGMKVWLPLFPRDHRKPHSFLSQRIMLPFHINIYPLAVLFEDALVLGAVNDTLLYDSLYTRNNAREQLEVLFPFCVVERTSQIYLHHILRQLLVRNLGEQALLLAQSCATLPYFPHVLELMLHEVLEEEATSREPIPDPLLPTVAKFITEFPLFLQTVVHCARKTEYALWNYLFAAVGNPKDLFEECLMAQDLDTAASYLIILQNMEVPAVSRQHATLLFNTALEQGKWDLCRHMIRFLKAIGSGESETPPSTPTAQEPSSSGGFEFFRNRSISLSQSAENVPASKFSLQKTLSMPSGPSGKRWSKDSDCAENMYIDMMLWRHARRLLEDVRLKDLGCFAAQLGFELISWLCKERTRAARVDNFVIALKRLHKDFLWPLPIIPASSISSPFKNGKYRTVGEQLLKSQSADPFLNLEMDAGISNIQRSQSWLSNIGPTHHEIDTASSHGPQMQDAFLSPLSNKGDECSIGSATDLTESSSMVDGDWTMVDENFSTLSLTQSELEHISMELASKGPHKSQVQLRYLLHIFMEAGCLDWCIVIGLILRESSIINQILVITQSSEVDGEMLQNIKTGLHAVDRWASTDCPGYKPFLNIIKPQLQKLSEITEEQVQPDAFQPITMGKTPEQTSPRAEESRGSSSHGSIPQGEVGSSNMVSRKEEDTAQAEEEEPFQDGTYDCSVS

SEQ ID NO: 757113 - protein, 1252 aa, Homo sapiens; identical to SEQ ID NO: 757112

SEQ ID NO: 757114 - protein, 1252 aa, Homo sapiens; identical to SEQ ID NO: 757112

SEQ ID NO: 757115 - protein, 1240 aa, Homo sapiens
MTNGRKAINLCTVPFSVDLQSSRVGSFLGFTDVHIRDMEYCATLDGFAVVFNDGKVGFITPVSSRFTAEQLHGVWPQDVVDGTCVAVNNKYRLMAFGCVSGSVQVYTIDNSTGAMLLSHKLELTAKQYPDIWNKTGAVKLMRWSPDNSVVIVTWEYGGLSLWSVFGAQLICTLGGDFAYRSDGTKKDPLKINSMSWGAEGYHLWVISGFGSQNTEIESDLRSVVKQPSILLFQFIKSVLTVNPCMSNQEQVLLQGEDRLYLNCGEASQTQNPRSSSTHSEHKPSREKSPFADGGLESQGLSTLLGHRHWHVVQISSTYLESNWPIRFSAIDKLGQNIAVVGKFGFAHYSLLTKKWKLFGNITQEQNMIVTGGLAWWNDFMVLACYNINDRQEELRVYLRTSNLDNAFAHVTKAQAETLLLSVFQDMVIVFRADCSICLYSIERKSDGPNTTAGIQVLQEVSMSRYIPHPFLVVSVTLTSVSTENGITLKMPQQARGAESIMLNLAGQLIMMQRDRSGPQIREKDSNPNNQRKLLPFCPPVVLAQSVENVWTTCRANKQKRHLLEALWLSCGGAGMKVWLPLFPRDHRKPHSFLSQRIMLPFHINIYPLAVLFEDALVLGAVNDTLLYDSLYTRNNAREQLEVLFPFCVVERTSQIYLHHILRQLLVRNLGEQALLLAQSCATLPYFPHVLELMLHEVLEEEATSREPIPDPLLPTVAKFITEFPLFLQTVVHCARKTEYALWNYLFAAVGNPKDLFEECLMAQDLDTAASYLIILQNMEVPAVSRQHATLLFNTALEQGKWDLCRHMIRFLKAIGSGESETPPSTPTAQEPSSSGGFEFFRNRSISLSQSAENVPASKFSLQKTLSMPSGPSGKRWSKDSDCAENMYIDMMLWRHARRLLEDVRLKDLGCFAAQLGFELISWLCKERTRAARVDNFVIALKRLHKDFLWPLPIIPASSISSPFKNGKYRTVGEQLLKSQSADPFLNLEMDAGISNIQRSQSWLSNIGPTHHEIDTASSHGPQMQDAFLSPLSNKGDECSIGSATDLTESSSMVDGDWTMVDENFSTLSLTQSELEHISMELASKGPHKSQVQLRYLLHIFMEAGCLDWCIVIGLILRESSIINQILVITQSSEVDGEMLQNIKTGLHAVDRWASTDCPGYKPFLNIIKPQLQKLSEITEEQVQPDAFQPITMGKTPEQTSPRAEESRGSSSHGSIPQGEVGSSNMVSRKEEDTAQAEEVW

SEQ ID NO: 757116 - protein, 31 aa, Homo sapiens
IRSFDKDPLSGPIFRDSNRSGVCTGTGVFKI

SEQ ID NO: 757117 - protein, 154 aa, Homo sapiens
AERVWLHLHRYLSADRRVLGLREWGRPASERECSLCQRLKRELNMGDVEKGKKIFIMKCSQCHTVEHREASTRLGQNLHGLFGAEDRSGPWILLHSRQIRTKGHSSWGEGYTGWSIWENSPRRYNSPGNQKMIFVGIKKKEERADLIGLSQKSY

SEQ ID NO: 757118 - protein, 110 aa, Homo sapiens
MGDVEKGKKIFIMKCSQCHTVEHREASTRLGQNLHGLFGAEDRSGPWILLHSRQIRTKGHSSWGEGYTGWSIWENSPRRYNSPGNQKMIFVGIKKKEERADLIGLSQKSY

SEQ ID NO: 757119 - protein, 122 aa, Homo sapiens
HAVHPNMLASMRAQVLGAGIGTGANEVRRRYCVAPARPHVRAREAERVWLHLHRYLSADRRVLGLREWGRPASERECSLCQRLKRGESGSRRPHLVRGRAVGGAHLRATETQAGSIRVEPAL

SEQ ID NO: 757120 - protein, 110 aa, Homo sapiens; identical to SEQ ID NO: 757118

SEQ ID NO: 757121 - protein, 103 aa, Homo sapiens
SAPRVSTVGLLCSGAGPHLCPCAEEGTGGLESQGEIIPSRGSRKWPDGVSGSRRLFSSLCKSQEGSRKECLRKHRRLGPAMPVSSPGFPGPYGSFGTPPGYGC

SEQ ID NO: 757122 - protein, 55 aa, Homo sapiens
SAPRVSTVGLLCSGAGPHLCPCAEEGTGGLESQGEIIPSRGSRKMARSEHHLDTA

SEQ ID NO: 757123 - protein, 120 aa, Homo sapiens
MAAIRKKLVIVGDGACGKTCLLIVFSKDQFPEVYVPTVFENYVADIEVDGKQVELALWDTAGQEDYDRLRPLSYPDTDVILMCFSIDSPDSLASWLGITKDLRNDEHTRRELSQDEAGSR

SEQ ID NO: 757124 - protein, 111 aa, Homo sapiens
MAAIRKTCLLIVFSKDQFPEVYVPTVFENYVADIEVDGKQVELALWDTAGQEDYDRLRPLSYPDTDVILMCFSIDSPDSLENIPEKWTPEVKHFCPNVPIILVGNNEGSSE

SEQ ID NO: 757125 - protein, 123 aa, Homo sapiens
MAAIRKKLVIVGDGACGKTCLLIVFSKDQFPEVYVPTVFENYVADIEVDGKQVELALWDTAGQEDYDRLRPLSYPDTDVILMCFSIDSPDSLENIPEKWTPEVKHFCPNVPIILVGNNEGSSE

SEQ ID NO: 757126 - protein, 123 aa, Homo sapiens; identical to SEQ ID NO: 757125

SEQ ID NO: 757127 - protein, 123 aa, Homo sapiens; identical to SEQ ID NO: 757125

SEQ ID NO: 757128 - protein, 123 aa, Homo sapiens; identical to SEQ ID NO: 757125

SEQ ID NO: 757129 - protein, 123 aa, Homo sapiens; identical to SEQ ID NO: 757125

SEQ ID NO: 757130 - protein, 123 aa, Homo sapiens; identical to SEQ ID NO: 757125

SEQ ID NO: 757131 - protein, 123 aa, Homo sapiens; identical to SEQ ID NO: 757125

SEQ ID NO: 757132 - protein, 123 aa, Homo sapiens; identical to SEQ ID NO: 757125

SEQ ID NO: 757133 - protein, 123 aa, Homo sapiens; identical to SEQ ID NO: 757125

SEQ ID NO: 757134 - protein, 123 aa, Homo sapiens; identical to SEQ ID NO: 757125

SEQ ID NO: 757135 - protein, 120 aa, Homo sapiens; identical to SEQ ID NO: 757123

SEQ ID NO: 757136 - protein, 155 aa, Homo sapiens
MAAIRKKLVIVGDGACGKTCLLIVFSKDQFPEVYVPTVFENYVADIEVDGKQVELALWDTAGQEDYDRLRPLSYPDTDVILMCFSIDSPDSLENIPEKWTPEVKHEPVKPGKKGRDMANRIGAFGYMAVFTQRPKDGVDERRFLKLATKKLLCKA

SEQ ID NO: 757137 - protein, 77 aa, Homo sapiens
LRVTISSPPFAHRNRYTEVTLLLTTAQEPVKPGKKGRDMANRIGAFGYMAVFTQRPKDGVDERRFLKLATKKLLCKA

SEQ ID NO: 757138 - protein, 123 aa, Homo sapiens; identical to SEQ ID NO: 757125

SEQ ID NO: 757139 - protein, 109 aa, Homo sapiens
MAAIRKKLVIVGDGACGKTCLLIVFSKDQFPEVYVPTVFENYVADIEVDGKQVELALWDTAGQEDYDRLRPLSYPDTDVILMCFSIDSPDSLDGRRFLKLATKKLLCKA

SEQ ID NO: 757140 - protein, 123 aa, Homo sapiens; identical to SEQ ID NO: 757125

SEQ ID NO: 757141 - protein, 123 aa, Homo sapiens; identical to SEQ ID NO: 757125

SEQ ID NO: 757142 - protein, 123 aa, Homo sapiens; identical to SEQ ID NO: 757125

SEQ ID NO: 757143 - protein, 123 aa, Homo sapiens; identical to SEQ ID NO: 757125

SEQ ID NO: 757144 - protein, 99 aa, Homo sapiens
RTGPHRSTGPNSSLKYTANSPARPPLMPRVATSRPVQLACRPWDEKVYGLLFLLVCQQAPATNRIGAFGYMAVFTQRPKDGVDERRFLKLATKKLLCKA

SEQ ID NO: 757145 - protein, 150 aa, Homo sapiens
ARYSSGRQAAAPPRPRPTGCSWPSRPWPLTLDLTPSPGPAPQAATPPAQSPEARPVVSCAPSPARPGLVEPRLPACPPSVPGASSPSSAGQGGGFGPGPATAQCSRPLKARVAVGVEMGKKLFTTPFCFLRLTRNDNHCFILIKVQLHFG

SEQ ID NO: 757146 - protein, 123 aa, Homo sapiens; identical to SEQ ID NO: 757125

SEQ ID NO: 757147 - protein, 123 aa, Homo sapiens; identical to SEQ ID NO: 757125

SEQ ID NO: 757148 - protein, 123 aa, Homo sapiens; identical to SEQ ID NO: 757125

SEQ ID NO: 757149 - protein, 123 aa, Homo sapiens; identical to SEQ ID NO: 757125

SEQ ID NO: 757150 - protein, 123 aa, Homo sapiens; identical to SEQ ID NO: 757125

SEQ ID NO: 757151 - protein, 123 aa, Homo sapiens; identical to SEQ ID NO: 757125

SEQ ID NO: 757152 - protein, 123 aa, Homo sapiens; identical to SEQ ID NO: 757125

SEQ ID NO: 757153 - protein, 123 aa, Homo sapiens; identical to SEQ ID NO: 757125

SEQ ID NO: 757154 - protein, 88 aa, Homo sapiens
PHHPLSPLRPLTKSRYEAWVFRPRSLALPSRRPRSSVGSLVSPRSGLQLPAFVSEFATRGPASPARRGWTRIRCLSNGCHPEETGDCW

SEQ ID NO: 757155 - protein, 123 aa, Homo sapiens; identical to SEQ ID NO: 757125

SEQ ID NO: 757156 - protein, 123 aa, Homo sapiens; identical to SEQ ID NO: 757125

SEQ ID NO: 757157 - protein, 102 aa, Homo sapiens
MAAIRKKLVIVGDGACGKTCLLIVFSKDQFPEVYVPTVFENYVADIEVDGKQEPVKPGKKGRDMANRIGAFGYMAVFTQRPKDGVDERRFLKLATKKLLCKA

SEQ ID NO: 757158 - protein, 123 aa, Homo sapiens; identical to SEQ ID NO: 757125

SEQ ID NO: 757159 - protein, 123 aa, Homo sapiens; identical to SEQ ID NO: 757125

SEQ ID NO: 757160 - protein, 123 aa, Homo sapiens; identical to SEQ ID NO: 757125

SEQ ID NO: 757161 - protein, 123 aa, Homo sapiens; identical to SEQ ID NO: 757125

SEQ ID NO: 757162 - protein, 123 aa, Homo sapiens; identical to SEQ ID NO: 757125

SEQ ID NO: 757163 - protein, 126 aa, Homo sapiens
MLADLPCRAKNASTCNCPSITSAWLFAEGNQRRKFSPTAPTQLMEQSPTWHSPKLGSDATYFQNTGKILKPAGELSGPACTHSSTPQAFVPGSPGMMGSQGAQGQRRQTHSCRVPENGGWPGIRAA

SEQ ID NO: 757164 - protein, 568 aa, Homo sapiens
SPIGAARFASAAQPPAQVALWTLQPRSEAAGRLRDHGGRSLGLRAMAAVAVAVREDSGSGMKAELPPGPGAVGREMTKEEKLQLRKEKKQQKKKRKEEKGAEPETGSAVSAAQCQVGPTRELPESGIQLGTPREKVPAGRSKAELRAERRAKQEAERALKQARKGEQGGPPPKASPSTAGETPSGVKRLPEYPQVDDLLLRRLVKKPERQQVPTRKDYGSKVSLFSHLPQYSRQNSLTQFMSIPSSVIHPAMVRLGLQYSQGLVSGSNARCIALLRALQQVIQDYTTPPNEELSRDLVNKLKPYMSFLTQCRPLSASMHNAIKFLNKEITSVGSSKREEEAKSELRAAIDRYVQEKIVLAAQAISRFAYQKISNGDVILVYGCSSLVSRILQEAWTEGRRFRVVVVDSRPWLEGRHTLRSLVHAGVPASYLLIPAASYVLPEVSKVLLGAHALLANGSVMSRVGTAQLALVARAHNVPVLVCCETYKFCERVQTDAFVSNELDDPDDLQCKRGEHVALANWQNHASLRLLNLVYDVTPPELVDLVITELGMIPCSSVPVVLRVKSSDQ

SEQ ID NO: 757165 - protein, 508 aa, Homo sapiens
MKAELPPGPGAVGREMTKEEKLQLRKEKKQQKKKRKEEKGAEPETGSAVSAAQCQVGPTRELPESGIQLGTPREKVPAGRSKAELRAERRAKQEAERALKQARKGEQGGPPPKASPSTAGETPSGVKRLPEYPQVDDLLLRRLVKKPERQQVPTRKDYGSKVSLFSHLPQYSRQNSLTQFMSIPSSVIHPAMVRLGLQYSQGLVSGSNARCIALLRALQQVIQDYTTPPNEELSRDLVNKLKPYMSFLTQCRPLSASMHNAIKFLNKEITSVGSSKREEEAKSELRAAIDRYVQEKIVLAAQAISRFAYQKISNGDVILVYGCSSLVSRILQEAWTEGRRFRVVVVDSRPWLEGRHTLRSLVHAGVPASYLLIPAASYVLPEVSKVLLGAHALLANGSVMSRVGTAQLALVARAHNVPVLVCCETYKFCERVQTDAFVSNELDDPDDLQCKRGEHVALANWQNHASLRLLNLVYDVTPPELVDLVITELGMIPCSSVPVVLRVKSSDQ

SEQ ID NO: 757166 - protein, 544 aa, Homo sapiens
MPTQQPAAPSTRAPKPSRSLSGSLCALFSDADSGSGMKAELPPGPGAVGREMTKEEKLQLRKEKKQQKKKRKEEKGAEPETGSAVSAAQCQVGPTRELPESGIQLGTPREKVPAGRSKAELRAERRAKQEAERALKQARKGEQGGPPPKASPSTAGETPSGVKRLPEYPQVDDLLLRRLVKKPERQQVPTRKDYGSKVSLFSHLPQYSRQNSLTQFMSIPSSVIHPAMVRLGLQYSQGLVSGSNARCIALLRALQQVIQDYTTPPNEELSRDLVNKLKPYMSFLTQCRPLSASMHNAIKFLNKEITSVGSSKREEEAKSELRAAIDRYVQEKIVLAAQAISRFAYQKISNGDVILVYGCSSLVSRILQEAWTEGRRFRVVVVDSRPWLEGRHTLRSLVHAGVPASYLLIPAASYVLPEVSKVLLGAHALLANGSVMSRVGTAQLALVARAHNVPVLVCCETYKFCERVQTDAFVSNELDDPDDLQCKRGEHVALANWQNHASLRLLNLVYDVTPPELVDLVITELGMIPCSSVPVVLRVKSSDQ

SEQ ID NO: 757167 - protein, 529 aa, Homo sapiens
HASPTRRAAVAVAVREDSGSGMKAELPPGPGAVGREMTKEEKLQLRKEKKQQKKKRKEEKGAEPETGSAVSAAQCQVGPTRELPESGIQLGTPREKVPAGRSKAELRAERRAKQEAERALKQARKGEQGGPPPKASPSTAGETPSGVKRLPEYPQVDDLLLRRLVKKPERQQVPTRKDYGSKVSLFSHLPQYSRQNSLTQFMSIPSSVIHPAMVRLGLQYSQGLVSGSNARCIALLRALQQVIQDYTTPPNEELSRDLVNKLKPYMSFLTQCRPLSASMHNAIKFLNKEITSVGSSKREEEAKSELRAAIDRYVQEKIVLAAQAISRFAYQKISNGDVILVYGCSSLVSRILQEAWTEGRRFRVVVVDSRPWLEGRHTLRSLVHAGVPASYLLIPAASYVLPEVSKVLLGAHALLANGSVMSRVGTAQLALVARAHNVPVLVCCETYKFCERVQTDAFVSNELDDPDDLQCKRGEHVALANWQNHASLRLLNLVYDVTPPELVDLVITELGMIPCSSVPVVLRVKSSDQ

SEQ ID NO: 757168 - protein, 523 aa, Homo sapiens
MAAVAVAVREDSGSGMKAELPPGPGAVGREMTKEEKLQLRKEKKQQKKKRKEEKGAEPETGSAVSAAQCQVGPTRELPESGIQLGTPREKVPAGRSKAELRAERRAKQEAERALKQARKGEQGGPPPKASPSTAGETPSGVKRLPEYPQVDDLLLRRLVKKPERQQVPTRKDYGSKVSLFSHLPQYSRQNSLTQFMSIPSSVIHPAMVRLGLQYSQGLVSGSNARCIALLRALQQVIQDYTTPPNEELSRDLVNKLKPYMSFLTQCRPLSASMHNAIKFLNKEITSVGSSKREEEAKSELRAAIDRYVQEKIVLAAQAISRFAYQKISNGDVILVYGCSSLVSRILQEAWTEGRRFRVVVVDSRPWLEGRHTLRSLVHAGVPASYLLIPAASYVLPEVSKVLLGAHALLANGSVMSRVGTAQLALVARAHNVPVLVCCETYKFCERVQTDAFVSNELDDPDDLQCKRGEHVALANWQNHASLRLLNLVYDVTPPELVDLVITELGMIPCSSVPVVLRVKSSDQ

SEQ ID NO: 757169 - protein, 631 aa, Homo sapiens
SPIGAARFASAAQPPAQVALWTLQPRSEAAGRLRDHGGRSLGLRAMAAVAVAVREDSGSGMKAELPPGPGAVGREMTKEEKLQLRKEKKQQKKKRKEEKGAEPETGSAVSAAQCQVGPTRELPESGIQLGTPREKVPAGRSKAELRAERRAKQEAERALKQARKGEQGGPPPKASPSTAGETPSGVKRLPEYPQVDDLLLRRLVKKPERQQVGSGFGAWLERAWEMDWREERCWVQSEKDRCLGQSSLTVHFLSSFIPSFLNSGPLVLFPCFVKVPTRKDYGSKVSLFSHLPQYSRQNSLTQFMSIPSSVIHPAMVRLGLQYSQGLVSGSNARCIALLRALQQVIQDYTTPPNEELSRDLVNKLKPYMSFLTQCRPLSASMHNAIKFLNKEITSVGSSKREEEAKSELRAAIDRYVQEKIVLAAQAISRFAYQKISNGDVILVYGCSSLVSRILQEAWTEGRRFRVVVVDSRPWLEGRHTLRSLVHAGVPASYLLIPAASYVLPEVSKVLLGAHALLANGSVMSRVGTAQLALVARAHNVPVLVCCETYKFCERVQTDAFVSNELDDPDDLQCKRGEHVALANWQNHASLRLLNLVYDVTPPELVDLVITELGMIPCSSVPVVLRVKSSDQ

SEQ ID NO: 757170 - protein, 317 aa, Homo sapiens
MVRLGLQYSQGLVSGSNARCIALLRALQQVIQDYTTPPNEELSRDLVNKLKPYMSFLTQCRPLSASMHNAIKFLNKEITSVGSSKREEEAKSELRAAIDRYVQEKIVLAAQAISRFAYQKISNGDVILVYGCSSLVSRILQEAWTEGRRFRVVVVDSRPWLEGRHTLRSLVHAGVPASYLLIPAASYVLPEVSKVLLGAHALLANGSVMSRVGTAQLALVARAHNVPVLVCCETYKFCERVQTDAFVSNELDDPDDLQCKRGEHVALANWQNHASLRLLNLVYDVTPPELVDLVITELGMIPCSSVPVVLRVKSSDQ

SEQ ID NO: 757171 - protein, 529 aa, Homo sapiens; identical to SEQ ID NO: 757167

SEQ ID NO: 757172 - protein, 370 aa, Homo sapiens
HASPTRRAAVAVAVREDSGSGMKAELPPGPGAVGREMTKEEKLQLRKEKKQQKKKRKEEKGAEPETGSAVSAAQCQVGPTRELPESGIQLGTPREKVPAGRSKAELRAERRAKQEAERALKQARKGEQGGPPPKASPSTAGETPSGVKRLPEYPQVDDLLLRRLVKKPERQQVPTRKDYGSKVSLFSHLPQYSRQNSLTQFMSIPSSVIHPAMVRLGLQYSQGLVSGSNARCIALLRALQQVIQDYTTPPNEELSRDLVNKLKPYMSFLTQCRPLSASMHNAIKFLNKEITSVGSSKREEEAKSELRAAIDRYVQEKIVLAAQAISRFAYQKISNGDVILVYGWYGPDLVTEQIGSWNDLKKGLPTCLWE

SEQ ID NO: 757173 - protein, 334 aa, Homo sapiens
HASPTRRAAVAVAVREDSGSGMKAELPPGPGAVGREMTKEEKLQLRKEKKQQKKKRKEEKGAEPETGSAVSAAQCQVGPTRELPESGIQLGTPREKVPAGRSKAELRAERRAKQEAERALKQARKGEQGGPPPKASPSTAGETPSGVKRLPEYPQVDDLLLRRLVKKPERQQVPTRKDYGSKVSLFSHLPQYSRQNSLTQFMSIPSSVIHPAMVRLGLQYSQGLVSGSNARCIALLRALQQVIQDYTTPPNEELSRDLVNKLKPYMSFLTQCRPLSASMHNAIKFLNKEITSVGSSKREEEVMSMRNKEGMHLWVKLRNMLKTPGKANVSLFLP

SEQ ID NO: 757174 - protein, 497 aa, Homo sapiens
HASPTRRAAVAVAVREDSGSGMKAELPPGPGAVGREMTKEEKLQLRKEKKQQKKKRKEEKGAEPETGSAVSAAQCQVGPTRELPESGIQLGTPREKVPAGRSKAELRAERRAKQEAERALKQARKGEQGGPPPKASPSTAGETPSGVKRLPEYPQVDDLLLRRLVKKPERQQVPTRKDYGSKVSLFSHLPQYSRQNSLTQFMSIPSSVIHPAMVRLGLQYSQGLVSGSNARCIALLRALQQVIQDYTTPPNEELSRDLVNKLKPYMSFLTQCRPLSASMHNAIKFLNKEITSVGSSKREEEAKSELRAAIDRSSLVSRILQEAWTEGRRFRVVVVDSRPWLEGRHTLRSLVHAGVPASYLLIPAASYVLPEVSKVLLGAHALLANGSVMSRVGTAQLALVARAHNVPVLVCCETYKFCERVQTDAFVSNELDDPDDLQCKRGEHVALANWQNHASLRLLNLVYDVTPPELVDLVITELGMIPCSSVPVVLRVKSSDQ

SEQ ID NO: 757175 - protein, 514 aa, Homo sapiens
MAAVAVAVREDSGSGMKAELPPGPGAVGREMTKEEKLQLRKEKKQQKKKRKEEKGAEPETGSAVSAAQCQVGPTRELPESGIQLGTPREKVPAGRSKAELRAERRAKQEAERALKQARKGEQGGPPPKASPSTAGETPSGVKRLPEYPQVDDLLLRRLVKKPERQQVPTRKDYGSKVSLFSHLPQYSRQNSLTQFMSMVRLGLQYSQGLVSGSNARCIALLRALQQVIQDYTTPPNEELSRDLVNKLKPYMSFLTQCRPLSASMHNAIKFLNKEITSVGSSKREEEAKSELRAAIDRYVQEKIVLAAQAISRFAYQKISNGDVILVYGCSSLVSRILQEAWTEGRRFRVVVVDSRPWLEGRHTLRSLVHAGVPASYLLIPAASYVLPEVSKVLLGAHALLANGSVMSRVGTAQLALVARAHNVPVLVCCETYKFCERVQTDAFVSNELDDPDDLQCKRGEHVALANWQNHASLRLLNLVYDVTPPELVDLVITELGMIPCSSVPVVLRVKSSDQ

SEQ ID NO: 757176 - protein, 267 aa, Homo sapiens
HASPTRRAAVAVAVREDSGSGMKAELPPGPGAVGREMTKEEKLQLRKEKKQQKKKRKEEKGAEPETGSAVSAAQCQVGPTRELPESGIQLGTPREKVPAGRSKAELRAERRAKQEAERALKQARKGEQGGPPPKASPSTAGETPSGVKRLPEYPQVDDLLLRRLVKKPERQQVPTRKDYGSKVSLFSHLPQYSRQNSLTQFMSIPSSVIHPAMVRLGLQYSQGLVSGSNARCIALLRALQQVIQDYTTPPNEELSRDLVNKLKPYMR

SEQ ID NO: 757177 - protein, 529 aa, Homo sapiens; identical to SEQ ID NO: 757167

SEQ ID NO: 757178 - protein, 529 aa, Homo sapiens; identical to SEQ ID NO: 757167

SEQ ID NO: 757179 - protein, 317 aa, Homo sapiens; identical to SEQ ID NO: 757170

SEQ ID NO: 757180 - protein, 332 aa, Homo sapiens
MPTQQPAAPSTRAPKPSRSLSGSLCALFSDADSGSGMKAELPPGPGAVGREMTKEEKLQLRKEKKQQKKKRKEEKGAEPETGSAVSAAQCQVGPTRELPESGIQLGTPREKVPAGRSKAELRAERRAKQEAERALKQARKGEQGGPPPKASPSTAGETPSGVKRLPEYPQVDDLLLRRLVKKPERQQVPTRKDYGSKVSLFSHLPQYSRQNSLTQFMSIPSSVIHPAMVRLGLQYSQGLVSGSNARCIALLRALQQVCPILFSLMIQPHLPQYYPSFCHPRSSLGDRGNTPTLRTFSSVKLTPSPRSEIFIKGYFADHLVYPIGDSGLHNTA

SEQ ID NO: 757181 - protein, 332 aa, Homo sapiens; identical to SEQ ID NO: 757180

SEQ ID NO: 757182 - protein, 295 aa, Homo sapiens
GRVGPDAWVRTRGSGRVGRPTRPLVNKLKPYMSFLTQCRPLSASMHNAIKFLNKEITSVGSSKREEEAKSELRAAIDRYVQEKIVLAAQAISRFAYQKISNGDVILVYGCSSLVSRILQEAWTEGRRFRVVVVDSRPWLEGRHTLRSLVHAGVPASYLLIPAASYVLPEVSKVLLGAHALLANGSVMSRVGTAQLALVARAHNVPVLVCCETYKFCERVQTDAFVSNELDDPDDLQCKRGEHVALANWQNHASLRLLNLVYDVTPPELVDLVITELGMIPCSSVPVVLRVKSSDQ

SEQ ID NO: 757183 - protein, 418 aa, Homo sapiens
HASPTRRAAVAVAVREDSGSGMKAELPPGPGAVGREMTKEEKLQLRKEKKQQKKKRKEEKGAEPETGSAVSAAQCQVGPTRELPESGIQLGTPREKVPAGRSKAELRAERRAKQEAERALKQARKGEQGGPPPKASPSTAGETPSGVKRLPEYPQVDDLLLRRLVKKPERQQVPTRKDYGSKVSLFSHLPQYSRQNSLTQFMSIPSSVIHPAMVRLGLQYSQGLVSGSNARCIALLRALQQVIQDYTTPPNEELSRDLVNKLKPYMSFLTQCRPLSASMHNAIKFLNKEITSVGSSKREEEAKSELRAAIDRYVQEKIVLAAQAISRFAYQKISNGDVILVYGCSSLVSRILQEAWTEGRRFRVVVVDSRPWLEGRHTLRSLVHAGVPASYLLIPAASYVLPEVSTEEKDSKVGGEKV

SEQ ID NO: 757184 - protein, 267 aa, Homo sapiens; identical to SEQ ID NO: 757176

SEQ ID NO: 757185 - protein, 125 aa, Homo sapiens
RESSRYRHVLLANGSVMSRVGTAQLALVARAHNVPVLVCCETYKFCERVQTDAFVSNELDDPDDLQCKRGEHVALANWQNHASLRLLNLVYDVTPPELVDLVITELGMIPCSSVPVVLRVKSSDQ

SEQ ID NO: 757186 - protein, 170 aa, Homo sapiens
  misc_feature (164)..(164): Xaa can be any naturally occurring amino acid
  misc_feature (166)..(166): Xaa can be any naturally occurring amino acid
MPTQQPAAPSTRAPKPSRSLSGSLCALFSDADSGSGMKAELPPGPGAVGREMTKEEKLQLRKEKKQQKKKRKEEKGAEPETGSAVSAAQCQVGPTRELPESGIQLGTPREKVPAGRSKAELRAERRAKQEAERALKQARKGEQGGPPPKASPSTAGETPSALRXLXGSSL

SEQ ID NO: 757187 - protein, 154 aa, Homo sapiens
MPTQQPAAPSTRAPKPSRSLSGSLCALFSDADSGSGMKAELPPGPGAVGREMTKEEKLQLRKEKKQQKKKRKEEKGAEPETGSAVSAAQCQVGPTRELPESGIQLGTPREKVPAGRSKAELRAERRPIMYQCWFAVKHTSSVSVCRLMPLSLMS

SEQ ID NO: 757188 - protein, 151 aa, Homo sapiens [sequence omitted]

SEQ ID NO: 757189 - protein, 144 aa, Homo sapiens
MSPPSPLTALAGRGVAVVAVCEQDSSKYFLLINCLHVKNCKTKKKKTGGGGKNPGRFPGFADPSGADGGNPPLKGVLIASFAQEKEGSPQGTSQASRPGGPKLKPGGHSEIPGLPHVVIRAGPGGPKPTPENQGGHHRAHFANH

SEQ ID NO: 757190 - protein, 96 aa, Homo sapiens
EFKLLTMYGDMSLIFLGKGETICRVTGGMKVKADRDESSPYAAMLAAPGMWPRGARSWGITALHIKLRATGGKLGPRPLGTLGPSSALRSPCPLGY

SEQ ID NO: 757191 - protein, 68 aa, Homo sapiens
PAAATTTTKFAAASTLETRTKTPGDPGAQFGPQEPLPARVLKIGRIEDVTPIPSDSTRRKGGRRGRRL

SEQ ID NO: 757192 - protein, 83 aa, Homo sapiens
PLSLSGVESGDDVQVGGPGATIGGHPAARGPCGAWDERRGSFRGNRARCRARDARLAHLDPGQLGIEFVPGLRRPVLLSGRSL

SEQ ID NO: 757193 - protein, 83 aa, Homo sapiens; identical to SEQ ID NO: 757192

SEQ ID NO: 757194 - protein, 151 aa, Homo sapiens [sequence omitted]

SEQ ID NO: 757195 - protein, 151 aa, Homo sapiens [sequence omitted]

SEQ ID NO: 757196 - protein, 151 aa, Homo sapiens [sequence omitted]

SEQ ID NO: 757197 - protein, 151 aa, Homo sapiens [sequence omitted]

SEQ ID NO: 757198 - protein, 151 aa, Homo sapiens [sequence omitted]

SEQ ID NO: 757199 - protein, 151 aa, Homo sapiens [sequence omitted]

SEQ ID NO: 757200 - protein, 151 aa, Homo sapiens [sequence omitted]

SEQ ID NO: 757201 - protein, 151 aa, Homo sapiens [sequence omitted]

SEQ ID NO: 757202 - protein, 83 aa, Homo sapiens; identical to SEQ ID NO: 757192

SEQ ID NO: 757203 - protein, 110 aa, Homo sapiens
ERRISLEKDGLDLEIPSMTTGLPANQSILTPTFTEMELVTLLGSRSRRTAAVEMRPSAAGRRSGDGPPPSCRIRHEEDQDPWGPWGPVRPSGALARSGIEDRADWVSAPL

SEQ ID NO: 757204 - protein, 100 aa, Homo sapiens
LRPLLLLLNSRPRRPGDACYVGCPRDVAQRCKELGYHRPTHQTPGHRREIRTKTPGDPGAQFGPQEPLPARVLKIGRIEDVTPIPSDSTRRKGGRRGRRL

SEQ ID NO: 757205 - protein, 77 aa, Homo sapiens
VESGDDVQVGGPGATIGGHPAARGPCGAWDERRGSFRGNRARCRARDARLAHLDPGQLGIEFVPGLRRPVLLSGRSL

SEQ ID NO: 757206 - protein, 89 aa, Homo sapiens
SAESLKKKIGLDLEIPSMTTGLPANQSILTPTFTEMELVTLLGSRSRRTAAVEMRPSAAGRRSGDGPPPSCRIRHEELHPSNDTFVPCH

SEQ ID NO: 757207 - protein, 103 aa, Homo sapiens
LSITVSGRGSIAPSEHVQMDLRERKNVPRTSGVEIFGLPLHLHDTFRTIFGKETISVTGDGRQTEMNPHHMLLCWLPQGCGPEVQGAGVSPPYTSNSGPQEGN

SEQ ID NO: 757208 - protein, 83 aa, Homo sapiens; identical to SEQ ID NO: 757192

SEQ ID NO: 757209 - protein, 96 aa, Homo sapiens; identical to SEQ ID NO: 757190

SEQ ID NO: 757210 - protein, 104 aa, Homo sapiens
MRVFRNLAGGGARGPQGGRGNNVGRKAGGPSRRETAGTRETKGGGGSPHHNIKKPRPGGRHRDERRLGEQKSPERGGPGGGTLKGGALYQQGRRPKENAPKSQN

SEQ ID NO: 757211 - protein, 151 aa, Homo sapiens [sequence omitted]

SEQ ID NO: 757212 - protein, 151 aa, Homo sapiens [sequence omitted]

SEQ ID NO: 757213 - protein, 151 aa, Homo sapiens [sequence omitted]

SEQ ID NO: 757214 - protein, 151 aa, Homo sapiens [sequence omitted]

SEQ ID NO: 757215 - protein, 151 aa, Homo sapiens [sequence omitted]

SEQ ID NO: 757216 - protein, 151 aa, Homo sapiens [sequence omitted]

SEQ ID NO: 757217 - protein, 151 aa, Homo sapiens [sequence omitted]

SEQ ID NO: 757218 - protein, 151 aa, Homo sapiens [sequence omitted]

SEQ ID NO: 757219 - protein, 735 aa, Homo sapiens
MAKERGLISPSDFAQLQKYMEYSTKKVSDVLKLFEDGEMAKYVQGDAIGYEGFQQFLKIYLEVDNVPRHLSLALFQSFETGHCLNETNVTKDVVCLNDVSCYFSLLEGGRPEDKLEFTFKLYDTDRNGILDSSEVDKIILQMMRVAEYLDWDVSELRPILQEMMKEIDYDGSGSVSQAEWVRAGATTVPLLVLLGLEMTLKDDGQHMWRPKRFPRPVYCNLCESSIGLGKQGLSCNLCKYTVHDQCAMKALPCEVSTYAKSRKDIGVQSHVWVRGGCESGRCDRCQKKIRIYHSLTGLHCVWCHLEIHDDCLQAVGHECDCGLLRDHILPPSSIYPSVLASGPDRKNSKTSQKTMDDLNLSTSEALRIDPVPNTHPLLVFVNPKSGGKQGQRVLWKFQYILNPRQVFNLLKDGPEIGLRLFKDVPDSRILVCGGDGTVGWILETIDKANLPVLPPVAVLPLGTGNDLARCLRWGGGYEGQNLAKILKDLEMSKVVHMDRWSVEVIPQQTEEKSDPVPFQIINNYFSIGVDASIAHRFHIMREKYPEKFNSRMKNKLWYFEFATSESIFSTCKKLEESLTVEICGKPLDLSNLSLEGIAVLNIPSMHGGSNLWGDTRRPHGDIYGINQALGATAKVITDPDILKTCVPDLSDKRLEVVGLEGAIEMGQIYTKLKNAGRRLAKCSEITFHTTKTLPMQIDGEPWMQTPCTIKITHKNQMPMLMGPPPRSTNFFGFLS

SEQ ID NO: 757220 - protein, 735 aa, Homo sapiens; identical to SEQ ID NO: 757219

SEQ ID NO: 757221 - protein, 796 aa, Homo sapiens
PAAAASAWPVPSSPARAPAPAPALQLRPRALSSKAYPLKRSKQRKYYYEAAFLAILEKNRQMAKERGLISPSDFAQLQKYMEYSTKKVSDVLKLFEDGEMAKYVQGDAIGYEGFQQFLKIYLEVDNVPRHLSLALFQSFETGHCLNETNVTKDVVCLNDVSCYFSLLEGGRPEDKLEFTFKLYDTDRNGILDSSEVDKIILQMMRVAEYLDWDVSELRPILQEMMKEIDYDGSGSVSQAEWVRAGATTVPLLVLLGLEMTLKDDGQHMWRPKRFPRPVYCNLCESSIGLGKQGLSCNLCKYTVHDQCAMKALPCEVSTYAKSRKDIGVQSHVWVRGGCESGRCDRCQKKIRIYHSLTGLHCVWCHLEIHDDCLQAVGHECDCGLLRDHILPPSSIYPSVLASGPDRKNSKTSQKTMDDLNLSTSEALRIDPVPNTHPLLVFVNPKSGGKQGQRVLWKFQYILNPRQVFNLLKDGPEIGLRLFKDVPDSRILVCGGDGTVGWILETIDKANLPVLPPVAVLPLGTGNDLARCLRWGGGYEGQNLAKILKDLEMSKVVHMDRWSVEVIPQQTEEKSDPVPFQIINNYFSIGVDASIAHRFHIMREKYPEKFNSRMKNKLWYFEFATSESIFSTCKKLEESLTVEICGKPLDLSNLSLEGIAVLNIPSMHGGSNLWGDTRRPHGDIYGINQALGATAKVITDPDILKTCVPDLSDKRLEVVGLEGAIEMGQIYTKLKNAGRRLAKCSEITFHTTKTLPMQIDGEPWMQTPCTIKITHKNQMPMLMGPPPRSTNFFGFLS

SEQ ID NO: 757222 - protein, 735 aa, Homo sapiens; identical to SEQ ID NO: 757219

SEQ ID NO: 757223 - protein, 783 aa, Homo sapiens
VAVLEVPVLCWVGKEELTAGAAYPLKRSKQRKYYYEAAFLAILEKNRQMAKERGLISPSDFAQLQKYMEYSTKKVSDVLKLFEDGEMAKYVQGDAIGYEGFQQFLKIYLEVDNVPRHLSLALFQSFETGHCLNETNVTKDVVCLNDVSCYFSLLEGGRPEDKLEFTFKLYDTDRNGILDSSEVDKIILQMMRVAEYLDWDVSELRPILQEMMKEIDYDGSGSVSQAEWVRAGATTVPLLVLLGLEMTLKDDGQHMWRPKRFPRPVYCNLCESSIGLGKQGLSCNLCKYTVHDQCAMKALPCEVSTYAKSRKDIGVQSHVWVRGGCESGRCDRCQKKIRIYHSLTGLHCVWCHLEIHDDCLQAVGHECDCGLLRDHILPPSSIYPSVLASGPDRKNSKTSQKTMDDLNLSTSEALRIDPVPNTHPLLVFVNPKSGGKQGQRVLWKFQYILNPRQVFNLLKDGPEIGLRLFKDVPDSRILVCGGDGTVGWILETIDKANLPVLPPVAVLPLGTGNDLARCLRWGGGYEGQNLAKILKDLEMSKVVHMDRWSVEVIPQQTEEKSDPVPFQIINNYFSIGVDASIAHRFHIMREKYPEKFNSRMKNKLWYFEFATSESIFSTCKKLEESLTVEICGKPLDLSNLSLEGIAVLNIPSMHGGSNLWGDTRRPHGDIYGINQALGATAKVITDPDILKTCVPDLSDKRLEVVGLEGAIEMGQIYTKLKNAGRRLAKCSEITFHTTKTLPMQIDGEPWMQTPCTIKITHKNQMPMLMGPPPRSTNFFGFLS

SEQ ID NO: 757224 - protein, 783 aa, Homo sapiens
MAKERGLISPSDFAQLQKYMEYSTKKVSDVLKLFEDGEMAKYVQGDAIGYEGFQQFLKIYLEVDNVPRHLSLALFQSFETGHCLNETNVTKDVVCLNDVSCYFSLLEGGRPEDKLEFTFKLYDTDRNGILDSSEVDKIILQMMRVAEYLDWDVSELRPILQEMMKEIDYDGSGSVSQAEWVRAGATTVPLLVLLGLEMTLKDDGQHMWRPKRFPRPVYCNLCESSIGLGKQGLSCNLCKYTVHDQCAMKALPCEVSTYAKSRKDIGVSDLMPPPPTSPTSWPWPWPLAHCCPQPLPPLGPAQTLPDKELPFFPKVQSHVWVRGGCESGRCDRCQKKIRIYHSLTGLHCVWCHLEIHDDCLQAVGHECDCGLLRDHILPPSSIYPSVLASGPDRKNSKTSQKTMDDLNLSTSEALRIDPVPNTHPLLVFVNPKSGGKQGQRVLWKFQYILNPRQVFNLLKDGPEIGLRLFKDVPDSRILVCGGDGTVGWILETIDKANLPVLPPVAVLPLGTGNDLARCLRWGGGYEGQNLAKILKDLEMSKVVHMDRWSVEVIPQQTEEKSDPVPFQIINNYFSIGVDASIAHRFHIMREKYPEKFNSRMKNKLWYFEFATSESIFSTCKKLEESLTVEICGKPLDLSNLSLEGIAVLNIPSMHGGSNLWGDTRRPHGDIYGINQALGATAKVITDPDILKTCVPDLSDKRLEVVGLEGAIEMGQIYTKLKNAGRRLAKCSEITFHTTKTLPMQIDGEPWMQTPCTIKITHKNQMPMLMGPPPRSTNFFGFLS

SEQ ID NO: 757225 - protein, 735 aa, Homo sapiens; identical to SEQ ID NO: 757219

SEQ ID NO: 757226 - protein, 718 aa, Homo sapiens
MAKERGLISPSDFAQLQKYMEYSTKKVSDVLKLFEDGEMAKYVQGDAIGYEGFQQFLKIYLEVDNVPRHLSLALFQSFETGHCLNETNVTKDVVCLNDVSCYFSLLEGGRPEDKLEFTFKLYDTDRNGILDSSEVDKIILQMMRVAEYLDWDVSELRPILQEMMKEIDYDGSGSVSQAEWVRAGATTVPLLVLLGLEMTLKDDGQHMWRPKRFPRPVYCNLCESSIGLGKQGLSCNLCKYTVHDQCAMKALPCEVSTYAKSRKDIGVQSHVWVRGGCESGRCDRCQKKIRIYHSLTGLHCVWCHLEIHDDCLQAVGHECDCGLLRDHILPPSSIYPSVLASGPDRKNSKTSQKTMDDLNLSTSEALRIDPVPNTHPLLVFVNPKSGGKQGQRVLWKFQYILNPRQVFNLLKDGPEIGLRLFKDVPDSRILVCGGDGTVGWILETIDKANLPVLPPVAVLPLGTGNDLARCLRWGGGYEGQNLAKILKDLEMSKVVHMDRWSVEVIPQQTEEKSDPVPFQIINNYFSIGVDASIAHRFHIMREKYPEKFNSRMKNKLWYFEFATSESIFSTCKKLEESLTVEICGKPLDLSNLSLEGIAVLNIPSMHGGSNLWGDTRRPHGDIYGINQALGATAKVITDPDILKTCVPDLSDKRLEVVGLEGAIEMGQIYTKLKNAGRRLAKCSEITFHTTKTLPMQIDGEPWMQTPCTRSTNFFGFLS

SEQ ID NO: 757227 - protein, 737 aa, Homo sapiens
MAKERGLISPSDFAQLQKYMEYSTKKVSDVLKLFEDGEMAKYVQGDAIGYEGFQQFLKIYLEVDNVPRHLSLALFQSFETGHCLNETNVTKDVVCLNDVSCYFSLLEGGRPEDKLEFTFKLYDTDRNGILDSSEVDKIILQMMRVAEYLDWDVSELRPILQEMMKEIDYDGSGSVSQAEWVRAGATTVPLLVLLGLEMTLKDDGQHMWRPKRFPRPVYCNLCESSIGLGKQGLSCNLCKYTVHDQCAMKALPCEVSTYAKSRKDIGVQSHVWVRGGCESGRCDRCQKKIRIYHSLTGLHCVWCHLEIHDDCLQAVGHECDCGLLRDHILPPSSIYPSVLASGPDRKNSKTSQKTMDDLNLSTSEALRIDPVPNTHPLLVFVNPKSGGKQGQRVLWKFQYILNPRQVFNLLKDGPEIGLRLFKDVPDSRILVCGGDGTVGWILETIDKANLPVLPPVAVLPLGTGNDLARCLRWGGGYEGQNLAKILKDLEMSKVVHMDRWSVEVIPQQTEEKSDPVPFQIINNYFSIGVDASIAHRFHIMREKYPEKFNSRMKNKLWYFEFATSESIFSTCKKLEESLTVEICGKPLDLSNLSLEGIAVLNIPSMHGGSNLWGDTRRPHGDIYGINQALGATAKVITDPDILKTCVPDLSDKRLEVVGLEGAIEMGQIYTKLKNAGRRLAKCSEITFHTTKTLPMQIDGEPWMQTPCTVSIDDPSQKLNPWDSMDPKSPFHSFFTPF

SEQ ID NO: 757228 - protein, 427 aa, Homo sapiens
QKFKPPPRSMVARLGLRDHILPPSSIYPSVLASGPDRKNSKTSQKTMDDLNLSTSEALRIDPVPNTHPLLVFVNPKSGGKQGQRVLWKFQYILNPRQVFNLLKDGPEIGLRLFKDVPDSRILVCGGDGTVGWILETIDKANLPVLPPVAVLPLGTGNDLARCLRWGGGYEGQNLAKILKDLEMSKVVHMDRWSVEVIPQQTEEKSDPVPFQIINNYFSIGVDASIAHRFHIMREKYPEKFNSRMKNKLWYFEFATSESIFSTCKKLEESLTVEICGKPLDLSNLSLEGIAVLNIPSMHGGSNLWGDTRRPHGDIYGINQALGATAKVITDPDILKTCVPDLSDKRLEVVGLEGAIEMGQIYTKLKNAGRRLAKCSEITFHTTKTLPMQIDGEPWMQTPCTIKITHKNQMPMLMGPPPRSTNFFGFLS

SEQ ID NO: 757229 - protein, 342 aa, Homo sapiens
MAKERGLISPSDFAQLQKYMEYSTKKVSDVLKLFEDGEMAKYVQGDAIGYEGFQQFLKIYLEVDNVPRHLSLALFQSFETGHCLNETNVTKDVVCLNDVSCYFSLLEGGRPEDKLEFTFKLYDTDRNGILDSSEVDKIILQMMRVAEYLDWDVSELRPILQEMMKEIDYDGSGSVSQAEWVRAGATTVPLLVLLGLEMTLKDDGQHMWRPKRFPRPVYCNLCESSIGLGKQGLSCNLCKYTVHDQCAMKALPCEVSTYAKSRKDIGVSDLMPPPPTSPTSWPWPWPLAHCCPQPLPPLGPAQTLPDKELPFSPRSNHMCGCEEAVSPGAATAVRKRSGSTTV

SEQ ID NO: 757230 - protein, 147 aa, Homo sapiens
MAKERGLISPSDFAQLQKYMEYSTKKVSDVLKLFEDGEMAKYVQGDAIGYEGFQQFLKIYLEVDNVPRHLSLALFQSFETGHCLNETNVTKDVVCLNDVSCYFSLLEGGRPEDKLEFTFKLYDTDRNGILDSSVSWGPCMLGKGICV

SEQ ID NO: 757231 - protein, 77 aa, Homo sapiens
AKILKDLEMSKVVHMDRWSVEVIPQQTEEKSDPVPFQIINNYFSIGVVSGMGPGEKGERGGQAVRGWRRAEKEGEVK

SEQ ID NO: 757232 - protein, 160 aa, Homo sapiens
PRCGRVCLARPLQPSSGSSSSAGASAATASPLKQGRDPASPPAPHPPPSEKDRGREAEDPRAAFVLLGREGGSVTAGAGIEKGLRWDAGVQREGWARTRWVTFPRPSPPSLPLIRRDGEARFLGPDSEGSPLRNLHSAARVEKGSCLASRSPTSHPILSP

SEQ ID NO: 757233 - protein, 735 aa, Homo sapiens; identical to SEQ ID NO: 757219

SEQ ID NO: 757234 - protein, 735 aa, Homo sapiens; identical to SEQ ID NO: 757219

SEQ ID NO: 757235 - protein, 815 aa, Homo sapiens
PAAAASAWPVPSSPARAPAPAPALQLRPRALSSKVETPRAPQRPTLPHRKRTGAYPLKRSKQRKYYYEAAFLAILEKNRQMAKERGLISPSDFAQLQKYMEYSTKKVSDVLKLFEDGEMAKYVQGDAIGYEGFQQFLKIYLEVDNVPRHLSLALFQSFETGHCLNETNVTKDVVCLNDVSCYFSLLEGGRPEDKLEFTFKLYDTDRNGILDSSEVDKIILQMMRVAEYLDWDVSELRPILQEMMKEIDYDGSGSVSQAEWVRAGATTVPLLVLLGLEMTLKDDGQHMWRPKRFPRPVYCNLCESSIGLGKQGLSCNLCKYTVHDQCAMKALPCEVSTYAKSRKDIGVQSHVWVRGGCESGRCDRCQKKIRIYHSLTGLHCVWCHLEIHDDCLQAVGHECDCGLLRDHILPPSSIYPSVLASGPDRKNSKTSQKTMDDLNLSTSEALRIDPVPNTHPLLVFVNPKSGGKQGQRVLWKFQYILNPRQVFNLLKDGPEIGLRLFKDVPDSRILVCGGDGTVGWILETIDKANLPVLPPVAVLPLGTGNDLARCLRWGGGYEGQNLAKILKDLEMSKVVHMDRWSVEVIPQQTEEKSDPVPFQIINNYFSIGVDASIAHRFHIMREKYPEKFNSRMKNKLWYFEFATSESIFSTCKKLEESLTVEICGKPLDLSNLSLEGIAVLNIPSMHGGSNLWGDTRRPHGDIYGINQALGATAKVITDPDILKTCVPDLSDKRLEVVGLEGAIEMGQIYTKLKNAGRRLAKCSEITFHTTKTLPMQIDGEPWMQTPCTIKITHKNQMPMLMGPPPRSTNFFGFLS

SEQ ID NO: 757236 - protein, 737 aa, Homo sapiens; identical to SEQ ID NO: 757227

SEQ ID NO: 757237 - protein, 583 aa, Homo sapiens
MAKERGLISPSDFAQLQKYMEYSTKKVSDVLKLFEDGEMAKYVQGDAIGYEGFQQFLKIYLEVDNVPRHLSLALFQSFETGHCLNETNVTKDVVCLNDVSCYFSLLEGGRPEDKLEFTFKLYDTDRNGILDSSEVDKIILQMMRVAEYLDWDVSELRPILQEMMKEIDYDGSGSVSQAEWVRAGATTVPLLVLLGLEMTLKDDGQHMWRPKRFPRPVYCNLCESSIGLGKQGLSCNLCKYTVHDQCAMKALPCEVSTYAKSRKDIGVQSHVWVRGGCESGRCDRCQKKIRIYHSLTGLHCVWCHLEIHDDCLQAVGHECDCGLLRDHILPPSSIYPSVLASGPDRKNSKTSQKTMDDLNLSTSEALRIDPVPNTHPLLVFVNPKSGGKQGQRVLWKFQYILNPRQVFNLLKDGPEIGLRLFKDVPDSRILVCGGDGTVGWILETIDKANLPVLPPVAVLPLGTGNDLARCLRWGGGYEGQNLAKILKDLEMSKVVHMDRWSVEVIPQQTEEKSDPVPFQIINNYFSIGVDASIAHRFHIMREKYPEKFNSRLGKGGGSVGIHSVRSQVLTKFDSDCSEEQWHL

SEQ ID NO: 757238 - protein, 357 aa, Homo sapiens
LFVNPKWGGKQGQRVLWKFQYILNPRQVFNLLKDGPEIGLRLFKDVPDSRILVCGGDGTVGWILETIDKANLPVLPPVAVLPLGTGNDLARCLRWGGGYEGQNLAKILKDLEMSKVVHMDRWSVEVIPQQTEEKSDPVPFQIINNYFSIGVDASIAHRFHIMREKYPEKFNSRMKNKLWYFEFATSESIFSTCKKLEESLTVEICGKPLDLSNLSLEGIAVLNIPSMHGGSNLWGDTRRPHGDIYGINQALGATAKVITDPDILKTCVPDLSDKRLEVVGLEGAIEMGQIYTKLKNAGRRLAKCSEITFHTTKTLPMQIDGEPWMQTPCTIKITHKNQMPMLMGPPPRSTNFFGFLS

SEQ ID NO: 757239 - protein, 425 aa, Homo sapiens
NETKIRLGRRLGVLRDHILPPSSIYPSVLASGPDRKNSKTSQKTMDDLNLSTSEALRIDPVPNTHPLLVFVNPKSGGKQGQRVLWKFQYILNPRQVFNLLKDGPEIGLRLFKDVPDSRILVCGGDGTVGWILETIDKANLPVLPPVAVLPLGTGNDLARCLRWGGGYEGQNLAKILKDLEMSKVVHMDRWSVEVIPQQTEEKSDPVPFQIINNYFSIGVDASIAHRFHIMREKYPEKFNSRMKNKLWYFEFATSESIFSTCKKLEESLTVEICGKPLDLSNLSLEGIAVLNIPSMHGGSNLWGDTRRPHGDIYGINQALGATAKVITDPDILKTCVPDLSDKRLEVVGLEGAIEMGQIYTKLKNAGRRLAKCSEITFHTTKTLPMQIDGEPWMQTPCTIKITHKNQMPMLMGPPPRSTNFFGFLS

SEQ ID NO: 757240 - protein, 128 aa, Homo sapiens
MAKERGLISPSDFAQLQKYMEYSTKKVSDVLKLFEDGEMAKYVQGDAIGYEGFQQFLKIYLEVDNVPRHLSLALFQSFETGHCLNETNVTKGMVKQVGCSFTLTVFIILHHLTVPHAHTHTHTPKHIH

SEQ ID NO: 757241 - protein, 58 aa, Homo sapiens
MASHSGITGPGASGVLGIILSHQEDSGSTTPRVGSAGLQGWSQGGQGCVMYALTASFS

SEQ ID NO: 757242 - protein, 445 aa, Homo sapiens
MCVRRSLVGLTFCTCYLASYLTNKYVLSVLKFTYPTLFQGWQTLIGGLLLHVSWKLGWVEINSSSRSHVLVWLPASVLFVGIIYAGSRALSRLAIPVFLTLHNVAEVIICGYQKCFQKEKTSPAKICSALFLLAAAGCLPFNDSQFNPDGYFWAIIHLLCVGAYKILQKSQKPSALSDIDQQYLNYIFSVVLLAFASHPTGDLFSVLDFPFLYFYRFHGSCCASGFLGFFLMFSTVKLKNLLAPGQCAAWIFFAKIITAGLSILLFDAILTSATTGCLLLGALGEALLVFSELEELLNKTVKRKTHRLLRENSLYTCVRAPGLIAPCWMCQKEECKDSEARWAVHHLTQVNVVVADEAEAWCFKEHLSGGLQVTAEEAVCYIFFHLENLSQRAVAGSAETRKYQDFMGWSGRSMSFNFWMANALSQKLVSVKGMGKGWGVIPRKT

SEQ ID NO: 757243 - protein, 410 aa, Homo sapiens
MCVRRSLVGLTFCTCYLASYLTNKYVLSVLKFTYPTLFQGWQTLIGGLLLHVSWKLGWVEINSSSRSHVLVWLPASVLFVGIIYAGSRALSRLAIPVFLTLHNVAEVIICGYQKCFQKEKTSPAKICSALFLLAAAGCLPFNDSQFNPDGYFWAIIHLLCVGAYKILQKSQKPSALSDIDQQYLNYIFSGFLGFFLMFSTVKLKNLLAPGQCAAWIFFAKIITAGLSILLFDAILTSATTGCLLLGALGEALLVFSELEELLNKTVKRKTHRLLRENSLYTCVRAPGLIAPCWMCQKEECKDSEARWAVHHLTQVNVVVADEAEAWCFKEHLSGGLQVTAGGAVCYIFFHLENLSQRAVAGSAETRKYQDFMGWSGRSMSFNFWMANALSQKLVSVKGMGKGWGVIPRKT

SEQ ID NO: 757244 - protein, 133 aa, Homo sapiens
MCVRRSLVGLTFCTCYLASYLTNKYVLSVLKFTYPTLFQGSHVLVWLPASVLFVGIIYAGSRALSRLAIPVFLTLHNVAEVIICGYQKCFQKEKTSPAKICSALFLLAAAGCLPFNDSQGLIKFYRSPRNPVH

SEQ ID NO: 757245 - protein, 169 aa, Homo sapiens
MPPARCAWRGLAGFLRAEELLNKTVKRKTHRLLRENSLYTCVRAPGLIAPCWMCQKEECKDSEARWAVHHLTQVNVVVADEAEAWCFKEHLSGGLQVTAEEAVCYIFFHLENLSQRAVAGSAETRKYQDFMGWSGRSMSFNFWMANALSQKLVSVKGMGKGWGVIPRKT

SEQ ID NO: 757246 - protein, 156 aa, Homo sapiens
ADETLQDTTLRYWERRRSVQQSVIVNQKAALPVASERVFGSVGKRLESLPKALYPGAKEETLASSSCWDCAGLSTQKTQGYLSEDTSMNSSLPFCSWKKAAAQRPRSSLRAFLDPHRNLEQESLLPNRVLQSVLKQGCPKGYHLLLASATLQPDKR

SEQ ID NO: 757247 - protein, 212 aa, Homo sapiens
SSSQLQPQESGRAEQGSQRGEKMKGKMVSQVPSQGPCVHMEAGVDYLSPGPGEPSNSKVLVSGKRKDKASASSSAKKREHPRKPKAGDHRRGTARLGLSTVTGKNHPAQARSLVEAPVSTFPQRSQHRGQSSQHTALPQLLLPKASGPQDQPEAGRRASDILTPRHCKHCPWAHMEKYLSFPTLKASLTRGLQKVLAKCLDNHRPLPTKSSQ

SEQ ID NO: 757248 - protein, 340 aa, Homo sapiens
MKEDQVVAEEPGFQDEEESLFQDIDLLQKHGINVADIKKLKSVGICTIKGIQMTTRRALCNVKGLSEAKVDKIKEAANKLIEPGFLTAFEYSEKRKMVFHITTGSQEFDKLLGGGIESMAITEAFGEFRTGKTQLSHTLCVTAQLPGAGGYPGGKIIFIDTENTFRPDRLRDIADRFNVDHDAVLDNVLYARAYTSEHQMELLDYVAAKFHEEAGIFKLLIIDSIMALFRVDFSGRGELAERQQKLAQMLSRLQKISEEYNVAVFVTNQMTADPGATMTFQADPKKPIGGHILAHASTTRISLRKGRGELRIAKIYDSPEMPENEATFAITAGGIGDAKE

SEQ ID NO: 757249 - protein, 96 aa, Homo sapiens
STEEFYALCDQLELCLRLAHECLSQSCDSAKHSPTLVPTATKPDAVQPDSLPYPQYLAVIKAQISCAKDIHTALLDCANKVTGKTPAPPAGPGGTL

SEQ ID NO: 757250 - protein, 96 aa, Homo sapiens; identical to SEQ ID NO: 757249

SEQ ID NO: 757251 - protein, 96 aa, Homo sapiens; identical to SEQ ID NO: 757249

SEQ ID NO: 757252 - protein, 96 aa, Homo sapiens; identical to SEQ ID NO: 757249

SEQ ID NO: 757253 - protein, 144 aa, Homo sapiens
QAGRKLPTSVDLPASASQSAGITGVSHCAPSSLVLLMKDGIWRARRAVERVRTLCVDGESWEDSEQGNGRGRPGFAWGHDGVQGHLVAAVQVFTTTEGRTRIEKRVDCSSFVIESAQREDEGRYTIKVTNPVGEDVASIFLQVV

SEQ ID NO: 757254 - protein, 1141 aa, Homo sapiens
MPEAKPAAKKAPKGKDAPKGAPKEAPPKEAPAEAPKEAPPEDQSPTAEEPTGVFLKKPDSVSVETGKDAVVVAKVNGKELPDKPTIKWFKGKWLELGSKSGARFSFKESHNSASNVYTVELHIGKVVLGDRGYYRLEVKAKDTCDSCGFNIDVEAPRQDASGQSLESFKRTSEKKSDTAGELDFSGLLKKREVVEEEKKKKKKDDDDLGIPPEIWELLKGAKKSEYEKIAFQYGITDLRGMLKRLKKAKVEVKKSAAFTKKLDPAYQVDRGNKIKLMVEISDPDLTLKWFKNGQEIKPSSKYVFENVGKKRILTINKCTLADDAAYEVAVKDEKCFTELFVKEPPVLIVTPLEDQQVFVGDRVEMAVEVSEEGAQVMWMKDGVELTREDSFKARYRFKKDGKRHILIFSDVVQEDRGRYQVITNGGQCEAELIVEEKQLEVLQDIADLTVKASEQAVFKCEVSDEKVTGKWYKNGVEVRPSKRITISHVGRFHKLVIDDVRPEDEGDYTFVPDGYALSLSAKLNFLEIKVEYVPKQEPPKIHLDCSGKTSENAIVVVAGNKLRLDVSITGEPPPVATWLKGDEVFTTTEGRTRIEKRVDCSSFVIESAQREDEGRYTIKVTNPVGEDVASIFLQVVDVPDPPEAVRITSVGEDWAILVWEPPMYDGGKPVTGYLVERKKKGSQRWMKLNFEVFTETTYESTKMIEGILYEMRVFAVNAIGVSQPSMNTKPFMPIAPTSEPLHLIVEDVTDTTTTLKWRPPNRIGAGGIDGYLVEYCLEGSEEWVPANTEPVERCGFTVKNLPTGARILFRVVGVNIAGRTEPATLAQPVTIREIAEPPKIRLPRHLRQTYIRKVGEQLNLVVPFQGKPRPQVVWTKGGAPLDTSRVHVRTSDFDTVFFVRQAARSDSGEYELSVQIENMKDTATIRIRVVEKAGPPINVMVKEVWGTNALVEWQAPKDDGNSEIMGYFVQKADKKTMEWFNVYERNRHTSCTVSDLIVGNEYYFRVYTENICGLSDSPGVSKNTARILKTGITFKPFEYKEHDFRMAPKFLTPLIDRVVVAGYSAALNCAVRGHPKPKVVWMKNKMEIREDPKFLITNYQGVLTLNIRRPSPFDAGTYTCRAVNELGEALAECKLEVRVPQ

SEQ ID NO: 757255 - protein, 515 aa, Homo sapiens
SLSWASGRLKGKTRPFEACEAKGSRSSGLAGLAGLGRWTPGLAAGAEHRAAFSWGSGGGPGTTAGLAPPRTGRDGEVPPTRPRPRAAPRAAPTSFLPRQPRALRAGPNRGGAGEGGGRRAMPWSSRGALLRDLVLGVLGTAAFLLDLGTDLWAAVQYALGGRYLWAALVLALLGLASVALQLFSWLWLRADPAGLHGSQPPRRCLALLHLLQLGYLYRCVQELRQGLLVWQQEEPSEFDLAYADFLALDISMLRLFETFLETAPQLTLVLAIMLQSGRAEYYQWVGICTSFLGISWALLDYHRALRTCLPSKPLLGLGSSVIYFLWNLLLLWPRVLAVALFSALFPSYVALHFLGLWLVLLLWVWLQGTDFMPDPSSEWLYRVTVATILYFSWFNVAEGRTRGRAIIHFAFLLSDSILLVATWVTHSSWLPSGIPLQLWLPVGCGCFFLGLALRLVYYHWLHPSCCWKPDPDQVDGARSLLSPEGYQLPQNRRMTHLAQKFFPKAKDEAASPVKG

SEQ ID NO: 757256 - protein, 532 aa, Homo sapiens
SLSWASGRLKGKTRPFEACEAKGSRSSGLAGLAGLGRWTPGLAAGAEHRAAFSWGSGGGPGTTAGLAPPRTGRDGEVPPTRPRPRAAPRAAPTSFLPRQPRALRAGPNRGGAGEGGGRRAMPWSSRGALLRDLVLGVLGTAAFLLDLGTDLWAAVQYALGGRYLWAALVLALLGLASVALQLFSWLWLRADPAGLHGSQPPRRCLALLHLLQLGYLYRCVQELRQGLLVWQQEEPSEFDLAYADFLALDISMLRLFETFLETAPQLTLVLAIMLQSGRAEYYQYTRSHFVTQAGLELLSSRVGICTSFLGISWALLDYHRALRTCLPSKPLLGLGSSVIYFLWNLLLLWPRVLAVALFSALFPSYVALHFLGLWLVLLLWVWLQGTDFMPDPSSEWLYRVTVATILYFSWFNVAEGRTRGRAIIHFAFLLSDSILLVATWVTHSSWLPSGIPLQLWLPVGCGCFFLGLALRLVYYHWLHPSCCWKPDPDQVDGARSLLSPEGYQLPQNRRMTHLAQKFFPKAKDEAASPVKG

SEQ ID NO: 757257 - protein, 515 aa, Homo sapiens; identical to SEQ ID NO: 757255

SEQ ID NO: 757258 - protein, 127 aa, Homo sapiens
PSSACLLWRICAPGKGKRSDCQTLHRTQCFPVIAESKTGLNSTDAYPGSKHSDQPSQRGIAHPNGQDLRSGKPCHCGLEGSEVLNKLERRSRPQGLQPLGMSCAELGSEPGDLVGLGEHNLLRHQLR

SEQ ID NO: 757259 - protein, 439 aa, Homo sapiens [sequence omitted]

SEQ ID NO: 757260 - protein, 439 aa, Homo sapiens [sequence omitted]

SEQ ID NO: 757261 - protein, 188 aa, Homo sapiens
ARADFCFRVGAMAVANSSPVNPVVFFDVSIGGQEVGRMKIELFADVVPKTAENFRQFCTGEFRKDGVPIGYKGSTFHRVIKDFMIQGGDFVNGDGTGVASIYRGPFADENFKLRHSAPGLLSMANSGPSTNGCQFFITCSKCDWLDGKHVVFGKIIDGLLVMRKIENVPTGPNNKPKLPVVISQCGEM

SEQ ID NO: 757262 - protein, 73 aa, Homo sapiens
GQYEPLKDFQQNTVDEFSCSEDDSSSIVEDGLEASEESTAVVVQAREKRFYMKIWVWGTLEIWQQIFMCLLGM

SEQ ID NO: 757263 - protein, 188 aa, Homo sapiens; identical to SEQ ID NO: 757261

SEQ ID NO: 757264 - protein, 177 aa, Homo sapiens
MAVANSSPVNPVVFFDVSIGGQEVGRMKIELFADVVPKTAENFRQFCTGEFRKDGVPIGYKGSTFHRVIKDFMIQGGDFVNGDGTGVASIYRGPFADENFKLRHSAPGLLSMANSGPSTNGCQFFITCSKCDWLDGKHVVFGKIIDGLLVMRKIENVPTGPNNKPKLPVVISQCGEM

SEQ ID NO: 757265 - protein, 151 aa, Homo sapiens
MKIELFADVVPKTAENFRQFCTGEFRKDGVPIGYKGSTFHRVIKDFMIQGGDFVNGDGTGVASIYRGPFADENFKLRHSAPGLLSMANSGPSTNGCQFFITCSKCDWLDGKHVVFGKIIDGLLVMRKIENVPTGPNNKPKLPVVISQCGEM

SEQ ID NO: 757266 - protein, 151 aa, Homo sapiens; identical to SEQ ID NO: 757265

SEQ ID NO: 757267 - protein, 228 aa, Homo sapiens
DAWVLDRDLEPMAVANSSPVNPVVFFDVSIGGQEVGRMKIELFADVVPKTAENFRQFCTGEFRSVSDVFDFFACSRGVFWGCSEGIGEPPAGLEMIAGDSDRRKDGVPIGYKGSTFHRVIKDFMIQGGDFVNGDGTGVASIYRGPFADENFKLRHSAPGLLSMANSGPSTNGCQFFITCSKCDWLDGKHVVFGKIIDGLLVMRKIENVPTGPNNKPKLPVVISQCGEM

SEQ ID NO: 757268 - protein, 188 aa, Homo sapiens; identical to SEQ ID NO: 757261

SEQ ID NO: 757269 - protein, 188 aa, Homo sapiens; identical to SEQ ID NO: 757261

SEQ ID NO: 757270 - protein, 188 aa, Homo sapiens; identical to SEQ ID NO: 757261

SEQ ID NO: 757271 - protein, 188 aa, Homo sapiens; identical to SEQ ID NO: 757261

SEQ ID NO: 757272 - protein, 188 aa, Homo sapiens
DAWVLDRDLEPMAVANSSPVNPVVFFDVSIGGQEVGRMKIELFADVVPKTAENFRQFCTGEFRKDGVPIGYKGSTFHRVIKDFMIQGGDFVNGDGTGVASIYRGPFADENFKLRHSAPGLLSMANSGPSTNGCQFFITCSKCDWLDGKHVVFGKIIDGLLVMRKIENVPTGPNNKPKLPVVISQCGEM

SEQ ID NO: 757273 - protein, 144 aa, Homo sapiens
DAWVLDRDLEPMAVANSSPVNPVVFFDVSIGGQEVGRMKIELFADVVPKTAENFRQFCTGEFRKDGVPIGYKGSTFHRVIKDFMIQGGDFVNGDGTGVASIYRGPFAERTVVQVQMAVSSLSPALSAIGWMGSMWCLEKSSMDF

SEQ ID NO: 757274 - protein, 188 aa, Homo sapiens; identical to SEQ ID NO: 757261

SEQ ID NO: 757275 - protein, 188 aa, Homo sapiens; identical to SEQ ID NO: 757261

SEQ ID NO: 757276 - protein, 188 aa, Homo sapiens; identical to SEQ ID NO: 757261

SEQ ID NO: 757277 - protein, 149 aa, Homo sapiens
MAVANSSPVNPVVFFDVSIGGQEVGRMKIELFADVVPKTAENFRQFCTGEFRKDGVPIGYKGSTFHRVIKDFMIQGGDFVNGDGTGVASIYRGPFADENFKLRHSAPGLLSMANSGPSTNGCQFFITCSKCDWLDGKHVVFECSHRPQQ

SEQ ID NO: 757278 - protein, 188 aa, Homo sapiens; identical to SEQ ID NO: 757261

SEQ ID NO: 757279 - protein, 173 aa, Homo sapiens
ARADFCFRVGAMAVANSSPVNPVVFFDVSIGGQEVGRMKIELFADVVPKTAENFRQFCTGEFRKDGVPIGYKGSTFHRVIKDFMIQGGDFVNGDGTGVASIYRGPFADENFKLRHSAPGLLSMANSGPSTNGCQFFITCSKCDWLDGKHVVFEKSFMDFYEEKDENGPNRPNH

SEQ ID NO: 757280 - protein, 99 aa, Homo sapiens
DAWVLDRDLEPMAVANSSPVNPVVFFDVSIGGQEVGRMKIELFADVVPKTAENFRQFCTGEFRKDGVPIGYKGSTFHRVIKDFMIQGGDFVNEKSSMDF

SEQ ID NO: 757281 - protein, 73 aa, Homo sapiens; identical to SEQ ID NO: 757262

SEQ ID NO: 757282 - protein, 228 aa, Homo sapiens; identical to SEQ ID NO: 757267

SEQ ID NO: 757283 - protein, 71 aa, Homo sapiens
VNALHLPAYMDSFLTRNYHCLLCAGQHASCREGDKELKDVSFQELMESKTFPEVITSNMSDIAFPSSWWCS

SEQ ID NO: 757284 - protein, 68 aa, Homo sapiens
DAWVLDRDLEPMAVANSSPVNPVVFFDVSIGGQVRSRRLPTPAPKGNCSGLGRQNSPRESGLGKPARK

SEQ ID NO: 757285 - protein, 148 aa, Homo sapiens [sequence omitted]

SEQ ID NO: 757286 - protein, 148 aa, Homo sapiens [sequence omitted]

SEQ ID NO: 757287 - protein, 148 aa, Homo sapiens [sequence omitted]

SEQ ID NO: 757288 - protein, 148 aa, Homo sapiens [sequence omitted]

SEQ ID NO: 757289 - protein, 148 aa, Homo sapiens [sequence omitted]

SEQ ID NO: 757290 - protein, 105 aa, Homo sapiens
RIPHHAPSWGASNQRILAYPGTQPQAVGSQWPGGKQLHSPALPGCPFGFQPGSRPASTGKPVTEAWTQRWTRHLLATCDLGRSESVARSTCSAAAINSLPVSKRR

SEQ ID NO: 757291 - protein, 148 aa, Homo sapiens [sequence omitted]

SEQ ID NO: 757292 - protein, 204 aa, Homo sapiens
MFHGIPATPGIGAPGNKPELYEEVKLYKNAREREKYDNMAELFAVVKTMQALEKAYIKDCVSPSEQVQGSEISSIDEFCRKFRLDCPLAMERIKEDRPITIKDDKGNLNRCIADVVSLFITVMDKLRLEIRAMDEIQPDLRELMETMHRMSHLPPDFEGRQTVSQWLQTLSGMSASDELDDSQVRQMLFDLESAYNAFNRFLHA

SEQ ID NO: 757293 - protein, 221 aa, Homo sapiens
MFHGIPATPGIGAPGNKPELYEEVKLYKNAREREKYDNMAELFAVVKTMQALEKAYIKDCVSPSEYTAACSRLLVQYKAAFRQVQGSEISSIDEFCRKFRLDCPLAMERIKEDRPITIKDDKGNLNRCIADVVSLFITVMDKLRLEIRAMDEIQPDLRELMETMHRMSHLPPDFEGRQTVSQWLQTLSGMSASDELDDSQVRQMLFDLESAYNAFNRFLHA

SEQ ID NO: 757294 - protein, 221 aa, Homo sapiens; identical to SEQ ID NO: 757293

SEQ ID NO: 757295 - protein, 115 aa, Homo sapiens
MERIKEDRPITIKDDKGNLNRCIADVVSLFITVMDKLRLEIRAMDEIQPDLRELMETMHRMSHLPPDFEGRQTVSQWLQTLSGMSASDELDDSQVRQMLFDLESAYNAFNRFLHA

SEQ ID NO: 757296 - protein, 115 aa, Homo sapiens; identical to SEQ ID NO: 757295

SEQ ID NO: 757297 - protein, 183 aa, Homo sapiens
MAELFAVVKTMQALEKAYIKDCVSPSEYTAACSRLLVQYKAAFRQVQGSEISSIDEFCRKFRLDCPLAMERIKEDRPITIKDDKGNLNRCIADVVSLFITVMDKLRLEIRAMDEIQPDLRELMETMHRMSHLPPDFEGRQTVSQWLQTLSGMSASDELDDSQVRQMLFDLESAYNAFNRFLHA

SEQ ID NO: 757298 - protein, 115 aa, Homo sapiens; identical to SEQ ID NO: 757295

SEQ ID NO: 757299 - protein, 115 aa, Homo sapiens; identical to SEQ ID NO: 757295

SEQ ID NO: 757300 - protein, 221 aa, Homo sapiens; identical to SEQ ID NO: 757293

SEQ ID NO: 757301 - protein, 107 aa, Homo sapiens
MPWGLPHPWTREPHVHTCPQLFITVMDKLRLEIRAMDEIQPDLRELMETMHRMSHLPPDFEGRQTVSQWLQTLSGMSASDELDDSQVRQMLFDLESAYNAFNRFLHA

SEQ ID NO: 757302 - protein, 164 aa, Homo sapiens
MFHGIPATPGIGAPGNKPELYEEVKLYKNAREREKYDNMAELFAVVKTMQALEKAYIKDCVSPSEYTAACSRLLVQYKAAFRQVQGSEISSIDEFCRKFRLDCPLAMERIKEDRPITIKDDKGNLNRCIADVVSVRPSPQGTWLGEPRLPAAAGHERRVLGLQS

SEQ ID NO: 757303 - protein, 221 aa, Homo sapiens; identical to SEQ ID NO: 757293

SEQ ID NO: 757304 - protein, 221 aa, Homo sapiens; identical to SEQ ID NO: 757293

SEQ ID NO: 757305 - protein, 126 aa, Homo sapiens
MAELFAVVKTMQALEKAYIKDCVSPSEYTAACSRLLVQYKAAFRQVQGSEISSIDEFCRKFRLDCPLAMERIKEDRPITIKDDKGNLNRCIADVVSVRPSPQGTWLGEPRLPAAAGHERRVLGLQS

SEQ ID NO: 757306 - protein, 221 aa, Homo sapiens; identical to SEQ ID NO: 757293

SEQ ID NO: 757307 - protein, 145 aa, Homo sapiens
MFHGIPATPGIGAPGNKPELYEEVKLYKNAREREKYDNMAELFAVVKTMQALEKAYIKDCVSPSEYTAACSRLLVQYKAAFRQVQGSEISSIDEFCRKFRLDCPLAMERIKEDRPITIKDDKGNLNRCIADVVSAADPERHVGVR

SEQ ID NO: 757308 - protein, 234 aa, Homo sapiens
  misc_feature (186)..(186): Xaa can be any naturally occurring amino acid
MFHGIPATPGIGAPGNKPELYEEVKLYKNAREREKYDNMAELFAVVKTMQALEKAYIKDCVSPSEYTAACSRLLVQYKAAFRQVQGSEISSIDEFCRKFRLDCPLAMERIKEDRPITIKDDKGNLNRCIADVVSLFITVMDKLRLEIRAMDEIQPDLRELMETMHRMSHLPPDFEGRQTVSQWGCXPEGMSAQIAGDSQGVDACRLDEATKLKPFLMPSPGTSPAQGSGLLWPR

SEQ ID NO: 757309 - protein, 213 aa, Homo sapiens
YKNAREREKYDNMADCCRYVIPLRSTKYDNMAELFAVVKTMQALEKAYIKDCVSPSEYTAACSRLLVQYKAAFRQVQGSEISSIDEFCRKFRLDCPLAMERIKEDRPITIKDDKGNLNRCIADVVSLFITVMDKLRLEIRAMDEIQPDLRELMETMHRMSHLPPDFEGRQTVSQWLQTLSGMSASDELDDSQVRQMLFDLESAYNAFNRFLHA

SEQ ID NO: 757310 - protein, 221 aa, Homo sapiens; identical to SEQ ID NO: 757293

SEQ ID NO: 757311 - protein, 183 aa, Homo sapiens; identical to SEQ ID NO: 757297

SEQ ID NO: 757312 - protein, 183 aa, Homo sapiens; identical to SEQ ID NO: 757297

SEQ ID NO: 757313 - protein, 115 aa, Homo sapiens; identical to SEQ ID NO: 757295

SEQ ID NO: 757314 - protein, 115 aa, Homo sapiens; identical to SEQ ID NO: 757295

SEQ ID NO: 757315 - protein, 221 aa, Homo sapiens; identical to SEQ ID NO: 757293

SEQ ID NO: 757316 - protein, 131 aa, Homo sapiens
MFHGIPATPGIGAPGNKPELYEEVKLYKNAREREKYDNMAELFAVVKTMQALEKAYIKDCVSPSEYTAACSRLLVQYKAAFRQVQGSEISSIDEFCRKFRVSAWSFHPHGARLSGMGMGCQRALATWGLLS

SEQ ID NO: 757317 - protein, 221 aa, Homo sapiens; identical to SEQ ID NO: 757293

SEQ ID NO: 757318 - protein, 261 aa, Homo sapiens
MFHGIPATPGIGAPGNKPELYEEVKLYKNAREREKYDNMAELFAVVKTMQALEKAYIKDCVSPSEYTAACSRLLVQYKAAFRQVQGSEISSIDEFCRKFRLDCPLAMERIKEDRPITIKDDKGNLNRCIADVVSLFITVMDKLRLEIRAMDEIQPDLRELMETMHRMSHLPPDFEGRQTVSQWVGVPPSQAEPRSARDPPSQAEPRSAPEALSPHMPCAALPGLQTLSGMSASDELDDSQVRQMLFDLESAYNAFNRFLHA

SEQ ID NO: 757319 - protein, 163 aa, Homo sapiens
MFHGIPATPGIGAPGNKPELYEEVKLYKNAREREKYDNMAELFAVVKTMQALEKAYIKDCVSPSEYTAACSRLLVQYKAAFRQVQGSEISSIDEFCRKFRLDCPLAMERIKEDRPITIKDDKGNLNRCIADVVSLFITVMDKLRLEIRAMDEAADPERHVGVR

SEQ ID NO: 757320 - protein, 117 aa, Homo sapiens
CRVADRAHPAPGAIFPTASRPGSCSVSQAGVQWLSLGSLKPSPPGFKRFSCLSLLSSWDYNRMPQRPANFVILVETGFHHVGQAGLKLLTSGDPLTSASQSAGITGVSHRTWLRGHL

SEQ ID NO: 757321 - protein, 104 aa, Homo sapiens
MSHEQGVATVVQVTPPGSHGGAGELGLSCGPPGSRSGAGELGLSCGPPGSRSGAGELGLSCGPRLLRGVIIRSPHTLIGVRLEPLCSSSLWALWDPAWEASGRN

SEQ ID NO: 757322 - protein, 113 aa, Homo sapiens
MKPSPSQNRRSSDTGSKAPPTFKVSLMDQSVREGQDVIMSIRVQGEPKPVVSWLRNRQPVRPDQRRFAEEAEGGLCRLRILAAERGDAGFYTCKAVNEYGARQCEARLEVRGE

SEQ ID NO: 757323 - protein, 74 aa, Homo sapiens
AADYYYYTIKFAAASTPKEQGLLTKALPGRVRTLTILEMGFEWHNTFYFTKDQKPEAPGSVLMNSLAEPWPWQV

SEQ ID NO: 757324 - protein, 226 aa, Homo sapiens
PTSSFPSSGAFPSPRAFSVQGLSWVSRVSGAGQAGQAGLLLPGEPRWGGQWAGSRRAWCQGRAFRTGTGWGLCAEPRGGSTSPFSSPITSDEEYLSPPEEFPEPGETWPRTPTMKPSPSQNRRSSDTGSKAPPTFKVSLMDQSVREGQDVIMSIRVQGEPKPVVSWLRNRQPVRPDQRRFAEEAEGGLCRLRILAAERGDAGFYTCKAVNEYGARQCEARLEVRGE

SEQ ID NO: 757325 - protein, 207 aa, Homo sapiens
HKDGSALRSESRLLLRAEGERHTLLLREARAADAGSYMATATNELGQATCAASLTVRPGGSTSPFSSPITSDEEYLSPPEEFPEPGETWPRTPTMKPSPSQNRRSSDTGSKAPPTFKVSLMDQSVREGQDVIMSIRVQGEPKPVVSWLRNRQPVRPDQRRFAEEAEGGLCRLRILAAERGDAGFYTCKAVNEYGARQCEARLEVRGE

SEQ ID NO: 757326 - protein, 226 aa, Homo sapiens; identical to SEQ ID NO: 757324

SEQ ID NO: 757327 - protein, 226 aa, Homo sapiens; identical to SEQ ID NO: 757324

SEQ ID NO: 757328 - protein, 140 aa, Homo sapiens
MPCLAEYDDGLWYRAKIVAIKEFNPLSILVQFVDYGSTAKLTLNRLCQIPSHLMRYPARAIKVLLAGFKPPLRDLGETRIPYCPKWSMEALWAMIDCLQGKQLYAVSMAPAPEQIVTLYDDEQHPVHMPLVEMGLADKDE

SEQ ID NO: 757329 - protein, 414 aa, Homo sapiens
YNKELPVHICNVISPEKIYVQWLLTENLLNSLEEKMIAAYENSKWEPVKWENDMHCAVKIQDKNQWRRGQIIRMVTDTLVEVLLYDVGVELVVNVDCLRKLEENLKTMGRLSLECSLVDIRPAGGSDKWTATACDCLSLYLTGAVATIILQVDSEENNTTWPLPVKIFCRDEKGERVDVSKYLIKKGLALRERRINNLDNSHSLSEKSLEVPLEQEDSVVTNCIKTNFDPDKKTADIISEQKVSEFQEKILEPRTTRGYKPPAIPNMNVFEATVSCVGDDGTIFVVPKLSEFELIKMTNEIQSNLKCLGLLEPYFWKKGEACAVRGSDTLWYRGKVMEVVGGAVRVQYLDHGFTEKIPQCHLYPILLYPDIPQFCIPCQLHNTTPVGNVWQPDAIEVLQQLLSKRQVDIHIMVI

SEQ ID NO: 757330 - protein, 668 aa, Homo sapiens
YNKELPVHICNVISPEKIYVQWLLTENLLNSLEEKMIAAYENSKWEPVKWENDMHCAVKIQDKNQWRRGQIIRMVTDTLVEVLLYDVGVELVVNVDCLRKLEENLKTMGRLSLECSLVDIRPAGGSDKWTATACDCLSLYLTGAVATIILQVDSEENNTTWPLPVKIFCRDEKGERVDVSKYLIKKGLALRERRINNLDNSHSLSEKSLEVPLEQEDSVVTNCIKTNFDPDKKTADIISEQKVSEFQEKILEPRTTRGYKPPAIPNMNVFEATVSCVGDDGTIFVVPKLSEFELIKMTNEIQSNLKCLGLLEPYFWKKGEACAVRGSDTLWYRGKVMEVVGGAVRVQYLDHGFTEKIPQCHLYPILLYPDIPQFCIPCQLHNTTPVGNVWQPDAIEVLQQLLSKRQVDIHIMKPRSDHDKKYEEEQWEIRFEELLSAETDTPLLPPYLSSSLPSPGELYAVQVKHVVSPNEVYICLDSIETSNQSNQHSDTDDSGVSGESESESLDEALQRVNKKVEALPPLTDFRTEMPCLAEYDDGLWYRAKIVAIKEFNPLSILVQFVDYGSTAKLTLNRLCQIPSHLMRYPARAIKVLLAGFKPPLRDLGETRIPYCPKWSMEALWAMIDCLQGKQLYAVSMAPAPEQIVTLYDDEQHPVHMPLVEMGLADKDE

SEQ ID NO: 757331 - protein, 485 aa, Homo sapiens
YNKELPVHICNVISPEKIYVQWLLTENLLNSLEEKMIAAYENSKWEPVKWENDMHCAVKIQDKNQWRRGQIIRMVTDTLVEVLLYDVGVELVVNVDCLRKLEENLKTMGRLSLECSLVDIRPAGGSDKWTATACDCLSLYLTGAVATIILQVDSEENNTTWPLPVKIFCRDEKGERVDVSKYLIKKGLALRERRINNLDNSHSLSEKSLEVPLEQEDSVVTNCIKTNFDPDKKTADIISEQKVSEFQEKILEPRTTRGYKPPAIPNMNVFEATVSCVGDDGTIFVVPKLSEFELIKMTNEIQSNLKCLGLLEPYFWKKGEACAVRGSDTLWYRGKVMEVVGGAVRVQYLDHGFTEKIPQCHLYPILLYPDIPQFCIPCQLHNTTPVGNVWQPDAIEVLQQLLSKRQVDIHIMKPRSDHDKKYEEEQWEIRFEELLSAETDTPLLPPYLSSSLPSPGTVGYDRLSSRKTTLCCVHGSSTRTDSDII

SEQ ID NO: 757332 - protein, 327 aa, Homo sapiens
ELVRIQPRLQLSAVPPPVAARVITETQMDHTSPTYMLANLTHLHSEQLLQGLNLLRQHHELCDIILRVGDVKIHAHKVVLASVSPYFKAMFTGNLSEKENSEVEFQCIDETALQAIVEYAYTGTVFISQDTVESLLPAANLLQIKLVLKECCAFLESQLDPGNCIGISRFAETYGCRDLYLAATKYICQNFEAVCQTEEFFELTHADLDEIVSNDCLNVATEETVFYALESWIKYDVQERQKYLAQLLNSVRLPLLSVKFLTRLYEANHLIRDDRTCKHLLNEALKYHFMPEHRLSHQTVLMTRPRCAPKVLCAVGGKSGLFACLDR

SEQ ID NO: 757333 - protein, 345 aa, Homo sapiens
ELVRIQPRLQLSAVPPPVAARVITETQMDHTSPTYMLANLTHLHSEQLLQGLNLLRQHHELCDIILRVGDVKIHAHKVVLASVSPYFKAMFTGNLSEKENSEVEFQCIDETALQAIVEYAYTGTVFISQDTVESLLPAANLLQIKLVLKECCAFLESQLDPGNCIGISRFAETYGCRDLYLAATKYICQNFEAVCQTEEFFELTHADLDEIVSNDCLNVATEETVFYALESWIKYDVQERQKYLAQLLNSVRLPLLSVKFLTRLYEANHLIRDDRTCKHLLNEALKYHFMPEHRLSHQTVLMTRPRCAPKVLCAVGGKSGLFACLDRLASYPCDVFYHEMTLPRC

SEQ ID NO: 757334 - protein, 314 aa, Homo sapiens
MHFKCKYSYPALYQMDHTSPTYMLANLTHLHSEQLLQGLNLLRQHHELCDIILRVGDVKIHAHKVVLASVSPYFKAMFTGNLSEKENSEVEFQCIDETALQAIVEYAYTGTVFISQDTVESLLPAANLLQIKLVLKECCAFLESQLDPGNCIGISRFAETYGCRDLYLAATKYICQNFEAVCQTEEFFELTHADLDEIVSNDCLNVATEETVFYALESWIKYDVQERQKYLAQLLNSVRLPLLSVKFLTRLYEANHLIRDDRTCKHLLNEALKYHFMPEHRLSHQTVLMTRPRCAPKVLCAVGGKSGLFACLDR

SEQ ID NO: 757335 - protein, 325 aa, Homo sapiens
MHFKCKYSYPALYQMDHTSPTYMLANLTHLHSEQLLQGLNLLRQHHELCDIILRVGDVKIHAHKVVLASVSPYFKAMFTGNLSEKENSEVEFQCIDETALQAIVEYAYTGTVFISQDTVESLLPAANLLQIKLVLKECCAFLESQLDPGNCIGISRFAETYGCRDLYLAATKYICQNFEAVCQTEEFFELTHADLDEIVSNDCLNVATEETVFYALESWIKYDVQERQKYLAQLLNSVRLPLLSVKFLTRLYEANHLIRDDRTCKHLLNEALKYHFMPEHRLSHQTVLMTRPRCVLGLQAKATAPSLIIHFNCNLKLVLLRLGYT

SEQ ID NO: 757336 - protein, 83 aa, Homo sapiens
MSFFQLLMKRKELIPLVVFMTVAAGGASSFAVYSLWKTDVILDRKKNPEPWETVDPTVPQKLITINQQWKPIEELQNVQRVTK

SEQ ID NO: 757337 - protein, 83 aa, Homo sapiens; identical to SEQ ID NO: 757336

SEQ ID NO: 757338 - protein, 109 aa, Homo sapiens
TTQNTQPPNPPHTKPHFIWQFFAEVIMSFFQLLMKRKELIPLVVFMTVAAGGASSFAVYSLWKTDVILDRKKNPEPWETVDPTVPQKLITINQQWKPIEELQNVQRVTK

SEQ ID NO: 757339 - protein, 114 aa, Homo sapiens
KYKQRPTQSTNCHDNTPNRLSTIWQFFAEVIMSFFQLLMKRKELIPLVVFMTVAAGGASSFAVYSLWKTDVILDRKKNPEPWETVDPTVPQKLITINQQWKPIEELQNVQRVTK

SEQ ID NO: 757340 - protein, 83 aa, Homo sapiens; identical to SEQ ID NO: 757336

SEQ ID NO: 757341 - protein, 767 aa, Homo sapiens
MSQRPRAPRSALWLLAPPLLRWAPPLLTVLHSDLFQALLDILDYYEASLSESQKYRYQDEDTPPLEHSPAHLPNQANSPPVIVNTDTLEAPGYELQVNGTEGEMEYEEITLERGNSGLGFSIAGGTDNPHIGDDPSIFITKIIPGGAAAQDGRLRVNDSILFVNEVDVREVTHSAAVEALKEAGSIVRLYVMRRKPPAEKVMEIKLIKGPKGLGFSIAGGVGNQHIPGDNSIYVTKIIEGGAAHKDGRLQIGDKILAVNSVGLEDVMHEDAVAALKNTYDVVYLKVAKPSNAYLSDSYAPPDITTSYSQHLDNEISHSSYLGTDYPTAMTPTSPRRYSPVAKDLLGEEDIPREPRRIVIHRGSTGLGFNIVGGEDGEGIFISFILAGGPADLSGELRKGDQILSVNGVDLRNASHEQAAIALKNAGQTVTIIAQYKPEEYSRFEAKIHDLREQLMNSSLGSGTASLRSNPKRGFYIRALFDYDKTKDCGFLSQALSFRFGDVLHVIDASDEEWWQARRVHSDSETDDIGFIPSKRRVERREWSRLKAKDWGSSSGSQGREDSVLSYETVTQMEVHYARPIIILGPTKDRANDDLLSEFPDKFGSCVPHTTRPKREYEIDGRDYHFVSSREKMEKDIQAHKFIEAGQYNSHLYGTSVQSVREVAEQGKHCILDVSANAVRRLQAAHLHPIAIFIRPRSLENVLEINKRITEEQARKAFDRATKLEQEFTECFSAIVEGDSFEEIYHKVKRVIEDLSGPYIWVPARERL

SEQ ID NO: 757342 - protein, 667 aa, Homo sapiens
MSQRPRAPRSALWLLAPPLLRWAPPLLTVLHSDLFQALLDILDYYEASLSESQKYRYQDEDTPPLEHSPAHLPNQANSPPVIVNTDTLEAPGYELQVNGTEGEMEYEEITLERGNSGLGFSIAGGTDNPHIGDDPSIFITKIIPGGAAAQDGRLRVNDSILFVNEVDVREVTHSAAVEALKEAGSIVRLYVMRRKPPAEKVMEIKLIKGPKGLGFSIAGGVGNQHIPGDNSIYVTKIIEGGAAHKDGRLQIGDKILAVNSVGLEDVMHEDAVAALKNTYDVVYLKVAKPSNAYLSDSYAPPDITTSYSQHLDNEISHSSYLGTDYPTAMTPTSPRRYSPVAKDLLGEEDIPREPRRIVIHRGSTGLGFNIVGGEDGEGIFISFILAGGPADLSGELRKGDQILSVNGVDLRNASHEQAAIALKNAGQTVTIIAQYKPEEYSRFEAKIHDLREQLMNSSLGSGTASLRSNPKRGFYIRALFDYDKTKDCGFLSQALSFRFGDVLHVIDASDEEWWQARRVHSDSETDDIGFIPSKRRVERREWSRLKAKDWGSSSGSQGREDSVLSYETVTQMEVHYARPIIILGPTKDRANDDLLSEFPDKFGSCVPHTTRPKREYEIDGRDYHFVSSREKMEKDIQAHKFIEAGQYNSHLYGTSVQSVREVAEQRD

SEQ ID NO: 757343 - protein, 410 aa, Homo sapiens
MSQRPRAPRSALWLLAPPLLRWAPPLLTVLHSDLFQALLDILDYYEASLSESQKYRYQDEDTPPLEHSPAHLPNQANSPPVIVNTDTLEAPGYELQVNGTEGEMEYEEITLERGNSGLGFSIAGGTDNPHIGDDPSIFITKIIPGGAAAQDGRLRVNDSILFVNEVDVREVTHSAAVEALKEAGSIVRLYVMRRKPPAEKVMEIKLIKGPKGLGFSIAGGVGNQHIPGDNSIYVTKIIEGGAAHKDGRLQIGDKILAVNSVGLEDVMHEDAVAALKNTYDVVYLKVAKPSNAYLSDSYAPPDITTSYSQHLDNEISHSSYLGTDYPTAMTPTSPRRYSPVAKDLLGEEDIPREPRRIVIHRGSTGLGFNIVGGEDGEGIFISFILAGGPADLSGELRKGDQILSVREGHA

SEQ ID NO: 757344 - protein, 100 aa, Homo sapiens
KDIQAHKFIEAGQYNSHLYGTSVQSVREVAEQVGPGGHPVLFLLPSPHPTASLQLSLTLSLSVSFPAGSPLRSSTSFSSWATLSDCLLSAPALSPTSLTS

SEQ ID NO: 757345 - protein, 145 aa, Homo sapiens
AGRIPRALKSPKHPAGLAVLSAGKAKWVRGDPRQAGDSLTRSPSLTLDGPSTCHVLRTQQSERRRCPPGICSRLQRRPLSSCASGWIAALLPAQCLPASPREKQPLVFSLQFPFSTLSLLLSPGAADPSSWFPEILASPVSGKAM

SEQ ID NO: 757346 - protein, 191 aa, Homo sapiens
AGRIPRALKSPKHPAGLAVLSAGKAKWVRGDPRQAGDSLTRSPSLTLDGPSTCHVLRTQQSERRRCPPGICSRLQRRPLSSCASGWIAALLPAQCLPASPREKQPLVFSLQFPGSQRSWPARSQARPCRMPGVIIAYCFMTASLCPGGSFSWNALPTTPAAALLRALLSLTSFEATLSLSPDHLALSLLSA

SEQ ID NO: 757347 - protein, 186 aa, Homo sapiens
AGRIPRALKSPKHPAGLAVLSAGKAKWVRGDPRQAGDSLTRSPSLTLDGPSTCHVLRTQQSERRRCPPGICSRLQRRPLSSCASGWIAALLPAQCLPASPREKQPLVFSLQFPFSTLSLLLSPGAADPSYASIAPKNSGPVPRARRPSGEVDGPRRSPCGENRVLEPLEPPEPPELQPGQPPFRRE

SEQ ID NO: 757348 - protein, 486 aa, Homo sapiens
MRAARALLPLLLQACWTAAQDEPETPRAVAFQDCPVDLFFVLDTSESVALRLKPYGALVDKVKSFTKRFIDNLRDRYYRCDRNLVWNAGALHYSDEVEIIQGLTRMPGGRDALKSSVDAVKYFGKGTYTDCAIKKGLEQLLVGGSHLKENKYLIVVTDGHPLEGYKEPCGGLEDAVNEAKHLGVKVFSVAITPDHLEPRLSIIATDHTYRRNFTAADWGQSRDAEEAISQTIDTIVDMIKNNVEQVCCSFECQPARGPPGLRGDPGFEGERGKPGLPGEKGEAGDPGRPGDLGPVGYQGMKGEKGSRGEKGSRGPKGYKGEKGKRGIDGVDGVKGEMGYPGLPGCKGSPGFDGIQGPPGPKGDPGAFGLKGEKGEPGADGEAGRPGARGPSGDEGPAGEPGPPGEKGEAGDEGNPGPDGAPGERGGPGERGPRGTPGPRGPRGDPGEAGTSVLHPTSLSKTPSRGLCRTSLPLLCPHSWFFPPILT

SEQ ID NO: 757349 - protein, 1027 aa, Homo sapiens
MRAARALLPLLLQACWTAAQDEPETPRAVAFQDCPVDLFFVLDTSESVALRLKPYGALVDKVKSFTKRFIDNLRDRYYRCDRNLVWNAGALHYSDEVEIIQGLTRMPGGRDALKSSVDAVKYFGKGTYTDCAIKKGLEQLLVGGSHLKENKYLIVVTDGHPLEGYKEPCGGLEDAVNEAKHLGVKVFSVAITPDHLEPRLSIIATDHTYRRNFTAADWGQSRDAEEAISQTIDTIVDMIKNNVEQVCCSFECQPARGPPGLRGDPGFEGERGKPGLPGEKGEAGDPGRPGDLGPVGYQGMKGEKGSRGEKGSRGPKGYKGEKGKRGIDGVDGVKGEMGYPGLPGCKGSPGFDGIQGPPGPKGDPGAFGLKGEKGEPGADGEAGRPGARGPSGDEGPAGEPGPPGEKGEAGDEGNPGPDGAPGERGGPGERGPRGTPGPRGPRGDPGEAGPQGDQGREGPVGVPGDPGEAGPIGPKGYRGDEGPPGSEGARGAPGPAGPPGDPGLMGERGEDGPAGNGTEGFPGFPGYPGNRGAPGINGTKGYPGLKGDEGEAGDPGDDNNDIAPRGVKGAKGYRGPEGPQGPPGHQGPPGPDECEILDIIMKMCSCCECKCGPIDLLFVLDSSESIGLQNFEIAKDFVVKVIDRLSRDELVKFEPGQSYAGVVQYSHSQMQEHVSLRSPSIRNVQELKEAIKSLQWMAGGTFTGEALQYTRDQLLPPSPNNRIALVITDGRSDTQRDTTPLNVLCSPGIQVVSVGIKDVFDFIPGSDQLNVISCQGLAPSQGRPGLSLVKENYAELLEDAFLKNVTAQICIDKKCPDYTCPITFSSPADITILLDGSASVGSHNFDTTKRFAKRLAERFLTAGRTDPAHDVRVAVVQYSGTGQQRPERASLQFLQAKSAVDKLGSMDFINDATDVNDALGYVTRFYREASSGAAKKRLLLFSDGNSQGATPAAIEKAVQEAQRAGIEIFVVVVGRQVNEPHIRVLVTGKTAEYDVAYGESHLFRVPSYQALLRGVFHQTVSRKVALG

SEQ ID NO: 757350 - protein, 70 aa, Homo sapiens
VQEAQRAGIEIFVVVVGRQVNEPHIRVLVTGKTAEYDVAYGESHLFRVPSYQALLRGVFHQTVSRKVALG

SEQ ID NO: 757351 - protein, 486 aa, Homo sapiens
MIRRVLPHGMGRGLLTRRPGTRRGGFSLDWDGKVSEIKKKIKSILPGRSCDLLQDTSHLPPEHSDVVIVGGGVLGLSVAYWLKKLESRRGAIRVLVVERDHTYSQASTGLSVGGICQQFSLPENIQLSLFSASFLRNINEYLAVVDAPPLDLRFNPSGYLLLASEKDAAAMESNVKVQRQEGAKVSLMSPDQLRNKFPWINTEGVALASYGMEDEGWFDPWCLLQGLRRKVQSLGVLFCQGEVTRFVSSSQRMLTTDDKAVVLKRIHEVHVKMDRSLEYQPVECAIVINAAGAWSAQIAALAGVGEGPPGTLQGTKLPVEPRKRYVYVWHCPQGPGLETPLVADTSGAYFRREGLGSNYLGGRSPTEQEEPDPANLEVDHDFFQDKVWPHLALRVPAFETLKVQSAWAGYYDYNTFDQNGVVGPHPLVVNMYFATGFSGHGLQQAPGIGRAVAEMVLKGRFQTIDLSPFLFTRFYLGEKIQENNII

SEQ ID NO: 757352 - protein, 572 aa, Homo sapiens
MIRRVLPHGMGRGLLTRRPGTRRGGFSLDWDGKVSEIKKKIKSILPGRSCDLLQDTSHLPPEHSDVVIVGGGVLGLSVAYWLKKLESRRGAIRVLVVERDHTYSQASTGLSVGGICQQFSLPENIQLSLFSASFLRNINEYLAVVDAPPLDLRFNPSGYLLLASEKDAAAMESNVKVQRQEGAKVSLMSPDQLRNKFPWINTEGVALASYGMEDEGWFDPWCLLQGLRRKVQSLGVLFCQGEVTRFVSSSQRMLTTDDKAVVLKRIHEVHVKMDRSLEYQPVECAIVINAAGAWSAQIAALAGVGEGPPGTLQGTKLPVEPRKRYVYVWHCPQGPGLETPLVADTSGAYFRREGLGSNYLGGRSPTEQEEPDPANLEVDHDFFQDKVWPHLALRVPAFETLKVTGKGWFPFYFWTLDGTDDSGAHWSPRTRDCRSPSMSQLLRNFLDTSHPIDPSAAGRGYSVLSPEGSEDGVWLQPSREPQCFVHPQVQSAWAGYYDYNTFDQNGVVGPHPLVVNMYFATGFSGHGLQQAPGIGRAVAEMVLKGRFQTIDLSPFLFTRFYLGEKIQENNII

SEQ ID NO: 757353 - protein, 316 aa, Homo sapiens
MESNVKVQRQEGAKVSLMSPDQLRNKFPWINTEGVALASYGMEDEGWFDPWCLLQGLRRKVQSLGVLFCQGEVTRFVSSSQRMLTTDDKAVVLKRIHEVHVKMDRSLEYQPVECAIVINAAGAWSAQIAALAGVGEGPPGTLQGTKLPVEPRKRYVYVWHCPQGPGLETPLVADTSGAYFRREGLGSNYLGGRSPTEQEEPDPANLEVDHDFFQDKVWPHLALRVPAFETLKVQSAWAGYYDYNTFDQNGVVGPHPLVVNMYFATGFSGHGLQQAPGIGRAVAEMVLKGRFQTIDLSPFLFTRFYLGEKIQENNII

SEQ ID NO: 757354 - protein, 316 aa, Homo sapiens; identical to SEQ ID NO: 757353

SEQ ID NO: 757355 - protein, 486 aa, Homo sapiens; identical to SEQ ID NO: 757351

SEQ ID NO: 757356 - protein, 443 aa, Homo sapiens
MIRRVLPHGMGRGLLTRRPGTRRGGFSLDWDGKVSEIKKKIKSILPGRSCDLLQDTSHLPPEHSDVVIVGGGVLGLSVAYWLKKLESRRGAIRVLVVERDHTYSQASTGLSVGGICQQFSLPENIQLSLFSASFLRNINEYLAVVDAPPLDLRFNPSGYLLLASEKDAAAMESNVKVQRQEGAKVSLMSPDQLRNKFPWINTEGVALASYGMEDEGWFDPWCLLQGLRRKVQSLGVLFCQGEVTRFVSSSQRMLTTDDKAVVLKRIHEVHVKMDRSLEYQPVECAIVINAAGAWSAQIAALAGVGEGPPGTLQGTKLPVEPRKRYVYVWHCPQGPGLETPLVADTSGAYFRREGLGSNYLGGRSPTEQEEPDPANLEVDHDFFQDKVWPHLALRVPAFETLKVQSAWAGYYDYNTFDQNGVVGPHPLVVKNPPIWGFKPPSFF

SEQ ID NO: 757357 - protein, 135 aa, Homo sapiens [sequence omitted]

SEQ ID NO: 757358 - protein, 174 aa, Homo sapiens
MWEGNVWPSDPNYITTDWDGKVSEIKKKIKSILPGRSCDLLQDTSHLPPEHSDVVIVGGGVLGLSVAYWLKKLESRRGAIRVLVVERDHTYSQASTGLSVGGICQQFSLPENIQLSLFSASFLRNINEYLAVVDAPPLDLRFNPSGYLLLASEKDAAAMESNVKVQRWVPGTAS

SEQ ID NO: 757359 - protein, 486 aa, Homo sapiens; identical to SEQ ID NO: 757351

SEQ ID NO: 757360 - protein, 484 aa, Homo sapiens
AEEAFLCACLASGSRGPGPCRGGFSLDWDGKVSEIKKKIKSILPGRSCDLLQDTSHLPPEHSDVVIVGGGVLGLSVAYWLKKLESRRGAIRVLVVERDHTYSQASTGLSVGGICQQFSLPENIQLSLFSASFLRNINEYLAVVDAPPLDLRFNPSGYLLLASEKDAAAMESNVKVQRQEGAKVSLMSPDQLRNKFPWINTEGVALASYGMEDEGWFDPWCLLQGLRRKVQSLGVLFCQGEVTRFVSSSQRMLTTDDKAVVLKRIHEVHVKMDRSLEYQPVECAIVINAAGAWSAQIAALAGVGEGPPGTLQGTKLPVEPRKRYVYVWHCPQGPGLETPLVADTSGAYFRREGLGSNYLGGRSPTEQEEPDPANLEVDHDFFQDKVWPHLALRVPAFETLKVQSAWAGYYDYNTFDQNGVVGPHPLVVNMYFATGFSGHGLQQAPGIGRAVAEMVLKGRFQTIDLSPFLFTRFYLGEKIQENNII

SEQ ID NO: 757361 - protein, 454 aa, Homo sapiens
MTAAGTGWGLLLKHWWLQALMISDAWGLSIFLGSLFLFILLFFFLLGRPPARAGLRRGAIRVLVVERDHTYSQASTGLSVGGICQQFSLPENIQLSLFSASFLRNINEYLAVVDAPPLDLRFNPSGYLLLASEKDAAAMESNVKVQRQEGAKVSLMSPDQLRNKFPWINTEGVALASYGMEDEGWFDPWCLLQGLRRKVQSLGVLFCQGEVTRFVSSSQRMLTTDDKAVVLKRIHEVHVKMDRSLEYQPVECAIVINAAGAWSAQIAALAGVGEGPPGTLQGTKLPVEPRKRYVYVWHCPQGPGLETPLVADTSGAYFRREGLGSNYLGGRSPTEQEEPDPANLEVDHDFFQDKVWPHLALRVPAFETLKVQSAWAGYYDYNTFDQNGVVGPHPLVVNMYFATGFSGHGLQQAPGIGRAVAEMVLKGRFQTIDLSPFLFTRFYLGEKIQENNII

SEQ ID NO: 757362 - protein, 275 aa, Homo sapiens
MEDEGWFDPWCLLQGLRRKVQSLGVLFCQGEVTRFVSSSQRMLTTDDKAVVLKRIHEVHVKMDRSLEYQPVECAIVINAAGAWSAQIAALAGVGEGPPGTLQGTKLPVEPRKRYVYVWHCPQGPGLETPLVADTSGAYFRREGLGSNYLGGRSPTEQEEPDPANLEVDHDFFQDKVWPHLALRVPAFETLKVQSAWAGYYDYNTFDQNGVVGPHPLVVNMYFATGFSGHGLQQAPGIGRAVAEMVLKGRFQTIDLSPFLFTRFYLGEKIQENNII

SEQ ID NO: 757363 - protein, 312 aa, Homo sapiens
EGKIRLGQAGVTLRAAGQLARSSEWRLARSSDGCDNSEAAVQLSEDWDGKVSEIKKKIKSILPGRSCDLLQDTSHLPPEHSDVVIVGGGVLGLSVAYWLKKLESRRGAIRVLVVERDHTYSQASTGLSVGGICQQFSLPENIQLSLFSASFLRNINEYLAVVDAPPLDLRFNPSGYLLLASEKDAAAMESNVKVQRQEGAKVSLMSPDQLRNKFPWINTEGVALASYGSEDEGRQTPGGNGTKETTGEEARPREYQRAQGEGDTVSNPTCYKRKENHEKHHSRETETGNQKRHGEKRNGTGSTRRGKAQMAT

SEQ ID NO: 757364 - protein, 194 aa, Homo sapiens
MKLASGFLVLWLSLGGGLAQSDTSPDTEESYSDWGLRHLRGSFESVNSYFDSFLELLGGKNGVCQYRCRYGKAPMPRPGYKPQEPNGCGSYFLGLKVPESMDLGIPAMTKCCNQLDVCYDTCGANKYRCDAKFRWCLHSICSDLKRSLGFVSKVEACDSLVDTVFNTVWTLGCRPFMNSQRAACICAEEEKEEL

SEQ ID NO: 757365 - protein, 117 aa, Homo sapiens
MESPGLSALAEGLQDEDTLCKASHFCCCWAHCVKFPPPSFHLPYAELPLLHPPWPAKPTPPHFLLTTQAQPLTCPMAVTALSWALNGIIVTCVLMSLCHSTPSTSNKELKTYRILNK

SEQ ID NO: 757366 - protein, 131 aa, Homo sapiens
MLWRFTPVVTCDSVSSAWWGVPWCFPVFCDCPVKAIGMGSGGGSLKPVDTARVHCPGKRQTLGPSGRREVAAGAAAGGGADDVPCQEPQEEGAWDLWPVVAVYSFSLYCGFLLFNSFSICFSSINFIPCSS

SEQ ID NO: 757367 - protein, 122 aa, Homo sapiens
MDEAASVPPFCPALRCHSTRPTRPPRKAMFMAETKGVALNQLSLRELQTIRCGPPPSPRCLQVAWHPGPPLPLFSPLFSGDMSRMWEYGHSVEQYSALDGTEHSSVDWQICQVRALLQAQQA

SEQ ID NO: 757368 - protein, 76 aa, Homo sapiens
KLGTELGSTSKKPPLVLEFGLPSGLTKTTFVLAQQDSQTLFWVAPGVIQKDKKLLMPLHSPQLLRSKLFIEPVSIN

SEQ ID NO: 757369 - protein, 69 aa, Homo sapiens
PPQEQERKAGGALTKHPLCAGPFAHNIPLNPCKHHARLLCEAHFIDEEAKAQGDDVTCHKLAGGDRERS

SEQ ID NO: 757370 - protein, 399 aa, Homo sapiens
MAQRQPHSPNQTLISITNDTESSSSVVSNDNTNKGWSGDNSPGIEALCAIYITYAVIISVGILGNAILIKVFFKTKSMQTVPNIFITSLAFGDLLLLLTCVPVDATHYLAEGWLFGRIGCKVLSFIRLTSVGVSVFTLTILSADRYKAVVKPLERQPSNAILKTCVKAGCVWIVSMIFALPEAIFSNVYTFRDPNKNMTFESCTSYPVSKKLLQEIHSLLCFLVFYIIPLSIISVYYSLIARTLYKSTLNIPTEEQSHARKQIESRKRIARTVLVLVALFALCWLPNHLLYLYHSFTSQTYVDPSAMHFIFTIFSRVLAFSNSCVNPFALYWLSKSFQKHFKAQLFCCKAERPEPPVADTSLTTLAVMGTVPGTGSIQMSEISVTSFTGCSVKQAEDRF

SEQ ID NO: 757371 - protein, 238 aa, Homo sapiens
RICPGAAPRAGEAGGLRRPALLLCPGPARPRVAAREMMQDVSSSPVSPADDSLSNSEEEPDRQQPPSGKRGGRKRRSSRRSAGGGAGPGGAAGGGVGGGDEPGSPAQGKRGKKSAGCGGGGGAGGGGGSSSGGGSPQSYEELQTQRVMANVRERQRTQSLNEAFAALRKIIPTLPSDKLSKIQTLKLAARYIDFLYQVLQSDELDSKMASCSYVAHERLSYAFSVWRMEGAWSMSASH

SEQ ID NO: 757372 - protein, 91 aa, Homo sapiens
SVTGAARAREVGSHSPDFLREDPCPPLPSDKLSKIQTLKLAARYIDFLYQVLQSDELDSKMASCSYVAHERLSYAFSVWRMEGAWSMSASH

SEQ ID NO: 757373 - protein, 238 aa, Homo sapiens; identical to SEQ ID NO: 757371

SEQ ID NO: 757374 - protein, 238 aa, Homo sapiens; identical to SEQ ID NO: 757371

SEQ ID NO: 757375 - protein, 212 aa, Homo sapiens
MDYLLMIFSLLFVACQGAPETAVLGAELSAVGENGGEKPTPSPPWRLRRSKRCSCSSLMDKECVYFCHLDIIWVNTPEHVVPYGLGSPRSKRALENLLPTKATDRENRCQCASQKDKKCWNFCQAGKELRAEDIMEKDWNNHKKGKDCSKLGKKCIYQQLVRGRKIRRSSEEHLRQTRSETMRNSVKSSFHDPKLKGKPSRERYVTHNRAHW

SEQ ID NO: 757376 - protein, 212 aa, Homo sapiens; identical to SEQ ID NO: 757375

SEQ ID NO: 757377 - protein, 66 aa, Homo sapiens
ELFTPTLIGVQYKKPAESCPSQTRLCICARRTGPAPPAVPALHRRVRLQTLRSLPSLLAGAAFSPR

SEQ ID NO: 757378 - protein, 154 aa, Homo sapiens
MDKECVYFCHLDIIWVNTPEHVVPYGLGSPRSKRALENLLPTKATDRENRCQCASQKDKKCWNFCQAGKELRAEDIMEKDWNNHKKGKDCSKLGKKCIYQQLVRGRKIRRSSEEHLRQTRSETMRNSVKSSFHDPKLKGKPSRERYVTHNRAHW

SEQ ID NO: 757379 - protein, 212 aa, Homo sapiens; identical to SEQ ID NO: 757375

SEQ ID NO: 757380 - protein, 95 aa, Homo sapiens
PPVSLFPPCRCSPRVAVPPVSLFPPCPYSSRVRIPYLHLFLQVGLRVLVQHMCFPLRLLGGSGWVWAPCSQAHVVFMAVAAWVMSVSLHLGFPGP

SEQ ID NO: 757381 - protein, 90 aa, Homo sapiens
GSRGDDEVRRRWQLTFADGASLKGKFKVQLGAAALGVRTCGCGYEGASSAMPLAPGEAVPVTLCQSNGEAAVVRPDQIKPNQANHGEWRT

SEQ ID NO: 757382 - protein, 87 aa, Homo sapiens
RKKNPAESRSSCCPFCPHMKRLCGSDSMSYGPVDPGGSHTVSRIIACSSKPFTVEWKPVIFLASCMTEKVSVANSELQHQETRSSSH

SEQ ID NO: 757383 - protein, 104 aa, Homo sapiens
LGAVRLNPQTHKKIPEASLTFADGASLKGKFKVQLGAAALGVRTCGCGYEGASSAMPLAPGEAVPVTLCQSNGEAAVVRPDQIKPNQANHGEWRLLPAPPSPSL

SEQ ID NO: 757384 - protein, 90 aa, Homo sapiens; identical to SEQ ID NO: 757381

SEQ ID NO: 757385 - protein, 185 aa, Homo sapiens
GSRGDDEVRRRWQLTFADGASLKGKFKVQLGAAALGVRTCGCGYEGASSAMPLAPGEAVPVTLCQSNGEAAVVRPDQIKPNQANHGEWRIYLALNSGQKKTQTLSCGLGPPILIKVWFHLLPHKGAIAVCTSESVYNLRIEIIACSSKPFTVEWKPVIFLASCMTEKVSVANSELQHQETRSSSH

SEQ ID NO: 757386 - protein, 99 aa, Homo sapiens
EVRRVWQLTFADGASLKGKFKVQLGAAALGVRTCGCGYEGASSAMPLAPGEAVPVTLCQSNGEAAVVRPDQIKPNQANHGEWRHRVSFCHPGWSADAVA

SEQ ID NO: 757387 - protein, 99 aa, Homo sapiens; identical to SEQ ID NO: 757386

SEQ ID NO: 757388 - protein, 151 aa, Homo sapiens
LLCLECDSRGSPLRSLGVRTCGCGYEGASSAMPLAPGEAVPVTLCQSNGEAAVVRPDQIKPNQANHGEWRGHVSTQHKGSCPQARKRSIIRNRPYWLPDLRLSASRMIIACSSKPFTVEWKPVIFLASCMTEKVSVANSELQHQETRSSSH

SEQ ID NO: 757389 - protein, 99 aa, Homo sapiens; identical to SEQ ID NO: 757386

SEQ ID NO: 757390 - protein, 99 aa, Homo sapiens; identical to SEQ ID NO: 757386

SEQ ID NO: 757391 - protein, 203 aa, Homo sapiens
EVRRVWQLTFADGASLKGKFKVQLGAAALGVRTCGCGYEGASSAMPLAPGEAVPVTLCQSNGEAAVVRPDQIKPNQANHGEWRIYLALNSGQKKTQTLSCGLGPPILIKVWFHLLPHKGAIAVCTSESVYNLRIEDLMIDLASLASGHCSAWPYCCLHPQLLQLFWPLCVTALPSPASWLSKERSVSYRRSQQKDEIWGAGEG

SEQ ID NO: 757392 - protein, 110 aa, Homo sapiens
MDLWTLVAVTQCQGIYLALNSGQKKTQTLSCGLGPPILIKVWFHLLPHKGAIAVCTSESVYNLRIEIIACSSKPFTVEWKPVIFLASCMTEKVSVANSELQHQETRSSSH

SEQ ID NO: 757393 - protein, 104 aa, Homo sapiens; identical to SEQ ID NO: 757383

SEQ ID NO: 757394 - protein, 102 aa, Homo sapiens
MGSKDHAVFFREMTQLILNEMPKAGYSSILNDFVESNFFVIDGDSLLVTCLGVKSFKWGQNLHFFYLVECYLVDLLSNGGQFTIVFFKDAEYAYFDFPELLS

SEQ ID NO: 757395 - protein, 512 aa, Homo sapiens
MVPSFLSLSFSSLGLWASGLILVLGFLKLIHLLLRRQTLAKAMDKFPGPPTHWLFGHALEIQETGSLDKVVSWAHQFPYAHPLWFGQFIGFLNIYEPDYAKAVYSRGDPKAPDVYDFFLQWIGRGLLVLEGPKWLQHRKLLTPGFHYDVLKPYVAVFTESTRIMLDKWEEKAREGKSFDIFCDVGHMALNTLMKCTFGRGDTGLGHSRDSSYYLAVSDLTLLMQQRLVSFQYHNDFIYWLTPHGRRFLRACQVAHDHTDQVIRERKAALQDEKVRKKIQNRRHLDFLDILLGARDEDDIKLSDADLRAEVDTFMFEGHDTTTSGISWFLYCMALYPEHQHRCREEVREILGDQDFFQWDDLGKMTYLTMCIKESFRLYPPVPQVYRQLSKPVTFVDGRSLPAGSLISMHIYALHRNSAVWPDPEVFDSLRFSTENASKRHPFAFMPFSAGPRNCIGQQFAMSEMKVVTAMCLLRFEFSLDPSRLPIKMPQLVLRSKNGFHLHLKPLGPGSGK

SEQ ID NO: 757396 - protein, 512 aa, Homo sapiens; identical to SEQ ID NO: 757395

SEQ ID NO: 757397 - protein, 180 aa, Homo sapiens [sequence omitted]

SEQ ID NO: 757398 - protein, 347 aa, Homo sapiens
MRVVVIGAGVIGLSTALCIHERYHSVLQPLHIKVYADRFTPLTTTDVAAGLWQPYLSDPNNPQEADWSQQTFDYLLSHVHSPNAENLGLFLISGYNLFHEAIPDPSWKDTVLGFRKLTPRELDMFPDYGYGWFHTSLILEGKNYLQWLTERLTERGVKFFQRKVESFEEVAREGADVIVNCTGVWAGALQRDPLLQPGRGQIMKVDAPWMKHFILTHDPERGIYNSPYIIPGTQTVTLGGIFQLGNWSELNNIQDHNTIWEGCCRLEPTLKNARIIGERTGFRPVRPQIRLEREQLRTGPSNTEVIHNYGHGGYGLTIHWGCALEAAKLFGRILEEKKLSRMPPSHL

SEQ ID NO: 757399 - protein, 232 aa, Homo sapiens
MFPDYGYGWFHTSLILEGKNYLQWLTERLTERGVKFFQRKVESFEEVAREGADVIVNCTGVWAGALQRDPLLQPGRGQIMKVDAPWMKHFILTHDPERGIYNSPYIIPGTQTVTLGGIFQLGNWSELNNIQDHNTIWEGCCRLEPTLKNARIIGERTGFRPVRPQIRLEREQLRTGPSNTEVIHNYGHGGYGLTIHWGCALEAAKLFGRILEVPPPTRTPFSPQPMNQCAPS

SEQ ID NO: 757400 - protein, 224 aa, Homo sapiens
MFPDYGYGWFHTSLILEGKNYLQWLTERLTERGVKFFQRKVESFEEVAREGADVIVNCTGVWAGALQRDPLLQPGRGQIMKVDAPWMKHFILTHDPERGIYNSPYIIPGTQTVTLGGIFQLGNWSELNNIQDHNTIWEGCCRLEPTLKNARIIGERTGFRPVRPQIRLEREQLRTGPSNTEVIHNYGHGGYGLTIHWGCALEAAKLFGRILEEKKLSRMPPSHL

SEQ ID NO: 757401 - protein, 103 aa, Homo sapiens
MILVEEKVEGSCPREGCDARHILPGTYTCLQATPCMSPDLPPGFWSASSRAWWVIEETQESHLRTHSLPENPMVTHFHLSDQRLFFFFFETVSFCCPGWSAVA

SEQ ID NO: 757402 - protein, 103 aa, Homo sapiens; identical to SEQ ID NO: 757401

SEQ ID NO: 757403 - protein, 103 aa, Homo sapiens; identical to SEQ ID NO: 757401

SEQ ID NO: 757404 - protein, 103 aa, Homo sapiens; identical to SEQ ID NO: 757401

SEQ ID NO: 757405 - protein, 136 aa, Homo sapiens
MILVEEKVEGSCPREGCDARHILPGTYTCLQATPCMSPDLPPGFWSASSRAWWVIEETQESHLRTHSLPENPMVTHFHLSDLWKSLVTLDVCVFEEAMGAYHDCLPPLLFRLPQLNHAVQDFWPCVHHWENVLQTG

SEQ ID NO: 757406 - protein, 361 aa, Homo sapiens
MQEKDASSQGFLPHFQHFATQAIHVGQDPEQWTSRAVVPPISLSTTFKQGAPGQHSGFEYSRSGNPTRNCLEKAVAALDGAKYCLAFASGLAATVTITHLLKAGDQIICMDDVYGGTNRYFRQVASEFGLKISFVDCSKIKLLEAAITPETKRPLALGADISMYSATKYMNGHSDVVMGLVSVNCESLHNRLRFLQNSLGAVPSPIDCYLCNRGLKTLHVRMEKHFKNGMAVAQFLESNPWVEKVIYPGLPSHPQHELVKRQCTGCTGMVTFYIKGTLQHAEIFLKNLKLFTLAESLGGFESLAELPAIMTHASVLKNDRDVLGISDTLIRLSVGLEDEEDLLEDLDQALKAAHPPSGSHS

SEQ ID NO: 757407 - protein, 373 aa, Homo sapiens
MQEKDASSQGFLPQFKQGAPGQHSGFEYSRSGNPTRNCLEKAVAALDGAKYCLAFASGLAATVTITHLLKAGDQIICMDDVYGGTNRYFRQVASEFGLKISFVDCSKIKLLEAAITPETKLVWIETPTNPTQKVIDIEGCAHIVHKHGDIILVVDNTFMSPYFQRPLALGADISMYSATKYMNGHSDVVMGLVSVNCESLHNRLRFLQNSLGAVPSPIDCYLCNRGLKTLHVRMEKHFKNGMAVAQFLESNPWVEKVIYPGLPSHPQHELVKRQCTGCTGMVTFYIKGTLQHAEIFLKNLKLFTLAESLGGFESLAELPAIMTHASVLKNDRDVLGISDTLIRLSVGLEDEEDLLEDLDQALKAAHPPSGSHS

SEQ ID NO: 757408 - protein, 102 aa, Homo sapiens
DENPSCKLGGLGNCFLNHPPRCGLRLLAPPSGQRMVVRGNYHSKRRLFMWSVYSYPVSTLSQLSATSRANLRPEVTETPGWLSGASMAASSGRVLRNFARRD

SEQ ID NO: 757409 - protein, 405 aa, Homo sapiens
MQEKDASSQGFLPHFQHFATQAIHVGQDPEQWTSRAVVPPISLSTTFKQGAPGQHSGFEYSRSGNPTRNCLEKAVAALDGAKYCLAFASGLAATVTITHLLKAGDQIICMDDVYGGTNRYFRQVASEFGLKISFVDCSKIKLLEAAITPETKLVWIETPTNPTQKVIDIEGCAHIVHKHGDIILVVDNTFMSPYFQRPLALGADISMYSATKYMNGHSDVVMGLVSVNCESLHNRLRFLQNSLGAVPSPIDCYLCNRGLKTLHVRMEKHFKNGMAVAQFLESNPWVEKVIYPGLPSHPQHELVKRQCTGCTGMVTFYIKGTLQHAEIFLKNLKLFTLAESLGGFESLAELPAIMTHASVLKNDRDVLGISDTLIRLSVGLEDEEDLLEDLDQALKAAHPPSGSHS

SEQ ID NO: 757410 - protein, 245 aa, Homo sapiens
MQEKDASSQGFLPHFQHFATQAIHVGQDPEQWTSRAVVPPISLSTTFKQGAPGQHSGFEYSRSGNPTRNCLEKAVAALDGAKYCLAFASGLAATVTITHLLKAGDQIICMDDVYGGTNRYFRQVASEFGLKISFVDCSKIKLLEAAITPETKLVWIETPTNPTQKVIDIEGCAHIVHKHGDIILVVDNTFMSPYFQRPLALGADISMYSATKYMNVKAFIIDFVSCKTLLEQFHLLLIVTSAIEV

SEQ ID NO: 757411 - protein, 151 aa, Homo sapiens
MQEKDASSQGFLPHFQHFATQAIHVGQDPEQWTSRAVVPPISLSTTFKQGAPGQHSGFEYSRSGNPTRNCLEKAVAALDGAKYCLAFASGLAATVTITHLLKAGDQIICMDDVYGGTNRYFRQVASEFGLKISFVDCSLFGSKPPQTPPRR

SEQ ID NO: 757412 - protein, 327 aa, Homo sapiens
MASFKAVFVPVAYSLIFLLGVIGNVLVLVILERHRQTRSSTETFLFHLAVADLLLVFILPFAVAEGSVGWVLGTFLCKTVIALHKVNFYCSSLLLACIAVDRYLAIVHAVHAYRHRRLLSIHITCGTIWLVGFLLALPEILFAKVSQGHHNNSLPRCTFSQENQAETHAWFTSRFLYHVAGFLLPMLVMGWCYVGVVHRLRQAQRRPQRQKAVRVAILVTSIFFLCWSPYHIVIFLDTLARLKAVDNTCKLNGSLPVAITMCEFLGLAHCCLNPMLYTFAGVKFRSDLSRLLTKLGCTGPASLCQLFPSWRRSSLSESENATSLTTF

SEQ ID NO: 757413 - protein, 110 aa, Homo sapiens
GFLSDVGLCKARGASPRVLEKSWAKASRFPALRGNPLSGWPVSRPLLHVFGVALPFGCALRFCPRPFVLRPYVTAFFLETLFGPRDRTFSGFRPLCKANSGLGRAPDRGE

SEQ ID NO: 757414 - protein, 327 aa, Homo sapiens; identical to SEQ ID NO: 757412

SEQ ID NO: 757415 - protein, 125 aa, Homo sapiens
  misc_feature (16)..(16): Xaa can be any naturally occurring amino acid
KFKRLRTDYGELPGRXLRNDLGSDAIGLRMGCGNGRAGKAPGRMKGKWPPKHRGPGHGPWEVTGVSQGPVVSPRGSAGPGRWWAERTAPGWEKWGEFPLYYSCQCKTRPSRPGRLGTGPGRRHPV

SEQ ID NO: 757416 - protein, 372 aa, Homo sapiens
MNYPLTLEMDLENLEDLFWELDRLDNYNDTSLVENHLCPATEGPLMASFKAVFVPVAYSLIFLLGVIGNVLVLVILERHRQTRSSTETFLFHLAVADLLLVFILPFAVAEGSVGWVLGTFLCKTVIALHKVNFYCSSLLLACIAVDRYLAIVHAVHAYRHRRLLSIHITCGTIWLVGFLLALPEILFAKVSQGHHNNSLPRCTFSQENQAETHAWFTSRFLYHVAGFLLPMLVMGWCYVGVVHRLRQAQRRPQRQKAVRVAILVTSIFFLCWSPYHIVIFLDTLARLKAVDNTCKLNGSLPVAITMCEFLGLAHCCLNPMLYTFAGVKFRSDLSRLLTKLGCTGPASLCQLFPSWRRSSLSESENATSLTTF

SEQ ID NO: 757417 - protein, 327 aa, Homo sapiens; identical to SEQ ID NO: 757412

SEQ ID NO: 757418 - protein, 157 aa, Homo sapiens
MNCSPPSLIRSRWQQPLEKSGPWRLPGPGLLQPQAPVAPCHPFHGSTQGGHTATASSSFPSSQTGTKDFKFWLRCSSSGCPGIQSGKPGPRVTGVGKHTCTCTHVLPESLSSRQAAALGVSALLGLTRWKPRWSDLSLGVGHLRHLTIWGRDRNGIP

SEQ ID NO: 757419 - protein, 63 aa, Homo sapiens
LDGEKGPSSEGPEEEDGEGFSFKYSPGKLRGNQYKKMMTKEELRRSRELKNNEVILSVLLKAF

SEQ ID NO: 757420 - protein, 1155 aa, Homo sapiens
HRRRVSPQAACRCALRTSTCAGHYLRARLSWLTAACCSSLALPELPDARGSRNASRRGGFGRGMGAAGLLGVFLALVAPGVLGISCGSPPPILNGRISYYSTPIAVGTVIRYSCSGTFRLIGEKSLLCITKDKVDGTWDKPAPKCEYFNKYSSCPEPIVPGGYKIRGSTPYRHGDSVTFACKTNFSMNGNKSVWCQANNMWGPTRLPTCVSVFPLECPALPMIHNGHHTSENVGSIAPGLSVTYSCESGYLLVGEKIINCLSSGKWSAVPPTCEEARCKSLGRFPNGKVKEPPILRVGVTANFFCDEGYRLQGPPSSRCVIAGQGVAWTKMPVCEEIFCPSPPPILNGRHIGNSLANVSYGSIVTYTCDPDPEEGVNFILIGESTLRCTVDSQKTGTWSGPAPRCELSTSAVQCPHPQILRGRMVSGQKDRYTYNDTVIFACMFGFTLKGSKQIRCNAQGTWEPSAPVCEKECQAPPNILNGQKEDRHMVRFDPGTSIKYSCNPGYVLVGEESIQCTSEGVWTPPVPQCKVAACEATGRQLLTKPQHQFVRPDVNSSCGEGYKLSGSVYQECQGTIPWFMEIRLCKEITCPPPPVIYNGAHTGSSLEDFPYGTTVTYTCNPGPERGVEFSLIGESTIRCTSNDQERGTWSGPAPLCKLSLLAVQCSHVHIANGYKISGKEAPYFYNDTVTFKCYSGFTLKGSSQIRCKADNTWDPEIPVCEKGCQPPPGLHHGRHTGGNTVFFVSGMTVDYTCDPGYLLVGNKSIHCMPSGNWSPSAPRCEETCQHVRQSLQELPAGSRVELVNTSCQDGYQLTGHAYQMCQDAENGIWFKKIPLCKVIHCHPPPVIVNGKHTGMMAENFLYGNEVSYECDQGFYLLGEKKLQCRSDSKGHGSWSGPSPQCLRSPPVTRCPNPEVKHGYKLNKTHSAYSHNDIVYVDCNPGFIMNGSRVIRCHTDNTWVPGVPTCIKKAFIGCPPPPKTPNGNHTGGNIARFSPGMSILYSCDQGYLLVGEALLLCTHEGTWSQPAPHCKEVNCSSPADMDGIQKGLEPRKMYQYGAVVTLECEDGYMLEGSPQSQCQSDHQWNPPLAVCRSRSLAPVLCGIAAGLILLTFLIVITLYVISKHRERNYYTDTSQKEAFHLEAREVYSVDPYNPAS

SEQ ID NO: 757421 - protein, 1027 aa, Homo sapiens
MISMPTKFLFYFSGISCGSPPPILNGRISYYSTPIAVGTVIRYSCSGTFRLIGEKSLLCITKDKVDGTWDKPAPKCEYFNKYSSCPEPIVPGGYKIRGSTPYRHGDSVTFACKTNFSMNGNKSVWCQANNMWGPTRLPTCVSVFPLECPALPMIHNGHHTSENVGSIAPGLSVTYSCESGYLLVGEKIINCLSSGKWSAVPPTCEEARCKSLGRFPNGKVKEPPILRVGVTANFFCDEGYRLQGPPSSRCVIAGQGVAWTKMPVCEEIFCPSPPPILNGRHIGNSLANVSYGSIVTYTCDPDPEEGVNFILIGESTLRCTVDSQKTGTWSGPAPRCELSTSAVQCPHPQILRGRMVSGQKDRYTYNDTVIFACMFGFTLKGSKQIRCNAQGTWEPSAPVCEKECQAPPNILNGQKEDRHMVRFDPGTSIKYSCNPGYVLVGEESIQCTSEGVWTPPVPQCKVAACEATGRQLLTKPQHQFVRPDVNSSCGEGYKLSGSVYQECQGTIPWFMEIRLCKEITCPPPPVIYNGAHTGSSLEDFPYGTTVTYTCNPGPERGVEFSLIGESTIRCTSNDQERGTWSGPAPLCKLSLLAVQCSHVHIANGYKISGKEAPYFYNDTVTFKCYSGFTLKGSSQIRCKADNTWDPEIPVCEKETCQHVRQSLQELPAGSRVELVNTSCQDGYQLTGHAYQMCQDAENGIWFKKIPLCKVIHCHPPPVIVNGKHTGMMAENFLYGNEVSYECDQGFYLLGEKKLQCRSDSKGHGSWSGPSPQCLRSPPVTRCPNPEVKHGYKLNKTHSAYSHNDIVYVDCNPGFIMNGSRVIRCHTDNTWVPGVPTCIKKAFIGCPPPPKTPNGNHTGGNIARFSPGMSILYSCDQGYLLVGEALLLCTHEGTWSQPAPHCKEVNCSSPADMDGIQKGLEPRKMYQYGAVVTLECEDGYMLEGSPQSQCQSDHQWNPPLAVCRSRSLAPVLCGIAAGLILLTFLIVITLYVISKHRERNYYTDTSQKEAFHLEAREVYSVDPYNPAS

SEQ ID NO: 757422 - protein, 660 aa, Homo sapiens
RGSPHDVGSLVVSDVGIPMSCRATLAATGPNVCEKECQAPPNILNGQKEDRHMVRFDPGTSIKYSCNPGYVLVGEESIQCTSEGVWTPPVPQCKVAACEATGRQLLTKPQHQFVRPDVNSSCGEGYKLSGSVYQECQGTIPWFMEIRLCKEITCPPPPVIYNGAHTGSSLEDFPYGTTVTYTCNPGPERGVEFSLIGESTIRCTSNDQERGTWSGPAPLCKLSLLAVQCSHVHIANGYKISGKEAPYFYNDTVTFKCYSGFTLKGSSQIRCKADNTWDPEIPVCEKETCQHVRQSLQELPAGSRVELVNTSCQDGYQLTGHAYQMCQDAENGIWFKKIPLCKVIHCHPPPVIVNGKHTGMMAENFLYGNEVSYECDQGFYLLGEKKLQCRSDSKGHGSWSGPSPQCLRSPPVTRCPNPEVKHGYKLNKTHSAYSHNDIVYVDCNPGFIMNGSRVIRCHTDNTWVPGVPTCIKKAFIGCPPPPKTPNGNHTGGNIARFSPGMSILYSCDQGYLLVGEALLLCTHEGTWSQPAPHCKEVNCSSPADMDGIQKGLEPRKMYQYGAVVTLECEDGYMLEGSPQSQCQSDHQWNPPLAVCRSRSLAPVLCGIAAGLILLTFLIVITLYVISKHRERNYYTDTSQKEAFHLEAREVYSVDPYNPAS

SEQ ID NO: 757423 - protein, 1096 aa, Homo sapiens
HRRRVSPQAACRCALRTSTCAGHYLRARLSWLTAACCSSLALPELPDARGSRNASRRGGFGRGMGAAGLLGVFLALVAPGVLGISCGSPPPILNGRISYYSTPIAVGTVIRYSCSGTFRLIGEKSLLCITKDKVDGTWDKPAPKCEYFNKYSSCPEPIVPGGYKIRGSTPYRHGDSVTFACKTNFSMNGNKSVWCQANNMWGPTRLPTCVSVFPLECPALPMIHNGHHTSENVGSIAPGLSVTYSCESGYLLVGEKIINCLSSGKWSAVPPTCEEARCKSLGRFPNGKVKEPPILRVGVTANFFCDEGYRLQGPPSSRCVIAGQGVAWTKMPVCEEIFCPSPPPILNGRHIGNSLANVSYGSIVTYTCDPDPEEGVNFILIGESTLRCTVDSQKTGTWSGPAPRCELSTSAVQCPHPQILRGRMVSGQKDRYTYNDTVIFACMFGFTLKGSKQIRCNAQGTWEPSAPVCEKECQAPPNILNGQKEDRHMVRFDPGTSIKYSCNPGYVLVGEESIQCTSEGVWTPPVPQCKVAACEATGRQLLTKPQHQFVRPDVNSSCGEGYKLSGSVYQECQGTIPWFMEIRLCKEITCPPPPVIYNGAHTGSSLEDFPYGTTVTYTCNPGPERGVEFSLIGESTIRCTSNDQERGTWSGPAPLCKLSLLAVQCSHVHIANGYKISGKEAPYFYNDTVTFKCYSGFTLKGSSQIRCKADNTWDPEIPVCEKETCQHVRQSLQELPAGSRVELVNTSCQDGYQLTGHAYQMCQDAENGIWFKKIPLCKVIHCHPPPVIVNGKHTGMMAENFLYGNEVSYECDQGFYLLGEKKLQCRSDSKGHGSWSGPSPQCLRSPPVTRCPNPEVKHGYKLNKTHSAYSHNDIVYVDCNPGFIMNGSRVIRCHTDNTWVPGVPTCIKKAFIGCPPPPKTPNGNHTGGNIARFSPGMSILYSCDQGYLLVGEALLLCTHEGTWSQPAPHCKEVNCSSPADMDGIQKGLEPRKMYQYGAVVTLECEDGYMLEGSPQSQCQSDHQWNPPLAVCRSRSLAPVLCGIAAGLILLTFLIVITLYVISKHRERNYYTDTSQKEAFHLEAREVYSVDPYNPAS

SEQ ID NO: 757424 - protein, 894 aa, Homo sapiens
FFFLVCVCKVFPLECPALPMIHNGHHTSENVGSIAPGLSVTYSCESGYLLVGEKIINCLSSGKWSAVPPTCEEARCKSLGRFPNGKVKEPPILRVGVTANFFCDEGYRLQGPPSSRCVIAGQGVAWTKMPVCEEIFCPSPPPILNGRHIGNSLANVSYGSIVTYTCDPDPEEGVNFILIGESTLRCTVDSQKTGTWSGPAPRCELSTSAVQCPHPQILRGRMVSGQKDRYTYNDTVIFACMFGFTLKGSKQIRCNAQGTWEPSAPVCEKECQAPPNILNGQKEDRHMVRFDPGTSIKYSCNPGYVLVGEESIQCTSEGVWTPPVPQCKVAACEATGRQLLTKPQHQFVRPDVNSSCGEGYKLSGSVYQECQGTIPWFMEIRLCKEITCPPPPVIYNGAHTGSSLEDFPYGTTVTYTCNPGPERGVEFSLIGESTIRCTSNDQERGTWSGPAPLCKLSLLAVQCSHVHIANGYKISGKEAPYFYNDTVTFKCYSGFTLKGSSQIRCKADNTWDPEIPVCEKETCQHVRQSLQELPAGSRVELVNTSCQDGYQLTGHAYQMCQDAENGIWFKKIPLCKVIHCHPPPVIVNGKHTGMMAENFLYGNEVSYECDQGFYLLGEKKLQCRSDSKGHGSWSGPSPQCLRSPPVTRCPNPEVKHGYKLNKTHSAYSHNDIVYVDCNPGFIMNGSRVIRCHTDNTWVPGVPTCIKKAFIGCPPPPKTPNGNHTGGNIARFSPGMSILYSCDQGYLLVGEALLLCTHEGTWSQPAPHCKEVNCSSPADMDGIQKGLEPRKMYQYGAVVTLECEDGYMLEGSPQSQCQSDHQWNPPLAVCRSRSLAPVLCGIAAGLILLTFLIVITLYVISKHRERNYYTDTSQKEAFHLEAREVYSVDPYNPAS

SEQ ID NO: 757425 - protein, 1235 aa, Homo sapiens
MPAGGRAGSLKDPDVAELFFKDDPEKLFSDLREIGHGSFGAVYFARDVRNSEVVAIKKMSYSGKQSNEKWQDIIKEVRFLQKLRHPNTIQYRGCYLREHTAWLVMEYCLGSASDLLEVHKKPLQEVEIAAVTHGALQGLAYLHSHNMIHRDVKAGNILLSEPGLVKLGDFGSASIMAPANSFVGTPYWMAPEVILAMDEGQYDGKVDVWSLGITCIELAERKPPLFNMNAMSALYHIAQNESPVLQSGHWSEYFRNFVDSCLQKIPQDRPTSEVLLKHRFVLRERPPTVIMDLIQRTKDAVRELDNLQYRKMKKILFQEAPNGPGAEAPEEEEEAEPYMHRAGTLTSLESSHSVPSMSISASSQSSSVNSLADASDNEEEEEEEEEEEEEEEGPEAREMAMMQEGEHTVTSHSSIIHRLPGSDNLYDDPYQPEITPSPLQPPAAPAPTSTTSSARRRAYCRNRDHFATIRTASLVSRQIQEHEQDSALREQLSGYKRMRRQHQKQLLALESRLRGEREEHSARLQRELEAQRAGFGAEAEKLARRHQAIGEKEARAAQAEERKFQQHILGQQKKELAALLEAQKRTYKLRKEQLKEELQENPSTPKREKAEWLLRQKEQLQQCQAEEEAGLLRRQRQYFELQCRQYKRKMLLARHSLDQDLLREDLNKKQTQKDLECALLLRQHEATRELELRQLQAVQRTRAELTRLQHQTELGNQLEYNKRREQELRQKHAAQVRQQPKSLKVRAGQRPPGLPLPIPGALGPPNTGTPIEQQPCSPGQEAVLDQRMLGEEEEAVGERRILGKEGATLEPKQQRILGEESGAPSPSPQKHGSLVDEEVWGLPEEIEELRVPSLVPQERSIVGQEEAGTWSLWGKEDESLLDEEFELGWVQGPALTPVPEEEEEEEEGAPIGTPRDPGDGCPSPDIPPEPPPTHLRPCPASQLPGLLSHGLLAGLSFAVGSSSGLLPLLLLLLLPLLAAQGGGGLQAALLALEVGLVGLGASYLLLCTALHLPSSLFLLLAQGTALGAVLGLSWRRGLMGVPLGLGAAWLLAWPGLALPLVAMAAGGRWVRQQGPRVRRGISRLWLRVLLRLSPMAFRALQGCGAVGDRGLFALYPKTNKDGFRSRLPVPGPRRRNPRTTQHPLALLARVWVLCKGWNWRLARASQGLASHLPPWAIHTLASWGLLRGERPTRIPRLLPRSQRQLGPPASRQPLPGTLAGRRSRTRQSRALPPWR

SEQ ID NO: 757426 - protein, 639 aa, Homo sapiens
MPAGGRAGSLKDPDVAELFFKDDPEKLFSDLREIGHGSFGAVYFARDVRNSEVVAIKKMSYSGKQSNEKWQDIIKEVRFLQKLRHPNTIQYRGCYLREHTAWLVMEYCLGSASDLLEVHKKPLQEVEIAAVTHGALQGLAYLHSHNMIHRDVKAGNILLSEPGLVKLGDFGSASIMAPANSFVGTPYWMAPEVILAMDEGQYDGKVDVWSLGITCIELAERKPPLFNMNAMSALYHIAQNESPVLQSGHWSEYFRNFVDSCLQKIPQDRPTSEVLLKHRFVLRERPPTVIMDLIQRTKDAVRELDNLQYRKMKKILFQEAPNGPGAEAPEEEEEAEPYMHRAGTLTSLESSHSVPSMSISASSQSSSVNSLADASDNEEEEEEEEEEEEEEEGPEAREMAMMQEGEHTVTSHSSIIHRLPGSDNLYDDPYQPEITPSPLQPPAAPAPTSTTSSARRRAYCRNRDHFATIRTASLVSRQIQEHEQDSALREQLSGYKRMRRQHQKQLLALESRLRGEREEHSARLQRELEAQRAGFGAEAEKLARRHQAIGEKEARAAQAEERKFQQHILGQQKKELAALLEAQKLDLQTSQGTAEGGAPGEPQHSQAGEGRVAAAAEGAAPAVPGGGGSRAAAAAAPVL

SEQ ID NO: 757427 - protein, 971 aa, Homo sapiens
GELAADLSALFPQHRFVLRERPPTVIMDLIQRTKDAVRELDNLQYRKMKKILFQEAPNGPGAEAPEEEEEAEPYMHRAGTLTSLESSHSVPSMSISASSQSSSVNSLADASDNEEEEEEEEEEEEEEEGPEAREMAMMQEGEHTVTSHSSIIHRLPGSDNLYDDPYQPEITPSPLQPPAAPAPTSTTSSARRRAYCRNRDHFATIRTASLVSRQIQEHEQDSALREQLSGYKRMRRQHQKQLLALESRLRGEREEHSARLQRELEAQRAGFGAEAEKLARRHQAIGEKEARAAQAEERKFQQHILGQQKKELAALLEAQKRTYKLRKEQLKEELQENPSTPKREKAEWLLRQKEQLQQCQAEEEAGLLRRQRQYFELQCRQYKRKMLLARHSLDQDLLREDLNKKQTQKDLECALLLRQHEATRELELRQLQAVQRTRAELTRLQHQTELGNQLEYNKRREQELRQKHAAQVRQQPKSLKVRAGQRPPGLPLPIPGALGPPNTGTPIEQQPCSPGQEAVLDQRMLGEEEEAVGERRILGKEGATLEPKQQRILGEESGAPSPSPQKHGSLVDEEVWGLPEEIEELRVPSLVPQERSIVGQEEAGTWSLWGKEDESLLDEEFELGWVQGPALTPVPEEEEEEEEGAPIGTPRDPGDGCPSPDIPPEPPPTHLRPCPASQLPGLLSHGLLAGLSFAVGSSSGLLPLLLLLLLPLLAAQGGGGLQAALLALEVGLVGLGASYLLLCTALHLPSSLFLLLAQGTALGAVLGLSWRRGLMGVPLGLGAAWLLAWPGLALPLVAMAAGGRWVRQQGPRVRRGISRLWLRVLLRLSPMAFRALQGCGAVGDRGLFALYPKTNKDGFRSRLPVPGPRRRNPRTTQHPLALLARVWVLCKGWNWRLARASQGLASHLPPWAIHTLASWGLLRGERPTRIPRLLPRSQRQLGPPASRQPLPGTLAGRRSRTRQSRALPPWR

SEQ ID NO: 757428 - protein, 834 aa, Homo sapiens
MPAGGRAGSLKDPDVAELFFKDDPEKLFSDLREIGHGSFGAVYFARDVRNSEVVAIKKMSYSGKQSNEKWQDIIKEVRFLQKLRHPNTIQYRGCYLREHTAWLVMEYCLGSASDLLEVHKKPLQEVEIAAVTHGALQGLAYLHSHNMIHRDVKAGNILLSEPGLVKLGDFGSASIMAPANSFVGTPYWMAPEVILAMDEGQYDGKVDVWSLGITCIELAERKPPLFNMNAMSALYHIAQNESPVLQSGHWSEYFRNFVDSCLQKIPQDRPTSEVLLKHRFVLRERPPTVIMDLIQRTKDAVRELDNLQYRKMKKILFQEAPNGPGAEAPEEEEEAEPYMHRAGTLTSLESSHSVPSMSISASSQSSSVNSLADASDNEEEEEEEEEEEEEEEGPEAREMAMMQEGEHTVTSHSSIIHRLPGSDNLYDDPYQPEITPSPLQPPAAPAPTSTTSSARRRAYCRNRDHFATIRTASLVSRQIQEHEQDSALREQLSGYKRMRRQHQKQLLALESRLRGEREEHSARLQRELEAQRAGFGAEAEKLARRHQAIGEKEARAAQAEERKFQQHILGQQKKELAALLEAQKRTYKLRKEQLKEELQENPSTPKREKAEWLLRQKEQLQQCQAEEEAGLLRRQRQYFELQCRQYKRKMLLARHSLDQDLLREDLNKKQTQKDLECALLLRQHEATRELELRQLQAVQRTRAELTRLQHQTELGNQLEYNKRREQELRQKHAAQVRQQPKSLKSKELQIKKQFQETCKIQTRQYKALRAHLLETTPKAQHKSLLKRLKEEQTRKLAILAEQYDQSISEMLSSQAVRPGVQGGSALEARLCTLL

SEQ ID NO: 757429 - protein, 369 aa, Homo sapiens
ELREPEEVEVTREPGITPLHSSLATDECWGCWREAGEEEEEGAPIGTPRDPGDGCPSPDIPPEPPPTHLRPCPASQLPGLLSHGLLAGLSFAVGSSSGLLPLLLLLLLPLLAAQGGGGLQAALLALEVGLVGLGASYLLLCTALHLPSSLFLLLAQGTALGAVLGLSWRRGLMGVPLGLGAAWLLAWPGLALPLVAMAAGGRWVRQQGPRVRRGISRLWLRVLLRLSPMAFRALQGCGAVGDRGLFALYPKTNKDGFRSRLPVPGPRRRNPRTTQHPLALLARVWVLCKGWNWRLARASQGLASHLPPWAIHTLASWGLLRGERPTRIPRLLPRSQRQLGPPASRQPLPGTLAGRRSRTRQSRALPPWR

SEQ ID NO: 757430 - protein, 76 aa, Homo sapiens
SISASSQSSSVNSLADASDNEEEEEEEEEEEEEEEGPEAREMAMMQEGEHTVTSHSSIIHRLPVHSSPLGDPSHLL

SEQ ID NO: 757431 - protein, 1049 aa, Homo sapiens
MPAGGRAGSLKDPDVAELFFKDDPEKLFSDLREIGHGSFGAVYFARDVRNSEVVAIKKMSYSGKQSNEKWQDIIKEVRFLQKLRHPNTIQYRGCYLREHTAWLVMEYCLGSASDLLEVHKKPLQEVEIAAVTHGALQGLAYLHSHNMIHRDVKAGNILLSEPGLVKLGDFGSASIMAPANSFVGTPYWMAPEVILAMDEGQYDGKVDVWSLGITCIELAERKPPLFNMNAMSALYHIAQNESPVLQSGHWSEYFRNFVDSCLQKIPQDRPTSEVLLKHRFVLRERPPTVIMDLIQRTKDAVRELDNLQYRKMKKILFQEAPNGPGAEAPEEEEEAEPYMHRAGTLTSLESSHSVPSMSISASSQSSSVNSLADASDNEEEEEEEEEEEEEEEGPEAREMAMMQEGEHTVTSHSSIIHRLPGSDNLYDDPYQPEITPSPLQPPAAPAPTSTTSSARRRAYCRNRDHFATIRTASLVSRQIQEHEQDSALREQLSGYKRMRRQHQKQLLALESRLRGEREEHSARLQRELEAQRAGFGAEAEKLARRHQAIGEKEARAAQAEERKFQQHILGQQKKELAALLEAQKRTYKLRKEQLKEELQENPSTPKREKAEWLLRQKEQLQQCQAEEEAGLLRRQRQYFELQCRQYKRKMLLARHSLDQDLLREDLNKKQTQKDLECALLLRQHEATRELELRQLQAVQRTRAELTRLQHQTELGNQLEYNKRREQELRQKHAAQVRQQPKSLKSKELQIKKQFQETCKIQTRQYKALRAHLLETTPKAQHKSLLKRLKEEQTRKLAILAEQYDQSISEMLSSQALRLDETQEAEFQALRQQLQQELELLNAYQSKIKIRTESQHERELRELEQRVALRRALLEQRVEEELLALQTGRSERIRSLLERQAREIEAFDAESMRLGFSSMALGGIPAEAAAQGYPAPPPAPAWPSRPVPRSGAHWSHGPPPPGMPPPAWRQPSLLAPPGPPNWLGPPTQSGTPRGGALLLLRNSPQPLRRAASGGSGSENVGPPAAAVPGPLSRSTSVASHILNGSSHFYS

SEQ ID NO: 757432 - protein, 1062 aa, Homo sapiens
MMGTSQGHVARKSRNWGLNPSRLSSIPLSSTPCHLSPSSLSPFSVAERKPPLFNMNAMSALYHIAQNESPVLQSGHWSEYFRNFVDSCLQKIPQDRPTSEVLLKHRFVLRERPPTVIMDLIQRTKDAVRELDNLQYRKMKKILFQEAPNGPGAEAPEEEEEAEPYMHRAGTLTSLESSHSVPSMSISASSQSSSVNSLADASDNEEEEEEEEEEEEEEEGPEAREMAMMQEGEHTVTSHSSIIHRLPGSDNLYDDPYQPEITPSPLQPPAAPAPTSTTSSARRRAYCRNRDHFATIRTASLVSRQIQEHEQDSALREQLSGYKRMRRQHQKQLLALESRLRGEREEHSARLQRELEAQRAGFGAEAEKLARRHQAIGEKEARAAQAEERKFQQHILGQQKKELAALLEAQKRTYKLRKEQLKEELQENPSTPKREKAEWLLRQKEQLQQCQAEEEAGLLRRQRQYFELQCRQYKRKMLLARHSLDQDLLREDLNKKQTQKDLECALLLRQHEATRELELRQLQAVQRTRAELTRLQHQTELGNQLEYNKRREQELRQKHAAQVRQQPKSLKVRAGQRPPGLPLPIPGALGPPNTGTPIEQQPCSPGQEAVLDQRMLGEEEEAVGERRILGKEGATLEPKQQRILGEESGAPSPSPQKHGSLVDEEVWGLPEEIEELRVPSLVPQERSIVGQEEAGTWSLWGKEDESLLDEEFELGWVQGPALTPVPEEEEEEEEGAPIGTPRDPGDGCPSPDIPPEPPPTHLRPCPASQLPGLLSHGLLAGLSFAVGSSSGLLPLLLLLLLPLLAAQGGGGLQAALLALEVGLVGLGASYLLLCTALHLPSSLFLLLAQGTALGAVLGLSWRRGLMGVPLGLGAAWLLAWPGLALPLVAMAAGGRWVRQQGPRVRRGISRLWLRVLLRLSPMAFRALQGCGAVGDRGLFALYPKTNKDGFRSRLPVPGPRRRNPRTTQHPLALLARVWVLCKGWNWRLARASQGLASHLPPWAIHTLASWGLLRGERPTRIPRLLPRSQRQLGPPASRQPLPGTLAGRRSRTRQSRALPPWR

SEQ ID NO: 757433 - protein, 585 aa, Homo sapiens
MGTRPRAGTEAAREDLNKKQTQKDLECALLLRQHEATRELELRQLQAVQRTRAELTRLQHQTELGNQLEYNKRREQELRQKHAAQVRQQPKSLKVRAGQRPPGLPLPIPGALGPPNTGTPIEQQPCSPGQEAVLDQRMLGEEEEAVGERRILGKEGATLEPKQQRILGEESGAPSPSPQKHGSLVDEEVWGLPEEIEELRVPSLVPQERSIVGQEEAGTWSLWGKEDESLLDEEFELGWVQGPALTPVPEEEEEEEEGAPIGTPRDPGDGCPSPDIPPEPPPTHLRPCPASQLPGLLSHGLLAGLSFAVGSSSGLLPLLLLLLLPLLAAQGGGGLQAALLALEVGLVGLGASYLLLCTALHLPSSLFLLLAQGTALGAVLGLSWRRGLMGVPLGLGAAWLLAWPGLALPLVAMAAGGRWVRQQGPRVRRGISRLWLRVLLRLSPMAFRALQGCGAVGDRGLFALYPKTNKDGFRSRLPVPGPRRRNPRTTQHPLALLARVWVLCKGWNWRLARASQGLASHLPPWAIHTLASWGLLRGERPTRIPRLLPRSQRQLGPPASRQPLPGTLAGRRSRTRQSRALPPWR

SEQ ID NO: 757434 - protein, 878 aa, Homo sapiens
MPAGGRAGSLKDPDVAELFFKDDPEKLFSDLREIGHGSFGAVYFARDVRNSEVVAIKKMSYSGKQSNEKWQDIIKEVRFLQKLRHPNTIQYRGCYLREHTAWLVMEYCLGSASDLLEVHKKPLQEVEIAAVTHGALQGLAYLHSHNMIHRDVKAGNILLSEPGLVKLGDFGSASIMAPANSFVGTPYWMAPEVILAMDEGQYDGKVDVWSLGITCIELAERKPPLFNMNAMSALYHIAQNESPVLQSGHWSEYFRNFVDSCLQKIPQDRPTSEVLLKHRFVLRERPPTVIMDLIQRTKDAVRELDNLQYRKMKKILFQEAPNGPGAEAPEEEEEAEPYMHRAGTLTSLESSHSVPSMSISASSQSSSVNSLADASDNEEEEEEEEEEEEEEEGPEAREMAMMQEGEHTVTSHSSIIHRLPGSDNLYDDPYQPEITPSPLQPPAAPAPTSTTSSARRRAYCRNRDHFATIRTASLVSRQIQEHEQDSALREQLSGYKRMRRQHQKQLLALESRLRGEREEHSARLQRELEAQRAGFGAEAEKLARRHQAIGEKEARAAQAEERKFQQHILGQQKKELAALLEAQKRTYKLRKEQLKEELQENPSTPKREKAEWLLRQKEQLQQCQAEEEAGLLRRQRQYFELQCRQYKRKMLLARHSLDQDLLREDLNKKQTQKDLECALLLRQHEATRELELRQLQAVQRTRAELTRLQHQTELGNQLEYNKRREQELRQKHAAQVRQQPKSLKVRAGQRPPGLPLPIPGALGPPNTGTPIEQQPCSPGQEAVLDQRMLGEEEEAVGERRILGKEGATLEPKQQRILGEESGAPSPSPQKHGSLVDEEVWGLPEEIEELRVPSLVPQERSIVGQEEAGTCSGDNHVDR

SEQ ID NO: 757435 - protein, 335 aa, Homo sapiens
PLVVPPLPLPPLPPPLPRCPHLPLIRPLHESKELQIKKQFQETCKIQTRQYKALRAHLLETTPKAQHKSLLKRLKEEQTRKLAILAEQYDQSISEMLSSQALRLDETQEAEFQALRQQLQQELELLNAYQSKIKIRTESQHERELRELEQRVALRRALLEQRVEEELLALQTGRSERIRSLLERQAREIEAFDAESMRLGFSSMALGGIPAEAAAQGYPAPPPAPAWPSRPVPRSGAHWSHGPPPPGMPPPAWRQPSLLAPPGPPNWLGPPTQSGTPRGGALLLLRNSPQPLRRAASGGSGSENVGPPAAAVPGPLSRSTSVASHILNGSSHFYS

SEQ ID NO: 757436 - protein, 136 aa, Homo sapiens
TLLWLNPEESREEVGRLRKPFPRRSSHCHLEVRLIEVIVHVPANLPKLPSLLHHSMKERQHVDQRLEGRVRALVQHFVRDLEVSCPHVEFQPIGWLGDNLQKRRKHTVMETAGPQAWKSVHNAGTALSFLSTEPSV

SEQ ID NO: 757437 - protein, 110 aa, Homo sapiens
CLKGSNTKVLTDLVPALSSHSTCDTLLGPTQCFNHSPRMSASFIPPSTLKPCPLAQHKEQSGLLGSKSLPPLAPTIVIICLSASQNYKLLSAWAMFCHLCISSIWPVIWY

SEQ ID NO: 757438 - protein, 482 aa, Homo sapiens
MASLGPAAAGEQASGAEAEPGPAGPPPPPSPSSLGPLLPLQREPLYNWQATKASLKERFAFLFNSELLSDVRFVLGKGRGAAAAGGPQRIPAHRFVLAAGSAVFDAMFNGGMATTSAEIELPDVEPAAFLALLRFLYSDEVQIGPETVMTTLYTAKKYAVPALEAHCVEFLTKHLRADNAFMLLTQARLFDEPQLASLCLDTIDKSTMDAISAEGFTDIDIDTLCAVLERDTLSIRESRLFGAVVRWAEAECQRQQLPVTFGNKQKVLGKALSLIRFPLMTIEEFAAGPAQSGILSDREVVNLFLHFTVNPKPRVEYIDRPRCCLRGKECCINRFQQVESRWGYSGTSDRIRFTVNRRISIVGFGLYGSIHGPTDYQVNIQIIEYEKKQTLGQNDTGFSCDGTANTFRVMFKEPIEILPNVCYTACATLKGPDSHYGTKGLKKVVHETPAASKTVFFFFSSPGNNNGTSIEDGQIPEIIFYT

SEQ ID NO: 757439 - protein, 174 aa, Homo sapiens
MGYAPDIDTLCAVLERDTLSIRESRLFGAVVRWAEAECQRQQLPVTFGNKQKVLGKALSLIRFPLMTIEEFAAGPAQSGILSDREVVNLFLHFTVNPKPRVEYIDRPRCCLRGKECCINRFQQVESRWGYSGTSDRIRFTVNRRISIVGFGLYGSIHGPTDYQVNIQGRNPWDP

SEQ ID NO: 757440 - protein, 275 aa, Homo sapiens
MDAISAEGFTDIDIDTLCAVLERDTLSIRESRLFGAVVRWAEAECQRQQLPVTFGNKQKVLGKALSLIRFPLMTIEEFAAGPAQSGILSDREVVNLFLHFTVNPKPRVEYIDRPRCCLRGKECCINRFQQVESRWGYSGTSDRIRFTVNRRISIVGFGLYGSIHGPTDYQVNIQIIEYEKKQTLGQNDTGFSCDGTANTFRVMFKEPIEILPNVCYTACATLKGPDSHYGTKGLKKVVHETPAASKTVFFFFSSPGNNNGTSIEDGQIPEIIFYT

SEQ ID NO: 757441 - protein, 482 aa, Homo sapiens; identical to SEQ ID NO: 757438

SEQ ID NO: 757442 - protein, 268 aa, Homo sapiens
MGYAPDIDTLCAVLERDTLSIRESRLFGAVVRWAEAECQRQQLPVTFGNKQKVLGKALSLIRFPLMTIEEFAAGPAQSGILSDREVVNLFLHFTVNPKPRVEYIDRPRCCLRGKECCINRFQQVESRWGYSGTSDRIRFTVNRRISIVGFGLYGSIHGPTDYQVNIQIIEYEKKQTLGQNDTGFSCDGTANTFRVMFKEPIEILPNVCYTACATLKGPDSHYGTKGLKKVVHETPAASKTVFFFFSSPGNNNGTSIEDGQIPEIIFYT

SEQ ID NO: 757443 - protein, 354 aa, Homo sapiens
MASLGPAAAGEQASGAEAEPGPAGPPPPPSPSSLGPLLPLQREPLYNWQATKASLKERFAFLFNSELLSDVRFVLGKGRGAAAAGGPQRIPAHRFVLAAGSAVFDAMFNGGMATTSAEIELPDVEPAAFLALLRFLYSDEVQIGPETVMTTLYTAKKYAVPALEAHCVEFLTKHLRADNAFMLLTQARLFDEPQLASLCLDTIDKSTMDAISAEGFTDIDIDTLCAVLERDTLSIRESRLFGAVVRWAEAECQRQQLPVTFGNKQKVLGKALSLIRFPLMTIEEFAAGPAQSGILSDREVVNLFLHFTVNPKPRVEYIDRPRCCLRGKECCINRFQQVESRWGYSGTSDRIRQI

SEQ ID NO: 757444 - protein, 385 aa, Homo sapiens
MASLGPAAAGEQASGAEAEPGPAGPPPPPSPSSLGPLLPLQREPLYNWQATKASLKERFAFLFNSELLSDVRFVLGKGRGAAAAGGPQRIPAHRFVLAAGSAVFDAMFNGGMATTSAEIELPDVEPAAFLALLRFLYSDEVQIGPETVMTTLYTAKKYAVPALEAHCVEFLTKHLRADNAFMLLTQARLFDEPQLASLCLDTIDKSTMDAISAEGFTDIDIDTLCAVLERDTLSIRESRLFGAVVRWAEAECQRQQLPVTFGNKQKVLGKALSLIRFPLMTIEEFAAGPAQSGILSDREVVNLFLHFTVNPKPRVEYIDRPRCCLRGKECCINRFQQVESRWGYSGTSDRIRSLNMRKSKPWDRMIPALVVMGQLTHSGSCSRNP

SEQ ID NO: 757445 - protein, 482 aa, Homo sapiens; identical to SEQ ID NO: 757438

SEQ ID NO: 757446 - protein, 450 aa, Homo sapiens
MASLGPAAAGEQASGAEAEPGPAGPPPPPSPSSLGPLLPLQREPLYNWQATKASLKERFAFLFNSELLSDVRFVLGKGRGAAAAGGPQRIPAHRFVLAAGSAVFDAMFNGGMATTSAEIELPDVEPAAFLALLRFLYSDEVQIGPETVMTTLYTAKKYAVPALEAHCVEFLTKHLRADNAFMLLTQARLFDEPQLASLCLDTIDKSTMDAISAEGFTDIDIDTLCAVLERDTLSIRESRLFGAVVRWAEAECQRQQLPVTFGNKQKVLGKALSLIRFPLMTIEEFAAGPAQSGILSDREVVNLFLHFTVNPKPRVEYIDRPRCCLRGKECCINRFQQVESRWGYSGTSDRIRFTVNRRISIVGFGLYGSIHGPTDYQVNIQIIEYEKKQTLGQNDTGFSCDGTANTFRVMFKEPIEILPNVCYTACATLKVRVMHYVPDGFLLNVAECVF

SEQ ID NO: 757447 - protein, 404 aa, Homo sapiens
MASLGPAAAGEQASGAEAEPGPAGPPPPPSPSSLGPLLPLQREPLYNWQATKASLKERFAFLFNSELLSDVRFVLGKGRGAAAAGGPQRIPAHRFVLAAGSAVFDAMFNGGMATTSAEIELPDVEPAAFLALLRFLYSDEVQIGPETVMTTLYTAKKYAVPALEAHCVEFLTKHLRADNAFMLLTQARLFDEPQLASLCLDTIDKSTMDAISAEGFTDIDIDTLCAVLERDTLSIRESRLFGAVVRWAEAECQRQQLPVTFGNKQKVLGKALSLIRFPLMTIEEFAAGPAQSGILSDREVVNLFLHFTVNPKPRVEYIDRPRCCLRGKECCINRFQQVESRWGYSGTSDRIRFTVNRRISIVGFGLYGSIHGPTDYQVNIQIIDMRKANLDRIYGLLIDAYRIL

SEQ ID NO: 757448 - protein, 482 aa, Homo sapiens; identical to SEQ ID NO: 757438

SEQ ID NO: 757449 - protein, 297 aa, Homo sapiens
MASLGPAAAGEQASGAEAEPGPAGPPPPPSPSSLGPLLPLQREPLYNWQATKASLKERFAFLFNSELLSDVRFVLGKGRGAAAAGGPQRIPAHRFVLAAGSAVFDAMFNGGMATTSAEIELPDVEPAAFLALLRFLYSDEVQIGPETVMTTLYTAKKYAVPALEAHCVEFLTKHLRADNAFMLLTQARLFDEPQLASLCLDTIDKSTMDAISAEGFTDIDIDTLCAVLERDTLSIRESRLFGAVVRWAEAECQRQQLPVTFGNKQKVLGKALSLIRFPLMTIEEFAAGKGINSPKSI

SEQ ID NO: 757450 - protein, 163 aa, Homo sapiens
CSAEIGDQQKASIWNFHYLQEHLSNPHALPLTQRAHCRVLSVFLVIPVGSFNSSGGSSSGTITDEDELTGILKKLSLEKYQPIFEEQEVDMEAFLTLTDGDLKELGIKTDGSRQQCAIETSKLGLVLEVSIARSEDLDYSIDKTEAGIKELQKSMVRWKNTGR

SEQ ID NO: 757451 - protein, 175 aa, Homo sapiens
CSAEIGDQQKASIWNFHYLQEHLSNPHALPLTQRAHCRVLSVFLVIPFGSFKSSGGSSSGTITDEDELTGILKKLSLEKYQPIFEEQEVDMEAFLTLTDGDLKELGIKTDGSRQQILAAISELNAGKGRERQILQETIHNFHSSFESSASNTRAPGNSPSMVGWVRPEETASGKR

SEQ ID NO: 757452 - protein, 161 aa, Homo sapiens
CSAEIGDQQKASIWNFHYLQEHLSNPHALPLTQRAHCRVLSVFLVIPFGSFKSSGGSSSGTITDEDELTGILKKLSLEKYQPIFEEQEVDMEAFLTLTDGDLKELGIKTDGSRQQILAAISELNAGKGRERQILQETIHNFHSSFESSASNTRAPGNSPCA

SEQ ID NO: 757453 - protein, 161 aa, Homo sapiens; identical to SEQ ID NO: 757452

SEQ ID NO: 757454 - protein, 161 aa, Homo sapiens; identical to SEQ ID NO: 757452

SEQ ID NO: 757455 - protein, 161 aa, Homo sapiens; identical to SEQ ID NO: 757452

SEQ ID NO: 757456 - protein, 174 aa, Homo sapiens
CSAEIGDQQKASIWNFHYLQEHLSNPHALPLTQRAHCRVLSVFLVIPVGSFNSSGGSSSGTITDEDELTGILKKLSLEKYQPIFEEQEVDMEAFLTLTDGDLKELGIKTDGSRQQILAAISELNAGKGRERQILQETIHNFHSSFESSASNARRAYCCPPKPCLAQCQAHHTNF

SEQ ID NO: 757457 - protein, 206 aa, Homo sapiens
MLTIFNEIDVSNIQKMRARHKEAFLKKHNLKLGFMSASVKASAFALQEQPVVNAVIDDITKEVVYRDYIDISVAVATPQGLVVPVIRNVEAMNYADIEQTITELGEKARKNEFAIEDMDGGTFTISNGGVFGSLFEHPLSTPLSAILGMHGIFDKPVAIGGKVEVQPMMYVALTYDHRLIDGREAVTFLRKIKAAVEDPRVLLFDL

SEQ ID NO: 757458 - protein, 452 aa, Homo sapiens
SRGPVLIGRGGVGSGAASALARSRPLASRLSSRRRTRAPRSGAMQRLAMDLRMLSRELSLYLEHQVRVGFFGSGVGLSLILGFSVAYAFYYLSSIAKKPQLVTGGESFSRFLQDHCPVVTETYYPTVWCWEGRGQTLLRPFITSKPPVQYRNELIKTADGGQISLDWFDNDNSTCYMDASTRPTILLLPGLTGTSKESYILHMIHLSEELGYRCVVFNNRGVAGENLLTPRTYCCANTEDLETVIHHVHSLYPSAPFLAAGVSMGGMLLLNYLGKIGSKTPLMAAATFSVGWNTFACSESLEKPLNWLLFNYYLTTCLQSSVNKHRHMFVKQVDMDHVMKAKSIREFDKRFTSVMFGYQTIDDYYTDASPSPRLKSVGIPVLCLNSVDDVFSPSHAIPIETAKQNPNVALVLTSYGGHIGFLEGIWPRQSTYMDRVFKQFVQAMVEHGHELS

SEQ ID NO: 757459 - protein, 266 aa, Homo sapiens
SRGPVLIGRGGVGSGAASALARSRPLASRLSSRRRTRAPRSGAMQRLAMDLRMLSRELSLYLEHQVRVGFFGSGVGLSLILGFSVAYAFYYLSSIAKKPQLVTGGESFSRFLQDHCPVVTETYYPTVWCWEGRGQTLLRPFITSKPPVQYRNELIKTADGGQISLDWFDNDNSTCYMDASTRPTILLLPGLTGTSKESYILHMIHLSEELGYRCVVFNNRGVAGENLLTPRTYCCANTEDLETVIHHVHSLYPSAPFLAAGVSMGG

SEQ ID NO: 757460 - protein, 149 aa, Homo sapiens
SRGPVLIGRGGVGSGAASALARSRPLASRLSSRRRTRAPRSGAMQRLAMDLRMLSRELSLYLEHQVRVGFFGSGVGLSLILGFSVAYAFYYLSSIAKKPQLVTGGESFSRFLQDHCPVVTETYHQTYYLIVAWPHGNKQGVIYPSYDPS

SEQ ID NO: 757461 - protein, 399 aa, Homo sapiens
SRGPVLIGRGGVGSGAASALARSRPLASRLSSRRRTRAPRSGAMQRLAMDLRMLSRELSLYLEHQVRVGFFGSGVGLSLILGFSVAYAFYYLSSIAKKPQLVTGGESFSRFLQDHCPVVTETYYPTVWCWEGRGQTLLRPFITSKPPVQYRNELIKTADGGQISLDWFDNDNSTCYMDASTRPTILLLPGLTGTSKESYILHMIHLSEELGYRMLLLNYLGKIGSKTPLMAAATFSVGWNTFACSESLEKPLNWLLFNYYLTTCLQSSVNKHRHMFVKQVDMDHVMKAKSIREFDKRFTSVMFGYQTIDDYYTDASPSPRLKSVGIPVLCLNSVDDVFSPSHAIPIETAKQNPNVALVLTSYGGHIGFLEGIWPRQSTYMDRVFKQFVQAMVEHGHELS

SEQ ID NO: 757462 - protein, 266 aa, Homo sapiens; identical to SEQ ID NO: 757459

SEQ ID NO: 757463 - protein, 215 aa, Homo sapiens
SRGPVLIGRGGVGSGAASALARSRPLASRLSSRRRTRAPRSGAMQRLAMDLRMLSRELSLYLEHQVRVGFFGSGVGLSLILGFSVAYAFYYLSSIAKKPQLVTGGESFSRFLQDHCPVVTETYYPTVWCWEGRGQTLLRPFITSKPPVQYRNELIKTADGGQISLDWFDNDNSTCYMDASTRPTILLLPGLTGTSKESYILHMIHLSEELGYRYQ

SEQ ID NO: 757464 - protein, 196 aa, Homo sapiens
SRGPVLIGRGGVGSGAASALARSRPLASRLSSRRRTRAPRSGAMQRLAMDLRMLSRELSLYLEHQVRVGFFGSGVGLSLILGFSVAYAFYYLSSIAKKPQLVTGGESFSRFLQDHCPVVTETYYPTVWCWEGRGQTLLRPFITSKPPVQYRNNSTCYMDASTRPTILLLPGLTGTSKESYILHMIHLSEELGYRYQ

SEQ ID NO: 757465 - protein, 154 aa, Homo sapiens
MTFITPVTEIITYCSLQLQWPSKLFFPRMLLLNYLGKIGSKTPLMAAATFSVGWNTFACSESLEKPLNWLLFNYYLTTCLQSSVNKHRHMFVKQVDMDHVMKAKSIREFDKRFTSVMFGYQTIDDYYTDASPSPRLKSVGIPVLCLNAMIAFRP

SEQ ID NO: 757466 - protein, 189 aa, Homo sapiens [sequence omitted]

SEQ ID NO: 757467 - protein, 214 aa, Homo sapiens
MTFITPVTEIITYCSLQLQWPSKLFFPRMLLLNYLGKIGSKTPLMAAATFSVGWNTFACSESLEKPLNWLLFNYYLTTCLQSSVNKHRHMFVKQVDMDHVMKAKSIREFDKRFTSVMFGYQTIDDYYTDASPSPRLKSVGIPVLCLNSVDDVFSPSHAIPIETAKQNPNVALVLTSYGGHIGFLEGIWPRQSTYMDRVFKQFVQAMVEHGHELS

SEQ ID NO: 757468 - protein, 266 aa, Homo sapiens; identical to SEQ ID NO: 757459

SEQ ID NO: 757469 - protein, 215 aa, Homo sapiens; identical to SEQ ID NO: 757463

SEQ ID NO: 757470 - protein, 1585 aa, Homo sapiens
MNSQPQTRSPFFQRPQIQPPRATIPNSSPSIRPGAQTPTAVYQANQHIMMVNHLPMPYPVPQGPQYCIPQYRHSGPPYVGPPQQYPVQPPGPGPFYPGPGPGDFPNAYGTPFYPSQPVYQSAPIIVPTQQQPPPAKREKKTIRIRDPNQGGKDITEEIMSGGGSRNPTPPIGRPTSTPTPPQQLPSQVPEHSPVVYGTVESAHLAASTPVTAASDQKQEEKPKPDPVLKSPSPVLRLVLSGEKKEQEGQTSETTAIVSIAELPLPPSPTTVSSVARSTIAAPTSSALSSQPIFTTAIDDRCELSSPREDTIPIPSLTSCTETSDPLPTNENDDDICKKPCSVAPNDIPLVSSTNLINEINGVSEKLSATESIVEIVKQEVLPLTLELEILENPPEEMKLECIPAPITPSTVPSFPPTPPTPPASPPHTPVIVPAAATTVSSPSAAITVQRVLEEDESIRTCLSEDAKEIQNKIEVEADGQTEEILDSQNLNSRRSPVPAQIAITVPKTWKKPKDRTRTTEEMLEAELELKAEEELSIDKVLESEQDKMSQGFHPERDPSDLKKVKAVEENGEEAEPVRNGAESVSEGEGIDANSGSTDSSGDGVTFPFKPESWKPTDTEGKKQYDREFLLDFQFMPACIQKPEGLPPISDVVLDKINQPKLPMRTLDPRILPRGPDFTPAFADFGRQTPGGRGVPLLNVGSRRSQPGQRREPRKIITVSVKEDVHLKKAENAWKPSQKRDSQADDPENIKTQELFRKVRSILNKLTPQMFNQLMKQVSGLTVDTEERLKGVIDLVFEKAIDEPSFSVAYANMCRCLVTLKVPMADKPGNTVNFRKLLLNRCQKEFEKDKADDDVFEKKQKELEAASAPEERTRLHDELEEAKDKARRRSIGNIKFIGELFKLKMLTEAIMHDCVVKLLKNHDEESLECLCRLLTTIGKDLDFEKAKPRMDQYFNQMEKIVKERKTSSRIRFMLQDVIDLRLCNWVSRRADQGPKTIEQIHKEAKIEEQEEQRKVQQLMTKEKRRPGVQRVDEGGWNTVQGAKNSRVLDPSKFLKITKPTIDEKIQLVPKAQLGSWGKGSSGGAKASETDALRSSASSLNRFSALQPPAPSGSTPSTPVEFDSRRTLTSRGSMGREKNDKPLPSATARPNTFMRGGSSKDLLDNQSQEEQRREMLETVKQLTGGVDVERNSTEAERNKTRESAKPEISAMSAHDKAALSEEELERKSKSIIDEFLHINDFKEAMQCVEELNAQGLLHVFVRVGVESTLERSQITRDHMGQLLYQLVQSEKLSKQDFFKGFSETLELADDMAIDIPHIWLYLAELVTPMLKEGGISMRELTIEFSKPLLPVGRAGVLLSEILHLLCKQMSHKKVGALWREADLSWKDFLPEGEDVHNFLLEQKLDFIESDSPCSSEALSKKELSAEELYKRLEKLIIEDKANDEQIFDWVEANLDEIQMSSPTFLRALMTAVCKAAIIADSSTFRVDTAVIKQRVPILLKYLDSDTEKELQALYALQASIVKLDQPANLLRMFFDCLYDEEVISEDAFYKWESSKDPAEQNGKGVALKSVTAFFTWLREAEEESEDN

SEQ ID NO: 757471 - protein, 1642 aa, Homo sapiens
MNSQPQTRSPFAAGPRPPHHQFFQRPQIQPPRATIPNSSPSIRPGAQTPTAVYQANQHIMMVNHLPMPYPVPQGPQYCIPQYRHSGPPYVGPPQQYPVQPPGPGPFYPGPGPGDFPNAYGTPFYPSQPVYQSAPIIVPTQQQPPPAKREKKTIRIRDPNQGGKDITEEIMSGGGSRNPTPPIGRPTSTPTPPQQLPSQVPEHSPVVYGTVESAHLAASTPVTAASDQKQEEKPKPDPVLKSPSPVLRLVLSGEKKEQEGQTSETTAIVSIAELPLPPSPTTVSSVARSTIAAPTSSALSSQPIFTTAIDDRCELSSPREDTIPIPSLTSCTETSDPLPTNENDDDICKKPCSVAPNDIPLVSSTNLINEINGVSEKLSATESIVEIVKQEVLPLTLELEILENPPEEMKLECIPAPITPSTVPSFPPTPPTPPASPPHTPVIVPAAATTVSSPSAAITVQRVLEEDESIRTCLSEDAKEIQNKIEVEADGQTEEILDSQNLNSRRSPVPETSNELLKFLVWFLQWCVCVLVQPAKELLHCLKMQMRISKYTKCLQAQIAITVPKTWKKPKDRTRTTEEMLEAELELKAEEELSIDKVLESEQDKMSQGFHPERDPSDLKKVKAVEENGEEAEPVRNGAESVSEGEGIDANSGSTDSSGDGVTFPFKPESWKPTDTEGKKQYDREFLLDFQFMPACIQKPEGLPPISDVVLDKINQPKLPMRTLDPRILPRGPDFTPAFADFGRQTPGGRGVPLLNVGSRRSQPGQRREPRKIITVSVKEDVHLKKAENAWKPSQKRDSQADDPENIKTQELFRKVRSILNKLTPQMFNQLMKQVSGLTVDTEERLKGVIDLVFEKAIDEPSFSVAYANMCRCLVTLKVPMADKPGNTVNFRKLLLNRCQKEFEKDKADDDVFEKKQKELEAASAPEERTRLHDELEEAKDKARRRSIGNIKFIGELFKLKMLTEAIMHDCVVKLLKNHDEESLECLCRLLTTIGKDLDFEKAKPRMDQYFNQMEKIVKERKTSSRIRFMLQDVIDLRLCNWVSRRADQGPKTIEQIHKEAKIEEQEEQRKVQQLMTKEKRRPGVQRVDEGGWNTVQGAKNSRVLDPSKFLKITKPTIDEKIQLVPKAQLGSWGKGSSGGAKASETDALRSSASSLNRFSALQPPAPSGSTPSTPVEFDSRRTLTSRGSMGREKNDKPLPSATARPNTFMRGGSSKDLLDNQSQEEQRREMLETVKQLTGGVDVERNSTEAERNKTRESAKPEISAMSAHDKAALSEEELERKSKSIIDEFLHINDFKEAMQCVEELNAQGLLHVFVRVGVESTLERSQITRDHMGQLLYQLVQSEKLSKQDFFKGFSETLELADDMAIDIPHIWLYLAELVTPMLKEGGISMRELTIEFSKPLLPVGRAGVLLSEILHLLCKQMSHKKVGALWREADLSWKDFLPEGEDVHNFLLEQKLDFIESDSPCSSEALSKKELSAEELYKRLEKLIIEDKANDEQIFDWVEANLDEIQMSSPTFLRALMTAVCKAAIIADSSTFRVDTAVIKQRVPILLKYLDSDTEKELQALYALQASIVKLDQPANLLRMFFDCLYDEEVISEDAFYKWESSKDPAEQNGKGVALKSVTAFFTWLREAEEESEDN

SEQ ID NO: 757472 - protein, 1797 aa, Homo sapiens
AAAAAVPPPHPNIRALQTQAPQQIPRGPVQQPLEDRIFTPAVSAVYSTVTQVARQPGTPTPSPYSAHEINKGHPNLAATPPGHASSPGLSQTPYPSGQNAGPTTLVYPQTPQTMNSQPQTRSPFFGQPSRTVPIHCTDNWKRRKVLEQTPVYRSLAGRGWIKYCIFAAGPRPPHHQFFQRPQIQPPRATIPNSSPSIRPGAQTPTAVYQANQHIMMVNHLPMPYPVPQGPQYCIPQYRHSGPPYVGPPQQYPVQPPGPGPFYPGPGPGDFPNAYGTPFYPSQPVYQSAPIIVPTQQQPPPAKREKKTIRIRDPNQGGKDITEEIMSGGGSRNPTPPIGRPTSTPTPPQQLPSQVPEHSPVVYGTVESAHLAASTPVTAASDQKQEEKPKPDPVLKSPSPVLRLVLSGEKKEQEGQTSETTAIVSIAELPLPPSPTTVSSVARSTIAAPTSSALSSQPIFTTAIDDRCELSSPREDTIPIPSLTSCTETSDPLPTNENDDDICKKPCSVAPNDIPLVSSTNLINEINGVSEKLSATESIVEIVKQEVLPLTLELEILENPPEEMKLECIPAPITPSTVPSFPPTPPTPPASPPHTPVIVPAAATTVSSPSAAITVQRVLEEDESIRTCLSEDAKEIQNKIEVEADGQTEEILDSQNLNSRRSPVPETSNELLKFLVWFLQWCVCVLVQPAKELLHCLKMQMRISKYTKCLQAQIAITVPKTWKKPKDRTRTTEEMLEAELELKAEEELSIDKVLESEQDKMSQGFHPERDPSDLKKVKAVEENGEEAEPVRNGAESVSEGEGIDANSGSTDSSGDGVTFPFKPESWKPTDTEGKKQYDREFLLDFQFMPACIQKPEGLPPISDVVLDKINQPKLPMRTLDPRILPRGPDFTPAFADFGRQTPGGRGVPLLNVGSRRSQPGQRREPRKIITVSVKEDVHLKKAENAWKPSQKRDSQADDPENIKTQELFRKVRSILNKLTPQMFNQLMKQVSGLTVDTEERLKGVIDLVFEKAIDEPSFSVAYANMCRCLVTLKVPMADKPGNTVNFRKLLLNRCQKEFEKDKADDDVFEKKQKELEAASAPEERTRLHDELEEAKDKARRRSIGNIKFIGELFKLKMLTEAIMHDCVVKLLKNHDEESLECLCRLLTTIGKDLDFEKAKPRMDQYFNQMEKIVKERKTSSRIRFMLQDVIDLRLCNWVSRRADQGPKTIEQIHKEAKIEEQEEQRKVQQLMTKEKRRPGVQRVDEGGWNTVQGAKNSRVLDPSKFLKITKPTIDEKIQLVPKAQLGSWGKGSSGGAKASETDALRSSASSLNRFSALQPPAPSGSTPSTPVEFDSRRTLTSRGSMGREKNDKPLPSATARPNTFMRGGSSKDLLDNQSQEEQRREMLETVKQLTGGVDVERNSTEAERNKTRESAKPEISAMSAHDKAALSEEELERKSKSIIDEFLHINDFKEAMQCVEELNAQGLLHVFVRVGVESTLERSQITRDHMGQLLYQLVQSEKLSKQDFFKGFSETLELADDMAIDIPHIWLYLAELVTPMLKEGGISMRELTIEFSKPLLPVGRAGVLLSEILHLLCKQMSHKKVGALWREADLSWKDFLPEGEDVHNFLLEQKLDFIESDSPCSSEALSKKELSAEELYKRLEKLIIEDKANDEQIFDWVEANLDEIQMSSPTFLRALMTAVCKAAIIADSSTFRVDTAVIKQRVPILLKYLDSDTEKELQALYALQASIVKLDQPANLLRMFFDCLYDEEVISEDAFYKWESSKDPAEQNGKGVALKSVTAFFTWLREAEEESEDN

SEQ ID NO: 757473 - protein, 1261 aa, Homo sapiens
CSTPCTRSLPIISNSCSVAPNDIPLVSSTNLINEINGVSEKLSATESIVEIVKQEVLPLTLELEILENPPEEMKLECIPAPITPSTVPSFPPTPPTPPASPPHTPVIVPAAATTVSSPSAAITVQRVLEEDESIRTCLSEDAKEIQNKIEVEADGQTEEILDSQNLNSRRSPVPAQIAITVPKTWKKPKDRTRTTEEMLEAELELKAEEELSIDKVLESEQDKMSQGFHPERDPSDLKKVKAVEENGEEAEPVRNGAESVSEGEGIDANSGSTDSSGDGVTFPFKPESWKPTDTEGKKQYDREFLLDFQFMPACIQKPEGLPPISDVVLDKINQPKLPMRTLDPRILPRGPDFTPAFADFGRQTPGGRGVPLLNVGSRRSQPGQRREPRKIITVSVKEDVHLKKAENAWKPSQKRDSQADDPENIKTQELFRKVRSILNKLTPQMFNQLMKQVSGLTVDTEERLKGVIDLVFEKAIDEPSFSVAYANMCRCLVTLKVPMADKPGNTVNFRKLLLNRCQKEFEKDKADDDVFEKKQKELEAASAPEERTRLHDELEEAKDKARRRSIGNIKFIGELFKLKMLTEAIMHDCVVKLLKNHDEESLECLCRLLTTIGKDLDFEKAKPRMDQYFNQMEKIVKERKTSSRIRFMLQDVIDLRLCNWVSRRADQGPKTIEQIHKEAKIEEQEEQRKVQQLMTKEKRRPGVQRVDEGGWNTVQGAKNSRVLDPSKFLKITKPTIDEKIQLVPKAQLGSWGKGSSGGAKASETDALRSSASSLNRFSALQPPAPSGSTPSTPVEFDSRRTLTSRGSMGREKNDKPLPSATARPNTFMRGGSSKDLLDNQSQEEQRREMLETVKQLTGGVDVERNSTEAERNKTRESAKPEISAMSAHDKAALSEEELERKSKSIIDEFLHINDFKEAMQCVEELNAQGLLHVFVRVGVESTLERSQITRDHMGQLLYQLVQSEKLSKQDFFKGFSETLELADDMAIDIPHIWLYLAELVTPMLKEGGISMRELTIEFSKPLLPVGRAGVLLSEILHLLCKQMSHKKVGALWREADLSWKDFLPEGEDVHNFLLEQKLDFIESDSPCSSEALSKKELSAEELYKRLEKLIIEDKANDEQIFDWVEANLDEIQMSSPTFLRALMTAVCKAAIIADSSTFRVDTAVIKQRVPILLKYLDSDTEKELQALYALQASIVKLDQPANLLRMFFDCLYDEEVISEDAFYKWESSKDPAEQNGKGVALKSVTAFFTWLREAEEESEDN

SEQ ID NO: 757474 - protein, 1128 aa, Homo sapiens
MLKFLVWFLQWCVCVLVQPAKELLHCLKMQMRISKYTKCLQAQIAITVPKTWKKPKDRTRTTEEMLEAELELKAEEELSIDKVLESEQDKMSQGFHPERDPSDLKKVKAVEENGEEAEPVRNGAESVSEGEGIDANSGSTDSSGDGVTFPFKPESWKPTDTEGKKQYDREFLLDFQFMPACIQKPEGLPPISDVVLDKINQPKLPMRTLDPRILPRGPDFTPAFADFGRQTPGGRGVPLLNVGSRRSQPGQRREPRKIITVSVKEDVHLKKAENAWKPSQKRDSQADDPENIKTQELFRKVRSILNKLTPQMFNQLMKQVSGLTVDTEERLKGVIDLVFEKAIDEPSFSVAYANMCRCLVTLKVPMADKPGNTVNFRKLLLNRCQKEFEKDKADDDVFEKKQKELEAASAPEERTRLHDELEEAKDKARRRSIGNIKFIGELFKLKMLTEAIMHDCVVKLLKNHDEESLECLCRLLTTIGKDLDFEKAKPRMDQYFNQMEKIVKERKTSSRIRFMLQDVIDLRLCNWVSRRADQGPKTIEQIHKEAKIEEQEEQRKVQQLMTKEKRRPGVQRVDEGGWNTVQGAKNSRVLDPSKFLKITKPTIDEKIQLVPKAQLGSWGKGSSGGAKASETDALRSSASSLNRFSALQPPAPSGSTPSTPVEFDSRRTLTSRGSMGREKNDKPLPSATARPNTFMRGGSSKDLLDNQSQEEQRREMLETVKQLTGGVDVERNSTEAERNKTRESAKPEISAMSAHDKAALSEEELERKSKSIIDEFLHINDFKEAMQCVEELNAQGLLHVFVRVGVESTLERSQITRDHMGQLLYQLVQSEKLSKQDFFKGFSETLELADDMAIDIPHIWLYLAELVTPMLKEGGISMRELTIEFSKPLLPVGRAGVLLSEILHLLCKQMSHKKVGALWREADLSWKDFLPEGEDVHNFLLEQKLDFIESDSPCSSEALSKKELSAEELYKRLEKLIIEDKANDEQIFDWVEANLDEIQMSSPTFLRALMTAVCKAAIIADSSTFRVDTAVIKQRVPILLKYLDSDTEKELQALYALQASIVKLDQPANLLRMFFDCLYDEEVISEDAFYKWESSKDPAEQNGKGVALKSVTAFFTWLREAEEESEDN

SEQ ID NO: 757475 - protein, 1642 aa, Homo sapiens; identical to SEQ ID NO: 757471

SEQ ID NO: 757476 - protein, 1593 aa, Homo sapiens
MNSQPQTRSPFAAGPRPPHHQFFQRPQIQPPRATIPNSSPSIRPGAQTPTAVYQANQHIMMVNHLPMPYPVPQGPQYCIPQYRHSGPPYVGPPQQYPVQPPGPGPFYPGPGPGDFPNAYGTPFYPSQPVYQSAPIIVPTQQQPPPAKREKKTIRIRDPNQGGKDITEEIMSGGGSRNPTPPIGRPTSTPTPPQQLPSQVPEHSPVVYGTVESAHLAASTPVTAASDQKQEEKPKPDPVLKSPSPVLRLVLSGEKKEQEGQTSETTAIVSIAELPLPPSPTTVSSVARSTIAAPTSSALSSQPIFTTAIDDRCELSSPREDTIPIPSLTSCTETSDPLPTNENDDDICKKPCSVAPNDIPLVSSTNLINEINGVSEKLSATESIVEIVKQEVLPLTLELEILENPPEEMKLECIPAPITPSTVPSFPPTPPTPPASPPHTPVIVPAAATTVSSPSAAITVQRVLEEDESIRTCLSEDAKEIQNKIEVEADGQTEEILDSQNLNSRRSPVPETSNELLKFLVWFLQWCVCVLVQPAKELLHCLKMQMRISKYTKCLQAQIAITVPKTWKKPKDRTRTTEEMLEAELELKAEEELSIDKVLESEQDKMSQGFHPERDPSDLKKVKAVEENGEEAEPVRNGAESVSEGEGIDANSGSTDSSGDGVTFPFKPESWKPTDTEGKKQYDREFLLDFQFMPACIQKPEGLPPISDVVLDKINQPKLPMRTLDPRILPRGPDFTPAFADFGRQTPGGRGVPLLNVGSRRSQPGQRREPRKIITVSVKEDVHLKKAENAWKPSQKRDSQADDPENIKTQELFRKVRSILNKLTPQMFNQLMKQVSGLTVDTEERLKGVIDLVFEKAIDEPSFSVAYANMCRCLVTLKVPMADKPGNTVNFRKLLLNRCQKEFEKDKADDDVFEKKQKELEAASAPEERTRLHDELEEAKDKARRRSIGNIKFIGELFKLKMLTEAIMHDCVVKLLKNHDEESLECLCRLLTTIGKDLDFEKAKPRMDQYFNQMEKIVKERKTSSRIRFMLQDVIDLRLCNWVSRRADQGPKTIEQIHKEAKIEEQEEQRKVQQLMTKEKRRPGVQRVDEGGWNTVQGAKNSRVLDPSKFLKITKPTIDEKIQLVPKAQLGSWGKGSSGGAKASETDALRSSASSLNRFSALQPPAPSGSTPSTPVEFDSRRTLTSRGSMGREKNDKPLPSATARPNTFMRGGSSKDLLDNQSQEEQRREMLETVKQLTGGVDVERNSTEAERNKTRESAKPEISAMSAHDKAALSEEELERKSKSIIDEFLHINDFKEAMQCVEELNAQGLLHVFVRVGVESTLERSQITRDHMGQLLYQLVQSEKLSKQDFFKGFSETLELADDMAIDIPHIWLYLAELVTPMLKEGGISMRELTIEFSKPLLPVGRAGVLLSEILHLLCKQMSHKKVGALWREADLSWKDFLPEGEDVHNFLLEQKLDFIESDSPCSSEALSKKELSAEELYKRLEKLIIEDKANDEQIFDWVEANLDEIQMSSPTFLRALMTAVCKAAIIDLLRMFFDCLYDEEVISEDAFYKWESSKDPAEQNGKGVALKSVTAFFTWLREAEEESEDN

SEQ ID NO: 757477 - protein, 302 aa, Homo sapiens
REEGEVGWAAGPQACFSETLELADDMAIDIPHIWLYLAELVTPMLKEGGISMRELTIEFSKPLLPVGRAGVLLSEILHLLCKQMSHKKVGALWREADLSWKDFLPEGEDVHNFLLEQKLDFIESDSPCSSEALSKKELSAEELYKRLEKLIIEDKANDEQIFDWVEANLDEIQMSSPTFLRALMTAVCKAAIIADSSTFRVDTAVIKQRVPILLKYLDSDTEKELQALYALQASIVKLDQPANLLRMFFDCLYDEEVISEDAFYKWESSKDPAEQNGKGVALKSVTAFFTWLREAEEESEDN

SEQ ID NO: 757478 - protein, 219 aa, Homo sapiens
LVLDRERTLASRADLSWKDFLPEGEDVHNFLLEQKLDFIESDSPCSSEALSKKELSAEELYKRLEKLIIEDKANDEQIFDWVEANLDEIQMSSPTFLRALMTAVCKAAIIADSSTFRVDTAVIKQRVPILLKYLDSDTEKELQALYALQASIVKLDQPANLLRMFFDCLYDEEVISEDAFYKWESSKDPAEQNGKGVALKSVTAFFTWLREAEEESEDN

SEQ ID NO: 757479 - protein, 986 aa, Homo sapiens
MNSQPQTRSPFAAGPRPPHHQFFQRPQIQPPRATIPNSSPSIRPGAQTPTAVYQANQHIMMVNHLPMPYPVPQGPQYCIPQYRHSGPPYVGPPQQYPVQPPGPGPFYPGPGPGDFPNAYGTPFYPSQPVYQSAPIIVPTQQQPPPAKREKKTIRIRDPNQGGKDITEEIMSGGGSRNPTPPIGRPTSTPTPPQQLPSQVPEHSPVVYGTVESAHLAASTPVTAASDQKQEEKPKPDPVLKSPSPVLRLVLSGEKKEQEGQTSETTAIVSIAELPLPPSPTTVSSVARSTIAAPTSSALSSQPIFTTAIDDRCELSSPREDTIPIPSLTSCTETSDPLPTNENDDDICKKPCSVAPNDIPLVSSTNLINEINGVSEKLSATESIVEIVKQEVLPLTLELEILENPPEEMKLECIPAPITPSTVPSFPPTPPTPPASPPHTPVIVPAAATTVSSPSAAITVQRVLEEDESIRTCLSEDAKEIQNKIEVEADGQTEEILDSQNLNSRRSPVPETSNELLKFLVWFLQWCVCVLVQPAKELLHCLKMQMRISKYTKCLQAQIAITVPKTWKKPKDRTRTTEEMLEAELELKAEEELSIDKVLESEQDKMSQGFHPERDPSDLKKVKAVEENGEEAEPVRNGAESVSEGEGIDANSGSTDSSGDGVTFPFKPESWKPTDTEGKKQYDREFLLDFQFMPACIQKPEGLPPISDVVLDKINQPKLPMRTLDPRILPRGPDFTPAFADFGRQTPGGRGVPLLNVGSRRSQPGQRREPRKIITVSVKEDVHLKKAENAWKPSQKRDSQADDPENIKTQELFRKVRSILNKLTPQMFNQLMKQVSGLTVDTEERLKGVIDLVFEKAIDEPSFSVAYANMCRCLVTLKVPMADKPGNTVNFRKLLLNRCQKEFEKDKADDDVFEKKQKELEAASAPEERTRLHDELEEAKDKARRRSIGNIKFIGELFKLKMLTEAIMHVLYLFQTPSGNGSVYLPG

SEQ ID NO: 757480 - protein, 775 aa, Homo sapiens
MNSQPQTRSPFAAGPRPPHHQFFQRPQIQPPRATIPNSSPSIRPGAQTPTAVYQANQHIMMVNHLPMPYPVPQGPQYCIPQYRHSGPPYVGPPQQYPVQPPGPGPFYPGPGPGDFPNAYGTPFYPSQPVYQSAPIIVPTQQQPPPAKREKKTIRIRDPNQGGKDITEEIMSGGGSRNPTPPIGRPTSTPTPPQQLPSQVPEHSPVVYGTVESAHLAASTPVTAASDQKQEEKPKPDPVLKSPSPVLRLVLSGEKKEQEGQTSETTAIVSIAELPLPPSPTTVSSVARSTIAAPTSSALSSQPIFTTAIDDRCELSSPREDTIPIPSLTSCTETSDPLPTNENDDDICKKPCSVAPNDIPLVSSTNLINEINGVSEKLSATESIVEIVKQEVLPLTLELEILENPPEEMKLECIPAPITPSTVPSFPPTPPTPPASPPHTPVIVPAAATTVSSPSAAITVQRVLEEDESIRTCLSEDAKEIQNKIEVEADGQTEEILDSQNLNSRRSPVPETSNELLKFLVWFLQWCVCVLVQPAKELLHCLKMQMRISKYTKCLQAQIAITVPKTWKKPKDRTRTTEEMLEAELELKAEEELSIDKVLESEQDKMSQGFHPERDPSDLKKVKAVEENGEEAEPVRNGAESVSEGEGIDANSGSTDSSGDGVTFPFKPESWKPTDTEGKKQYDREFLLDFQFMPACIQKPEGLPPISDVVLDKINQPKLPMRTLDPRILPRGPDFTPAFADFGRQTPGGRGVPICKVQSRHGLPILEQSKAPTCPP

SEQ ID NO: 757481 - protein, 464 aa, Homo sapiens
MTAHYKGECSNFITIPQSIDEETEVWSDHIIFPRIPRGPVQQPLEDRIFTPAVSAVYSTVTQVARQPGTPTPSPYSAHEINKGHPNLAATPPGHASSPGLSQTPYPSGQNAGPTTLVYPQTPQTMNSQPQTRSPFAAGPRPPHHQFFQRPQIQPPRATIPNSSPSIRPGAQTPTAVYQANQHIMMVNHLPMPYPVPQGPQYCIPQYRHSGPPYVGPPQQYPVQPPGPGPFYPGPGPGDFPNAYGTPFYPSQPVYQSAPIIVPTQQQPPPAKREKKTIRIRDPNQGGKDITEEIMSGGGSRNPTPPIGRPTSTPTPPQQLPSQVPEHSPVVYGTVESAHLAASTPVTAASDQKQEEKPKPDPVLKSPSPVLRLVLSGEKKEQEGQTSETTAIVSIAELPLPPSPTTVSSVARSTIAAPTSSALSSQPGLVANRGLVANRGLVANRGLVANRGLVANRGLVANRGL

SEQ ID NO: 757482 - protein, 258 aa, Homo sapiens
AAAAAVPPPHPNIRALQTQAPQQIPRGPVQQPLEDRIFTPAVSAVYSTVTQVARQPGTPTPSPYSAHEINKGHPNLAATPPGHASSPGLSQTPYPSGQNAGPTTLVYPQTPQTMNSQPQTRSPFFQRPQIQPPRATIPNSSPSIRPGAQTPTAVYQANQHIMMVNHLPMPYPVPQGPQYCIPQYRHSGPPYVGPPQQYPVQPPGPGPFYPGPGPGDFPNAYGTPFYPSQPVYQSAPIIVPTQQQPPCDAAANLVVVGG

SEQ ID NO: 757483 - protein, 106 aa, Homo sapiens
AAAAAVPPPHPNIRALQTQAPQQIPRGPVQQPLEDRIFTPAVSAVYSTVTQVARQPGTPTPSPYSAHEINKGHPNLAATPPGHASSPGLSQTPYPSGDSSLLIEPT

SEQ ID NO: 757484 - protein, 1744 aa, Homo sapiens
AAAAAVPPPHPNIRALQTQAPQQIPRGPVQQPLEDRIFTPAVSAVYSTVTQVARQPGTPTPSPYSAHEINKGHPNLAATPPGHASSPGLSQTPYPSGQNAGPTTLVYPQTPQTMNSQPQTRSPFFQRPQIQPPRATIPNSSPSIRPGAQTPTAVYQANQHIMMVNHLPMPYPVPQGPQYCIPQYRHSGPPYVGPPQQYPVQPPGPGPFYPGPGPGDFPNAYGTPFYPSQPVYQSAPIIVPTQQQPPPAKREKKTIRIRDPNQGGKDITEEIMSGGGSRNPTPPIGRPTSTPTPPQQLPSQVPEHSPVVYGTVESAHLAASTPVTAASDQKQEEKPKPDPVLKSPSPVLRLVLSGEKKEQEGQTSETTAIVSIAELPLPPSPTTVSSVARSTIAAPTSSALSSQPIFTTAIDDRCELSSPREDTIPIPSLTSCTETSDPLPTNENDDDICKKPCSVAPNDIPLVSSTNLINEINGVSEKLSATESIVEIVKQEVLPLTLELEILENPPEEMKLECIPAPITPSTVPSFPPTPPTPPASPPHTPVIVPAAATTVSSPSAAITVQRVLEEDESIRTCLSEDAKEIQNKIEVEADGQTEEILDSQNLNSRRSPVPETSNELLKFLVWFLQWCVCVLVQPAKELLHCLKMQMRISKYTKCLQAQIAITVPKTWKKPKDRTRTTEEMLEAELELKAEEELSIDKVLESEQDKMSQGFHPERDPSDLKKVKAVEENGEEAEPVRNGAESVSEGEGIDANSGSTDSSGDGVTFPFKPESWKPTDTEGKKQYDREFLLDFQFMPACIQKPEGLPPISDVVLDKINQPKLPMRTLDPRILPRGPDFTPAFADFGRQTPGGRGVPLLNVGSRRSQPGQRREPRKIITVSVKEDVHLKKAENAWKPSQKRDSQADDPENIKTQELFRKVRSILNKLTPQMFNQLMKQVSGLTVDTEERLKGVIDLVFEKAIDEPSFSVAYANMCRCLVTLKVPMADKPGNTVNFRKLLLNRCQKEFEKDKADDDVFEKKQKELEAASAPEERTRLHDELEEAKDKARRRSIGNIKFIGELFKLKMLTEAIMHDCVVKLLKNHDEESLECLCRLLTTIGKDLDFEKAKPRMDQYFNQMEKIVKERKTSSRIRFMLQDVIDLRLCNWVSRRADQGPKTIEQIHKEAKIEEQEEQRKVQQLMTKEKRRPGVQRVDEGGWNTVQGAKNSRVLDPSKFLKITKPTIDEKIQLVPKAQLGSWGKGSSGGAKASETDALRSSASSLNRFSALQPPAPSGSTPSTPVEFDSRRTLTSRGSMGREKNDKPLPSATARPNTFMRGGSSKDLLDNQSQEEQRREMLETVKQLTGGVDVERNSTEAERNKTRESAKPEISAMSAHDKAALSEEELERKSKSIIDEFLHINDFKEAMQCVEELNAQGLLHVFVRVGVESTLERSQITRDHMGQLLYQLVQSEKLSKQDFFKGFSETLELADDMAIDIPHIWLYLAELVTPMLKEGGISMRELTIEFSKPLLPVGRAGVLLSEILHLLCKQMSHKKVGALWREADLSWKDFLPEGEDVHNFLLEQKLDFIESDSPCSSEALSKKELSAEELYKRLEKLIIEDKANDEQIFDWVEANLDEIQMSSPTFLRALMTAVCKAAIIADSSTFRVDTAVIKQRVPILLKYLDSDTEKELQALYALQASIVKLDQPANLLRMFFDCLYDEEVISEDAFYKWESSKDPAEQNGKGVALKSVTAFFTWLREAEEESEDN

SEQ ID NO: 757485 - protein, 1642 aa, Homo sapiens; identical to SEQ ID NO: 757471

SEQ ID NO: 757486 - protein, 988 aa, Homo sapiens [sequence omitted]

SEQ ID NO: 757487 - protein, 1642 aa, Homo sapiens; identical to SEQ ID NO: 757471

SEQ ID NO: 757488 - protein, 350 aa, Homo sapiens
MSEVEEAMQCVEELNAQGLLHVFVRVGVESTLERSQITRDHMGQLLYQLVQSEKLSKQDFFKGFSETLELADDMAIDIPHIWLYLAELVTPMLKEGGISMRELTIEFSKPLLPVGRAGVLLSEILHLLCKQMSHKKVGALWREADLSWKDFLPEGEDVHNFLLEQKLDFIESDSPCSSEALSKKELSAEELYKRLEKLIIEDKANDEQIFDWVEANLDEIQMSSPTFLRALMTAVCKAAIIADSSTFRVDTAVIKQRVPILLKYLDSDTEKELQALYALQASIVKLDQPANLLRMFFDCLYDEEVISEDAFYKWESSKDPAEQNGKGVALKSVTAFFTWLREAEEESEDN

SEQ ID NO: 757489 - protein, 1535 aa, Homo sapiens
MNSQPQTRSPFAAGPRPPHHQFFQRPQIQPPRATIPNSSPSIRPGAQTPTAVYQANQHIMMVNHLPMPYPVPQGPQYCIPQYRHSGPPYVGPPQQYPVQPPGPGPFYPGPGPGDFPNAYGTPFYPSQPVYQSAPIIVPTQQQPPPAKREKKTIRIRDPNQGGKDITEEIMSGGGSRNPTPPIGRPTSTPTPPQQLPSQVPEHSPVVYGTVESAHLAASTPVTAASDQKQEEKPKPDPVLKSPSPVLRLVLSGEKKEQEGQTSETTAIVSIAELPLPPSPTTVSSVARSTIAAPTSSALSSQPIFTTAIDDRCELSSPREDTIPIPSLTSCTETSDPLPTNENDDDICKKPCSVAPNDIPLVSSTNLINEINGVSEKLSATESIVEIVKQEVLPLTLELEILENPPEEMKLECIPAPITPSTVPSFPPTPPTPPASPPHTPVIVPAAATTVSSPSAAITVQRVLEEDESIRTCLSEDAKEIQNKIEVEADGQTEEILDSQNLNSRRSPVPETSNELLKFLVWFLQWCVCVLVQPAKELLHCLKMQMRISKYTKCLQAQIAITVPKTWKKPKDRTRTTEEMLEAELELKAEEELSIDKVLESEQDKMSQGFHPERDPSDLKKVKAVEENGEEAEPVRNGAESVSEGEGIDANSGSTDSSGDGVTFPFKPESWKPTDTEGKKQYDREFLLDFQFMPACIQKPEGLPPISDVVLDKINQPKLPMRTLDPRILPRGPDFTPAFADFGRQTPGGRGVPLLNVGSRRSQPGQRREPRKIITVSVKEDVHLKKAENAWKPSQKRDSQADDPENIKTQELFRKVRSILNKLTPQMFNQLMKQVSGLTVDTEERLKGVIDLVFEKAIDEPSFSVAYANMCRCLVTLKVPMADKPGNTVNFRKLLLNRCQKEFEKDKADDDVFEKKQKELEAASAPEERTRLHDELEEAKDKARRRSIGNIKFIGELFKLKMLTEAIMHDCVVKLLKNHDEESLECLCRLLTTIGKDLDFEKAKPRMDQYFNQMEKIVKERKTSSRIRFMLQDVIDLRLCNWVSRRADQGPKTIEQIHKEAKIEEQEEQRKVQQLMTKEKRRPGVQRVDEGGWNTVQGAKNSRVLDPSKFLKITKPTIDEKIQLVPKAQLGSWGKGSSGGAKASETDALRSSASSLNRFSALQPPAPSGSTPSTPVEFDSRRTLTSRGSMGREKNDKPLPSATARPNTFMRGGSSKDLLDNQSQEEQRREMLETVKQLTGGVDVERNSTEAERNKTRESAKPEISAMSAHDKAALSEEELERKSKSIIDEFLHINDFKEAMQCVEELNAQGLLHVFVRVGVESTLERSQITRDHMGQLLYQLVQSEKLSKQDFFKGFSETLELADDMAIDIPHIWLYLAELVTPMLKEGGISMRELTIEFSKPLLPVGRAGVLLSEILHLLCKQMSHKKVGALWREADLSWKDFLPEGEDVHNFLLEQKLDFIESDSPCSSEALSKKELSAEELYKRLEKLIIEDKANDEQIFDWVEANLDEIQMSSPTFLRALMTAVCKAAIIGK

SEQ ID NO: 757490 - protein, 761 aa, Homo sapiens
MNSQPQTRSPFAAGPRPPHHQFFQRPQIQPPRATIPNSSPSIRPGAQTPTAVYQANQHIMMVNHLPMPYPVPQGPQYCIPQYRHSGPPYVGPPQQYPVQPPGPGPFYPGPGPGDFPNAYGTPFYPSQPVYQSAPIIVPTQQQPPPAKREKKTIRIRDPNQGGKDITEEIMSGGGSRNPTPPIGRPTSTPTPPQQLPSQVPEHSPVVYGTVESAHLAASTPVTAASDQKQEEKPKPDPVLKSPSPVLRLVLSGEKKEQEGQTSETTAIVSIAELPLPPSPTTVSSVARSTIAAPTSSALSSQPIFTTAIDDRCELSSPREDTIPIPSLTSCTETSDPLPTNENDDDICKKPCSVAPNDIPLVSSTNLINEINGVSEKLSATESIVEIVKQEVLPLTLELEILENPPEEMKLECIPAPITPSTVPSFPPTPPTPPASPPHTPVIVPAAATTVSSPSAAITVQRVLEEDESIRTCLSEDAKEIQNKIEVEADGQTEEILDSQNLNSRRSPVPETSNELLKFLVWFLQWCVCVLVQPAKELLHCLKMQMRISKYTKCLQAQIAITVPKTWKKPKDRTRTTEEMLEAELELKAEEELSIDKVLESEQDKMSQGFHPERDPSDLKKVKAVEENGEEAEPVRNGAESVSEGEGIDANSGSTDSSGDGVTFPFKPESWKPTDTEGKKQYDREFLLDFQFMPACIQKPEGLPPISDVVLDKINQPKLPMRTLDPRILPRGPDFTPAFADFGRQTPGGRGVPVSASSLQLT

SEQ ID NO: 757491 - protein, 515 aa, Homo sapiens
MNSQPQTRSPFAAGPRPPHHQFFQRPQIQPPRATIPNSSPSIRPGAQTPTAVYQANQHIMMVNHLPMPYPVPQGPQYCIPQYRHSGPPYVGPPQQYPVQPPGPGPFYPGPGPGDFPNAYGTPFYPSQPVYQSAPIIVPTQQQPPPAKREKKTIRIRDPNQGGKDITEEIMSGGGSRNPTPPIGRPTSTPTPPQQLPSQVPEHSPVVYGTVESAHLAASTPVTAASDQKQEEKPKPDPVLKSPSPVLRLVLSGEKKEQEGQTSETTAIVSIAELPLPPSPTTVSSVARSTIAAPTSSALSSQPIFTTAIDDRCELSSPREDTIPIPSLTSCTETSDPLPTNENDDDICKKPCSVAPNDIPLVSSTNLINEINGVSEKLSATESIVEIVKQEVLPLTLELEILENPPEEMKLECIPAPITPSTVPSFPPTPPTPPASPPHTPVIVPAAATTVSSPSAAITVQRVLEEDESIRTCLSEDAKEIQNKIEVEADGQTEEILDSQNLNSRRSPVPETSNEC

SEQ ID NO: 757492 - protein, 134 aa, Homo sapiens
AAAAAVPPPHPNIRALQTQAPQQIPRGPVQQPLEDRIFTPAVSAVYSTVTQVARQPGTPTPSPYSAHEINKGHPNLAATPPGHASSPGLSQNAGPTTLVYPQTPQTMNSQPQTRSPVSKQKLEPNYILYLCLCV

SEQ ID NO: 757493 - protein, 125 aa, Homo sapiens
LCFPGKLSLDRTSFWFSHYAACKAEINQWPHVCGQDLLQGILSVNIDESLLGGIGFLSTHLAPSSVGTTQLSVLSHIIYLIAISKRKGRVNPAHQMLQACDRIPSILVVFAAFSSSPLVTDQCFP

SEQ ID NO: 757494 - protein, 108 aa, Homo sapiens
KADQASAPPRAGKVCKPPYPGDLGLLESPIQPPPSTLVWPGSYSLPGFGWTWLVWDDPLSPNRCGMWGAWWWVTLPTAIFTDSKGGSTRLCPGRPATGQTGSLWTCRQ

SEQ ID NO: 757495 - protein, 391 aa, Homo sapiens
HSPGREAELGGRDLRAAVSPAERQELRTATLRPYLSAVRATLQAALCLENFSSQVVERHNKPEVEVRSSKELLLQPVTISRNEKEKVLIEGSINSVRVSIAVKQADEIEKILCHKFMRFMMMRAENFFILRRKPVEQKKIFTIQGCYPVIRCLLRRRGWVEKKMAIAPGPTLLPPQKDLDSSAMGDSDTTEDEDEDEDEEFQPVTSCSDFDDLTRTLMTYAGTHASDMVGLCSQSPDFGPWICIRLIANSLPPQTAMALAGLSDDNSSLHLGRHSGPGNRTHNTRVEGPRIRREHAREACEERTYTTGTKGKRQRPAETENRPRRLSTHPTSRKSAQRANQSARTHAQKHPAHKGPNQRAPSATKTEEQTQNATLSEKHSHREPGTHTPSQ

SEQ ID NO: 757496 - protein, 194 aa, Homo sapiens
HSPGREAELGGRDLRAAVSPAERQELRTATLRPYLSAVRATLQAALCLENFSSQVVERHNKPEVEVRSSKELLLQPVTISRNEKEKVLIEGSINSVRVSIAVKQADEIEKILCHKFMRFMMMRAENFFILRRKPVEGYDISFLITNFHTEQMYKHKLVDFVIHFMEEIDKEISEMKLSVNARARIVAEEFLKNF

SEQ ID NO: 757497 - protein, 106 aa, Homo sapiens
HSPGREAELGGRDLRAAVSPAERQELRTATLRPYLSAVRATLQAALCLENFSSQVVERHNKPEVEVRSSKELLLQPVTISRNEKEKVLIEGSINSVRVSIAVKQGV

SEQ ID NO: 757498 - protein, 106 aa, Homo sapiens; identical to SEQ ID NO: 757497

SEQ ID NO: 757499 - protein, 181 aa, Homo sapiens
LPYFRFPAQPAPAMTATLRPYLSAVRATLQAALCLENFSSQVVERHNKPEVEVRSSKELLLQPVTISRNEKEKVLIEGSINSVRVSIAVKQADEIEKILCHKFMRFMMMRAENFFILRRKPVEGYDISFLITNFHTEQMYKHKLVDFVIHFMEEIDKEISEMKLSVNARARIVAEEFLKNF

SEQ ID NO: 757500 - protein, 121 aa, Homo sapiens [sequence omitted]

SEQ ID NO: 757501 - protein, 129 aa, Homo sapiens [sequence omitted]

SEQ ID NO: 757502 - protein, 248 aa, Homo sapiens
MGPVRLGILLFLFLAVHEAWAGMLKEEDDDTERLPSKCEVCKLLSTELQAELSRTGRSREVLELGQVLDTGKRKRHVPYSVSETRLEEALENLCERILDYSVHAERKGSLRYAKGQSQTMATLKGLVQKGVKVDLGIPLELWDEPSVEVTYLKKQCETMLEEFEDIVGDWYFHHQEQPLQNFLCEGHVLPAAETACLQETWTGKEITDGEEKTEGEEEQEEEEEEEEEEGGDKMTKTGSHPKLDREDL

SEQ ID NO: 757503 - protein, 248 aa, Homo sapiens; identical to SEQ ID NO: 757502

SEQ ID NO: 757504 - protein, 248 aa, Homo sapiens; identical to SEQ ID NO: 757502

SEQ ID NO: 757505 - protein, 228 aa, Homo sapiens [sequence omitted]

SEQ ID NO: 757506 - protein, 157 aa, Homo sapiens
MGPVRLGILLFLFLAVHEAWAGMLKEEDDDTERLPSKCEVCKLLSTELQAELSRTGRSREVLELGQVLDTGKRKRHVPYSVSETRLEEALENLCERILDYSVHAERKGSLRYAKGQSQTMATLKGLVQKGVKVDLGIPLELWDEPSVEVTYLKKQVG

SEQ ID NO: 757507 - protein, 455 aa, Homo sapiens
MVRELLREPAGLSLVLKKIPIPETPPQTPPQVLDSPHQRSPSLSLAPLSPRAPSEDVFAFDLSSNPSPGPSPAWTDSASLGPEPLPIPPEPPAILPAGVAGTPGLPESPDKSPVGRKKSKGLATRLSRRRVSCRELGRPDCDGWLLLRKAPGGFMGPRWRRRWFVLKGHTLYWYRQPQDEKAEGLINVSNYSLESGHDQKKKYVFQLTHDVYKPFIFAADTLTDLSMWVRHLITCISKYQSPGRAPPPREEDCYSETEAEDPDDEAGSHSASPSPAQAGSPLHGDTSPAATPTQRSPRTSFGSLTDSSEEALEGMVRGLRQGGVSLLGQPQPLTQEQWRSSFMRRNRDPQLNERVHRVRALQSTLKAKLQELQVLEEVLGDPELTGEKFRQWKEQNRELYSEGLGAWGVAQAEGSSHILTSDSTEQSPHSLPSDPEEHSHLCPLTSESSLRPPDL

SEQ ID NO: 757508 - protein, 141 aa, Homo sapiens [sequence omitted]

SEQ ID NO: 757509 - protein, 708 aa, Homo sapiens
NSGDSRGKTGADSSWQSWAMEPVETWTPGKVATWLRGLDDSLQDYPFEDWQLPGKNLLQLCPQSLEALAVRSLGHQELILGGVEQLQALSSRLQTENLQSLTEGLLGATHDFQSIVQGCLGDCAKTPIDVLCAAVELLHEADALLFWLSRYLFSHLNDFSACQEIRDLLEELSQVLHEDGPAAEKEGTVLRICSHVAGICHNILVCCPKELLEQKAVLEQVQLDSPLGLEIHTTSNCQHFVSQVDTQVPTDSRLQIQPGDEVVQINEQVVVGWPRKNMVRELLREPAGLSLVLKKIPIPETPPQTPPQVLDSPHQRSPSLSLAPLSPRAPSEDVFAFDLSSNPSPGPSPAWTDSASLGPEPLPIPPEPPAILPAGVAGTPGLPESPDKSPVGRKKSKGLATRLSRRRVSCRELGRPDCDGWLLLRKAPGGFMGPRWRRRWFVLKGHTLYWYRQPQDEKAEGLINVSNYSLESGHDQKKKYVFQLTHDVYKPFIFAADTLTDLSMWVRHLITCISKYQSPGRAPPPREEDCYSETEAEDPDDEAGSHSASPSPAQAGSPLHGDTSPAATPTQRSPRTSFGSLTDSSEEALEGMVRGLRQGGVSLLGQPQPLTQEQWRSSFMRRNRDPQLNERVHRVRALQSTLKAKLQELQVLEEVLGDPELTGEKFRQWKEQNRELYSEGLGAWGVAQAEGSSHILTSDLKSTPISAP

SEQ ID NO: 757510 - protein, 732 aa, Homo sapiens
NSGDSRGKTGADSSWQSWAMEPVETWTPGKVATWLRGLDDSLQDYPFEDWQLPGKNLLQLCPQSLEALAVRSLGHQELILGGVEQLQALSSRLQTENLQSLTEGLLGATHDFQSIVQGCLGDCAKTPIDVLCAAVELLHEADALLFWLSRYLFSHLNDFSACQEIRDLLEELSQVLHEDGPAAEKEGTVLRICSHVAGICHNILVCCPKELLEQKAVLEQVQLDSPLGLEIHTTSNCQHFVSQVDTQVPTDSRLQIQPGDEVVQINEQVVVGWPRKNMVRELLREPAGLSLVLKKIPIPETPPQTPPQVLDSPHQRSPSLSLAPLSPRAPSEDVFAFDLSSNPSPGPSPAWTDSASLGPEPLPIPPEPPAILPAGVAGTPGLPESPDKSPVGRKKSKGLATRLSRRRVSCRELGRPDCDGWLLLRKAPGGFMGPRWRRRWFVLKGHTLYWYRQPQDEKAEGLINVSNYSLESGHDQKKKYVFQLTHDVYKPFIFAADTLTDLSMWVRHLITCISKYQSPGRAPPPREEDCYSETEAEDPDDEAGSHSASPSPAQAGSPLHGDTSPAATPTQRSPRTSFGSLTDSSEEALEGMVRGLRQGGVSLLGQPQPLTQEQWRSSFMRRNRDPQLNERVHRVRALQSTLKAKLQELQVLEEVLGDPELTGEKFRQWKEQNRELYSEGLGAWGVAQAEGSSHILTSDSTEQSPHSLPSDPEEHSHLCPLTSESSLRPPDL

SEQ ID NO: 757511 - protein, 739 aa, Homo sapiens
NSGDSRGKTGADSSWQSWAMEPVETWTPGKVATWLRGLDDSLQDYPFEDWQLPGKNLLQLCPQSLEALAVRSLGHQELILGGVEQLQALSSRLQTENLQSLTEGLLGATHDFQSIVQGCLGDCAKTPIDVLCAAVELLHEADALLFWLSRYLFSHLNDFSACQEIRDLLEELSQVLHEDGPAAEKEGTVLRICSHVAGICHNILVCCPKELLEQKAVLEQVQLDSPLGLEIHTTSNCQHFVSQVDTQVPTDSRLQIQPGDEVVQINEQVVVREERDMVGWPRKNMVRELLREPAGLSLVLKKIPIPETPPQTPPQVLDSPHQRSPSLSLAPLSPRAPSEDVFAFDLSSNPSPGPSPAWTDSASLGPEPLPIPPEPPAILPAGVAGTPGLPESPDKSPVGRKKSKGLATRLSRRRVSCRELGRPDCDGWLLLRKAPGGFMGPRWRRRWFVLKGHTLYWYRQPQDEKAEGLINVSNYSLESGHDQKKKYVFQLTHDVYKPFIFAADTLTDLSMWVRHLITCISKYQSPGRAPPPREEDCYSETEAEDPDDEAGSHSASPSPAQAGSPLHGDTSPAATPTQRSPRTSFGSLTDSSEEALEGMVRGLRQGGVSLLGQPQPLTQEQWRSSFMRRNRDPQLNERVHRVRALQSTLKAKLQELQVLEEVLGDPELTGEKFRQWKEQNRELYSEGLGAWGVAQAEGSSHILTSDSTEQSPHSLPSDPEEHSHLCPLTSESSLRPPDL

SEQ ID NO: 757512 - protein, 259 aa, Homo sapiens
LGRYKVCVFQLTHDVYKPFIFAADTLTDLSMWVRHLITCISKYQSPGRAPPPREEDCYSETEAEDPDDEAGSHSASPSPAQAGSPLHGDTSPAATPTQRSPRTSFGSLTDSSEEALEGMVRGLRQGGVSLLGQPQPLTQEQWRSSFMRRNRDPQLNERVHRVRALQSTLKAKLQELQVLEEVLGDPELTGEKFRQWKEQNRELYSEGLGAWGVAQAEGSSHILTSDSTEQSPHSLPSDPEEHSHLCPLTSESSLRPPDL

SEQ ID NO: 757513 - protein, 119 aa, Homo sapiens
MRGPGPSRPLLAPSFSTPTPISVQGKGCGGLCWGNGGRQVGRRRPASGKSVEYEKYFKLKCLKFTKTEIGTCVLSSSTTLSFLHCRLPVFAFVLLPDSILYHRGGTTDNRRQGKTKEFI

SEQ ID NO: 757514 - protein, 300 aa, Homo sapiens
MGRAREVGWMAAGLMIGAGACYCVYKLTIGRDDSEKLEEEGEEEWDDDQELDEEEPDIWFDFETMARPWTEDGDWTEPGAPGGTEDRPSGGGKANRAHPIKQRPFPYEHKNTWSAQNCKNGSCVLDLSKCLFIQGKLLFAEPKDAGFPFSQDINSHLASLSMARNTSPTPDPTVREALCAPDNLNASIESQGQIKMYINEVCRETVSRCCNSFLQQAGLNLLISMTVINNMLAKSASDLKFPLISEGSGCAKVQVLKPLMGLSEKPVLAGELVGAQMLFSFMSLFIRNGNREILLETPAP

SEQ ID NO: 757515 - protein, 300 aa, Homo sapiens; identical to SEQ ID NO: 757514

SEQ ID NO: 757516 - protein, 294 aa, Homo sapiens
MAAGLMIGAGACYCVYKLTIGRDDSEKLEEEGEEEWDDDQELDEVFITVVKMHNAREARQGSYRNKHTGLNGGQCLKNPGEQARNTKTAHKTHITQRPFPYEHKNTWSAQNCKNGSCVLDLSKCLFIQGKLLFAEPKDAGFPFSQDINSHLASLSMARNTSPTPDPTVREALCAPDNLNASIESQGQIKMYINEVCRETVSRCCNSFLQQAGLNLLISMTVINNMLAKSASDLKFPLISEGSGCAKVQVLKPLMGLSEKPVLAGELVGAQMLFSFMSLFIRNGNREILLETPAP

SEQ ID NO: 757517 - protein, 300 aa, Homo sapiens; identical to SEQ ID NO: 757514

SEQ ID NO: 757518 - protein, 119 aa, Homo sapiens; identical to SEQ ID NO: 757513

SEQ ID NO: 757519 - protein, 300 aa, Homo sapiens; identical to SEQ ID NO: 757514

SEQ ID NO: 757520 - protein, 300 aa, Homo sapiens; identical to SEQ ID NO: 757514

SEQ ID NO: 757521 - protein, 170 aa, Homo sapiens
MTELQSALLLRRQLAELNKNPVEGFSAGLIDDNDLYRWEVLIIGPPDTLYEGGVFKAHLTFPKDYPLRPPKMKFITEIWHPNVDKNGDVCISILHEPGEDKYGYEKPEERWLPIHTVETIMISVISMLADPNGDSPANVDAAKEWREDRNGEFKRKVARCVRKSQETAFE

SEQ ID NO: 757522 - protein, 170 aa, Homo sapiens; identical to SEQ ID NO: 757521

SEQ ID NO: 757523 - protein, 170 aa, Homo sapiens; identical to SEQ ID NO: 757521

SEQ ID NO: 757524 - protein, 170 aa, Homo sapiens; identical to SEQ ID NO: 757521

SEQ ID NO: 757525 - protein, 170 aa, Homo sapiens; identical to SEQ ID NO: 757521

SEQ ID NO: 757526 - protein, 192 aa, Homo sapiens
GAASVRCQRRQTRMLWPLSQVKKASREERSAVSKKSWELNKNPVEGFSAGLIDDNDLYRWEVLIIGPPDTLYEGGVFKAHLTFPKDYPLRPPKMKFITEIWHPNVDKNGDVCISILHEPGEDKYGYEKPEERWLPIHTVETIMISVISMLADPNGDSPANVDAAKEWREDRNGEFKRKVARCVRKSQETAFE

SEQ ID NO: 757527 - protein, 170 aa, Homo sapiens; identical to SEQ ID NO: 757521

SEQ ID NO: 757528 - protein, 170 aa, Homo sapiens; identical to SEQ ID NO: 757521

SEQ ID NO: 757529 - protein, 170 aa, Homo sapiens; identical to SEQ ID NO: 757521

SEQ ID NO: 757530 - protein, 170 aa, Homo sapiens; identical to SEQ ID NO: 757521

SEQ ID NO: 757531 - protein, 170 aa, Homo sapiens; identical to SEQ ID NO: 757521

SEQ ID NO: 757532 - protein, 165 aa, Homo sapiens
ISLPPSLQLLKLNKNPVEGFSAGLIDDNDLYRWEVLIIGPPDTLYEGGVFKAHLTFPKDYPLRPPKMKFITEIWHPNVDKNGDVCISILHEPGEDKYGYEKPEERWLPIHTVETIMISVISMLADPNGDSPANVDAAKEWREDRNGEFKRKVARCVRKSQETAFE

SEQ ID NO: 757533 - protein, 107 aa, Homo sapiens
MTMISTDGKSLLLALQIHFIDKNGDVCISILHEPGEDKYGYEKPEERWLPIHTVETIMISVISMLADPNGDSPANVDAAKEWREDRNGEFKRKVARCVRKSQETAFE

SEQ ID NO: 757534 - protein, 106 aa, Homo sapiens
MPPCSCARSLCALQVLLLTVLGSSTNGQTKRNIGKRKCRDLFLAPVAASAIPVSGRKTGLVLLGLESAIITTNPSGGVTERGHFTFAGHSAGHFTKALQIIFTMAL

SEQ ID NO: 757535 - protein, 226 aa, Homo sapiens
MKVLILACLVALALARETIESLSSSEESITEYKQKVEKVKHEDQQQGEDEHQDKIYPSFQPQPLIYPFVEPIPYGFLPQNILPLAQPAVVLPVPQPEIMEVPKAKDTVYTKGRVMPVLKSPTIPFFDPQIPKLTDLENLHLPLPLLQPLMQQVPQPIPQTLALPPQPLWSVPQPKVLPIPQQVVPYPQRAVPVQALLLNQELLLNPTHQIYPVTQPLAPVHNPISV

SEQ ID NO: 757536 - protein, 716 aa, Homo sapiens
MQSTANYLWHTDDLLGQGATASVYKARNKKSGELVAVKVFNTTSYLRPREVQVREFEVLRKLNHQNIVKLFAVEETGGSRQKVLVMEYCSSGSLLSVLESPENAFGLPEDEFLVVLRCVVAGMNHLRENGIVHRDIKPGNIMRLVGEEGQSIYKLTDFGAARELDDDEKFVSVYGTEEYLHPDMYERAVLRKPQQKAFGVTVDLWSIGVTLYHAATGSLPFIPFGGPRRNKEIMYRITTEKPAGAIAGAQRRENGPLEWSYTLPITCQLSLGLQSQLVPILANILEVEQAKCWGFDQFFAETSDILQRVVVHVFSLSQAVLHHIYIHAHNTIAIFQEAVHKQTSVAPRHQEYLFEGHLCVLEPSVSAQHIAHTTASSPLTLFSTAIPKGLAFRDPALDVPKFVPKVDLQADYNTAKGVLGAGYQALRLARALLDGQELMFRGLHWVMEVLQATCRRTLEVARTSLLYLSSSLGTERFSSVAGTPEIQELKAAAELRSRLRTLAEVLSRCSQNITETQESLSSLNRELVKSRDQVHEDRSIQQIQCCLDKMNFIYKQFKKSRMRPGLGYNEEQIHKLDKVNFSHLAKRLLQVFQEECVQKYQASLVTHGKRMRVVHETRNHLRLVGCSVAACNTEAQGVQESLSKLLEELSHQLLQDRAKGAQASPPPIAPYPSPTRKDLLLHMQELCEGMKLLASDLLDNNRIIERLNRVPAPPDV

SEQ ID NO: 757537 - protein, 594 aa, Homo sapiens
MNHLRENGIVHRDIKPGNIMRLVGEEGQSIYKLTDFGAARELDDDEKFVSVYGTEEYLHPDMYERAVLRKPQQKAFGVTVDLWSIGVTLYHAATGSLPFIPFGGPRRNKEIMYRITTEKPAGAIAGAQRRENGPLEWSYTLPITCQLSLGLQSQLVPILANILEVEQAKCWGFDQFFAETSDILQRVVVHVFSLSQAVLHHIYIHAHNTIAIFQEAVHKQTSVAPRHQEYLFEGHLCVLEPSVSAQHIAHTTASSPLTLFSTAIPKGLAFRDPALDVPKFVPKVDLQADYNTAKGVLGAGYQALRLARALLDGQELMFRGLHWVMEVLQATCRRTLEVARTSLLYLSSSLGTERFSSVAGTPEIQELKAAAELRSRLRTLAEVLSRCSQNITETQESLSSLNRELVKSRDQVHEDRSIQQIQCCLDKMNFIYKQFKKSRMRPGLGYNEEQIHKLDKVNFSHLAKRLLQVFQEECVQKYQASLVTHGKRMRVVHETRNHLRLVGCSVAACNTEAQGVQESLSKLLEELSHQLLQDRAKGAQASPPPIAPYPSPTRKDLLLHMQELCEGMKLLASDLLDNNRIIERLNRVPAPPDV

SEQ ID NO: 757538 - protein, 280 aa, Homo sapiens
MQSTANYLWHTDDLLGQGATASVYKARNKKSGELVAVKVFNTTSYLRPREVQVREFEVLRKLNHQNIVKLFAVEETGGSRQKVLVMEYCSSGSLLSVLESPENAFGLPEDEFLVVLRCVVAGMNHLRENGIVHRDIKPGNIMRLVGEEGQSIYKLTDFGAARELDDDEKFVSVYGTEEYLHPDMYERAVLRKPQQKAFGVTVDLWSIGVTLYHAATGSSIYKLTDFGAARELDDDEKFVSVYGTEEYLHPDMYDRAVLRKPQQKAFGVTVDLWSTWSRLS

SEQ ID NO: 757539 - protein, 153 aa, Homo sapiens
MQSTANYLWHTDDLLGQGATASVYKARNKKSGELVAVKVFNTTSYLRPREVQVREFEVLRKLNHQNIVKLFAVEETGGSRQKVLVMEYCSSGSLLSVLESPENAFGLPEDEFLVVLRCVGEPLPVPASTLRPAAGLGQMLTGLRCLTPANHSI

SEQ ID NO: 757540 - protein, 93 aa, Homo sapiens
GGPGESQQGGHGRRILGALGMQAGALVTHVFPSSSTPPTQPHISWLLIADQSMASLQLLEELSHQLLQDRAKGAQASPPPIAPYPSPTRKDLL

SEQ ID NO: 757541 - protein, 716 aa, Homo sapiens; identical to SEQ ID NO: 757536

SEQ ID NO: 757542 - protein, 476 aa, Homo sapiens
MQSTANYLWHTDDLLGQGATASVYKARNKKSGELVAVKVFNTTSYLRPREVQVREFEVLRKLNHQNIVKLFAVEETGGSRQKVLVMEYCSSGSLLSVLESPENAFGLPEDEFLVVLRCVVAGMNHLRENGIVHRDIKPGNIMRLVGEEGQSIYKLTDFGAARELDDDEKFVSVYGTEEYLHPDMYERAVLRKPQQKAFGVTVDLWSIGVTLYHAATGSLPFIPFGGPRRNKEIMYRITTEKPAGAIAGAQRRENGPLEWSYTLPITCQLSLGLQSQLVPILANILEVEQAKCWGFDQFFAETSDILQRVVVHVFSLSQAVLHHIYIHAHNTIAIFQEAVHKQTSVAPRHQEYLFEGHLCVLEPSVSAQHIAHTTASSPLTLFSTAIPKGLAFRDPALDVPKFVPKVDLQADYNTAKGVLGAGYQALRLARALLDGQELMFRGLHWVMEVLQATCRRTLEVARTSLLYLSSSLGTER

SEQ ID NO: 757543 - protein, 74 aa, Homo sapiens
LLPTTAVSRIAIFQEAVHKQTSVAPRHQEYLFEGHLCVLEPSVSAQHIAHTTASSPLTLFSTAIPKGLAFRDRE

SEQ ID NO: 757544 - protein, 48 aa, Homo sapiens
MPQLHYGEEVRQSPQQAPDPSALHQGGPWACAHSTNVPSRADHSGWQR

SEQ ID NO: 757545 - protein, 187 aa, Homo sapiens
EGFYFYMLKCAEDDTNEEQTTFTNSQTSTEDPGDSTPFEDSEEFCFSAEANSFDGDDEFDTYNEDDEEDESETGYWITCCPTCDVDINTWVPFYSTELNKPAMIYCSHGDGHWVHAQCMDLAERTLIHLSAGSNKYYCNEHVEIARALHTPQRVLPLKKPPMKSLRKKGSGKILTPAKKSFLRRLFD

SEQ ID NO: 757546 - protein, 43 aa, Homo sapiens
RDWLALPSAPYNSTDKTTQIPAGYSGSRLFSQHCSRLRWEDHL

SEQ ID NO: 757547 - protein, 171 aa, Homo sapiens
ESEKSLENETLNKEEDCHSPTSKPPKPDQPLKVMPAPPPKENAWVKRSSNPPARSQSSDTEQQSPTSGGGKVAPAQPSEEGPGRKDENKVDGMNVPKGQTGNSSRGPGDGGNRDHWKESDRKDGKKDQDSRSAPEPKKPEENPASKFSSASKYAALSVDGEDENEGEDYAE

SEQ ID NO: 757548 - protein, 135 aa, Homo sapiens
MAASAKKKNKKGKTISLTDFLAEDGGTGGGSTYVSKPVSWADETDDLEGDVSTTWHSNDDDVYRAPPIDRSILPTAPRAAREPNIDRSRLPKSPPYTAFLGNLPYDVTEESIKEFFRGKSSFQVQFCKQVCCSLC

SEQ ID NO: 757549 - protein, 869 aa, Homo sapiens
MRELVNIPLVHILTLVAFSGTEKLPKAPVITTPLETVDALVEEVATFMCAVESYPQPEISWTRNKILIKLFDTRYSIRENGQLLTILSVEDSDDGIYCCTANNGVGGAVESCGALQVKMKPKITRPPINVKIIEGLKAVLPCTTMGNPKPSVSWIKGDSPLRENSRIAVLESGSLRIHNVQKEDAGQYRCVAKNSLGTAYSKVVKLEVEVFARILRAPESHNVTFGSFVTLHCTATGIPVPTITWIENGNAVSSGSIQESVKDRVIDSRLQLFITKPGLYTCIATNKHGEKFSTAKAAATISIAEWSKPQKDNKGYCAQYRGEVCNAVLAKDALVFLNTSYADPEEAQELLVHTAWNELKVVSPVCRPAAEALLCNHIFQECSPGVVPTPIPICREYCLAVKELFCAKEWLVMEEKTHRGLYRSEMHLLSVPECSKLPSMHWDPTACARLPHLDYNKENLKTFPPMTSSKPSVDIPNLPSSSSSSFSVSPTYSMTVIISIMSSFAIFVLLTITTLYCCRRRKQWKNKKRESAAVTLTTLPSELLLDRLHPNPMYQRMPLLLNPKLLSLEYPRNNIEYVRDIGEGAFGRVFQARAPGLLPYEPFTMVAVKMLKEEASADMQADFQREAALMAEFDNPNIVKLLGVCAVGKPMCLLFEYMAYGDLNEFLRSMSPHTVCSLSHSDLSMRAQVSSPGPPPLSCAEQLCIARQVAAGMAYLSERKFVHRDLATRNCLVGENMVVKIADFGLSRNIYSADYYKANENDAIPIRWMPPESIFYNRYTTESDVWAYGVVLWEIFSYGLQPYYGMAHEEVIYYVRDGNILSCPENCPVELYNLMRLCWSKLPADRPSFTSIHRILERMCERAEGTVSV

SEQ ID NO: 757550 - protein, 213 aa, Homo sapiens
MRELVNIPLVHILTLVAFSGTEKLPKAPVITTPLETVDALVEEVATFMCAVESYPQPEISWTRNKILIKLFDTRYSIRENGQLLTILSVEDSDDGIYCCTANNGVGGAVESCGALQVKMKPKITRPPINVKIIEGLKAVLPCTTMGNPKPSVSWIKGDSPLRENSRIAVLESGSLRIHNVQKEDAGQYRCVAKNSLGTAYSKVVKLEVEALLR

SEQ ID NO: 757551 - protein, 234 aa, Homo sapiens
MRELVNIPLVHILTLVAFSGTEKLPKAPVITTPLETVDALVEEVATFMCAVESYPQPEISWTRNKILIKLFDTRYSIRENGQLLTILSVEDSDDGIYCCTANNGVGGAVESCGALQVKMKPKITRPPINVKIIEGLKAVLPCTTMGNPKPSVSWIKGDSPLRENSRIAVLESGSLRIHNVQKEDAGQYRCVAKNSLGTAYSKVVKLEVEGAKGIHTQFVASALQLRSFLSCPQI

SEQ ID NO: 757552 - protein, 189 aa, Homo sapiens [sequence omitted]

SEQ ID NO: 757553 - protein, 404 aa, Homo sapiens
MTSSKPSVDIPNLPSSSSSSFSVSPTYSMTVIISIMSSFAIFVLLTITTLYCCRRRKQWKNKKRESAAVTLTTLPSELLLDRLHPNPMYQRMPLLLNPKLLSLEYPRNNIEYVRDIGEGAFGRVFQARAPGLLPYEPFTMVAVKMLKEEASADMQADFQREAALMAEFDNPNIVKLLGVCAVGKPMCLLFEYMAYGDLNEFLRSMSPHTVCSLSHSDLSMRAQVSSPGPPPLSCAEQLCIARQVAAGMAYLSERKFVHRDLATRNCLVGENMVVKIADFGLSRNIYSADYYKANENDAIPIRWMPPESIFYNRYTTESDVWAYGVVLWEIFSYGLQPYYGMAHEEVIYYVRDGNILSCPENCPVELYNLMRLCWSKLPADRPSFTSIHRILERMCERAEGTVSV

SEQ ID NO: 757554 - protein, 202 aa, Homo sapiens
MRELVNIPLVHILTLVAFSGTEKLPKAPVITTPLETVDALVEEVATFMCAVESYPQPEISWTRNKILIKLFDTRYSIRENGQLLTILSVEDSDDGIYCCTANNGVGGAVESCGALQVKMKPKITRPPINVKIIEGLKAVLPCTTMGNPKPSVSWIKGDSPLRGTSLAGLACLRHLLEQHSPLHLSQILHHAIVYTLLCNLRS

SEQ ID NO: 757555 - protein, 691 aa, Homo sapiens
MDGCKKELPRLQEPEEDEDCYILNVQSSSDDTSGSSVARRAPKRQASCILNVQSRSGDTSGSSVARRAPKRQASSVVVIDSDSDEECHTHEEKKAKLLEINSDDESPECCHVKPAIQEPPIVISDDDNDDDNGNDLEVPDDNSDDSEAPDDNSDDSEAPDDNSDDSEAPDDNSDDSEAPDDNSDDSDVPDDNSDDSSDDNSDDSSDDNSDDSDVPDDKSDDSDVPDDSSDDSDVPDDSSDDSEAPDDSSDDSEAPDDSSDDSEAPDDSSDDSEAPDDSSDDSEASDDSSDDSEASDDSSDDSEAPDDKSDDSDVPEDKSDDSDVPDDNSDDLEVPVPAEDLCNEGQIASDEEELVEAAAAVSQHDSSDDAGEQDLGENLSKPPSDPEANPEVSERKLPTEEEPAPVVEQSGKRKSKTKTIVEPPRKRQTKTKNIVEPPRKRQTKTKNIVEPLRKRKAKTKNVSVTPGHKKRGPSKKKPGAAKVEKRKTRTPKCKVPGCFLQDLEKSKKYSGKNLKRNKDELVQRIYDLFNRSVCDKKLPEKLRIGWNNKMVKTAGLCSTGEMWYPKWRRFAKIQIGLKVCDSADRIRDTLIHEMCHAASWLIDGIHDSHGDAWKYYARKSNRIHPELPRVTRCHNYKINYKVHYECTGCKTRIGCYTKSLDTSRFICAKCKGSLVMVPLTQKDGTRIVPHV

SEQ ID NO: 757556 - protein, 652 aa, Homo sapiens
MDGCKKELPRLQEPEEDEDCYILNVQSSSDDTSGSSVARRAPKRQASCILNVQSRSGDTSGSSVARRAPKRQASSVVVIDSDSDEECHTHEEKKAKLLEINSDDESPECCHVKPAIQEPPIVISDDDNDDDNGNDLEVPDDNSDDSEAPDDNSDDSEAPDDNSDDSEAPDDNSDDSEAPDDNSDDSDVPDDNSDDSSDDNSDDSSDDNSDDSDVPDDKSDDSDVPDDSSDDSDVPDDSSDDSEAPDDSSDDSEAPDDSSDDSEAPDDSSDDSEAPDDSSDDSEASDDSSDDSEASDDSSDDSEAPDDKSDDSDVPEDKSDDSDVPDDNSDDLEVPVPAEDLCNEGQIASDEEELVEAAAAVSQHDSSDDAGEQDLGENLSKPPSDPEANPEVSERKLPTEEEPAPVVEQSGKRKSKTKTIVEPPRKRQTKTKNIVEPPRKRQTKTKNIVEPLRKRKAKTKNVSVTPGHKKRGPSKKKPGAAKVEKRKTRTPKCKVPGCFLQDLEKSKKYSGKNLKRNKDELVQRIYDLFNRSVCDKKLPEKLRIGWNNKMVKTAGLCSTGEMWYPKWRRFAKIQIGLKVCDSADRIRDTLIHEMCHAASWLIDGIHDSHGDAWKYYARKSNRIHPELPRVTRCHNYKINYKVHYECTGCKTR

SEQ ID NO: 757557 - protein, 80 aa, Homo sapiens
TLKKRSFLLELLQKQTHERLSCHNQGIASVNESNREHSTARRLPPRLNGMIGTSCSRFPLELVPQSDFSIIMSQLIPLYD

SEQ ID NO: 757558 - protein, 373 aa, Homo sapiens
MEPQVSNGPTSNTSNGPSSNNRNCPSPMQTGATTDDSKTNLIVNYLPQNMTQEEFRSLFGSIGEIESCKLVRDKITGQSLGYGFVNYIDPKDAEKAINTLNGLRLQTKTIKVSYARPSSASIRDANLYVSGLPKTMTQKELEQLFSQYGRIITSRILVDQVTGVSRGVGFIRFDKRIEAEEAIKGLNGQKPSGATEPITVKFANNPSQKSSQALLSQLYQSPNRRYPGPLHHQAQRFRLDNLLNMAYGVKRLMSGPVPPSACSPRFSPITIDGMTSLVGMNIPGHTGTGWCIFVYNLSPDSDESVLWQLFGPFGAVNNVKVIRDFNTNKCKGFGFVTMTNYDEAAMAIASLNGYRLGDRVLQVSFKTNKAHKS

SEQ ID NO: 757559 - protein, 359 aa, Homo sapiens
MEPQVSNGPTSNTSNGPSSNNRNCPSPMQTGATTDDSKTNLIVNYLPQNMTQEEFRSLFGSIGEIESCKLVRDKITGQSLGYGFVNYIDPKDAEKAINTLNGLRLQTKTIKVSYARPSSASIRDANLYVSGLPKTMTQKELEQLFSQYGRIITSRILVDQVTGVSRGVGFIRFDKRIEAEEAIKGLNGQKPSGATEPITVKFANNPSQKSSQALLSQLYQSPNRRYPGPLHHQAQRFRLDNLLNMAYGVKRFSPITIDGMTSLVGMNIPGHTGTGWCIFVYNLSPDSDESVLWQLFGPFGAVNNVKVIRDFNTNKCKGFGFVTMTNYDEAAMAIASLNGYRLGDRVLQVSFKTNKAHKS

SEQ ID NO: 757560 - protein, 366 aa, Homo sapiens
MEQIISTMEPQVSNGPTSNTSNGPSSNNRNCPSPMQTGATTDDSKTNLIVNYLPQNMTQEEFRSLFGSIGEIESCKLVRDKITGQSLGYGFVNYIDPKDAEKAINTLNGLRLQTKTIKVSYARPSSASIRDANLYVSGLPKTMTQKELEQLFSQYGRIITSRILVDQVTGVSRGVGFIRFDKRIEAEEAIKGLNGQKPSGATEPITVKFANNPSQKSSQALLSQLYQSPNRRYPGPLHHQAQRFRLDNLLNMAYGVKRFSPITIDGMTSLVGMNIPGHTGTGWCIFVYNLSPDSDESVLWQLFGPFGAVNNVKVIRDFNTNKCKGFGFVTMTNYDEAAMAIASLNGYRLGDRVLQVSFKTNKAHKS

SEQ ID NO: 757561 - protein, 364 aa, Homo sapiens [sequence omitted]

SEQ ID NO: 757562 - protein, 382 aa, Homo sapiens
SLRSLGPDRPAGKMRLKNQIISTMEPQVSNGPTSNTSNGPSSNNRNCPSPMQTGATTDDSKTNLIVNYLPQNMTQEEFRSLFGSIGEIESCKLVRDKITGQSLGYGFVNYIDPKDAEKAINTLNGLRLQTKTIKVSYARPSSASIRDANLYVSGLPKTMTQKELEQLFSQYGRIITSRILVDQVTGVSRGVGFIRFDKRIEAEEAIKGLNGQKPSGATEPITVKFANNPSQKSSQALLSQLYQSPNRRYPGPLHHQAQRFRLDNLLNMAYGVKRFSPITIDGMTSLVGMNIPGHTGTGWCIFVYNLSPDSDESVLWQLFGPFGAVNNVKVIRDFNTNKCKGFGFVTMTNYDEAAMAIASLNGYRLGDRVLQVSFKTNKAHKS

SEQ ID NO: 757563 - protein, 373 aa, Homo sapiens; identical to SEQ ID NO: 757558

SEQ ID NO: 757564 - protein, 397 aa, Homo sapiens
QPLGCVHGGKGLTDMRLLLLREIVINESRNCSFMIISTMEPQVSNGPTSNTSNGPSSNNRNCPSPMQTGATTDDSKTNLIVNYLPQNMTQEEFRSLFGSIGEIESCKLVRDKITGQSLGYGFVNYIDPKDAEKAINTLNGLRLQTKTIKVSYARPSSASIRDANLYVSGLPKTMTQKELEQLFSQYGRIITSRILVDQVTGVSRGVGFIRFDKRIEAEEAIKGLNGQKPSGATEPITVKFANNPSQKSSQALLSQLYQSPNRRYPGPLHHQAQRFRLDNLLNMAYGVKRFSPITIDGMTSLVGMNIPGHTGTGWCIFVYNLSPDSDESVLWQLFGPFGAVNNVKVIRDFNTNKCKGFGFVTMTNYDEAAMAIASLNGYRLGDRVLQVSFKTNKAHKS

SEQ ID NO: 757565 - protein, 371 aa, Homo sapiens
MEWNGLKMIISTMEPQVSNGPTSNTSNGPSSNNRNCPSPMQTGATTDDSKTNLIVNYLPQNMTQEEFRSLFGSIGEIESCKLVRDKITGQSLGYGFVNYIDPKDAEKAINTLNGLRLQTKTIKVSYARPSSASIRDANLYVSGLPKTMTQKELEQLFSQYGRIITSRILVDQVTGVSRGVGFIRFDKRIEAEEAIKGLNGQKPSGATEPITVKFANNPSQKSSQALLSQLYQSPNRRYPGPLHHQAQRFRLDNLLNMAYGVKRFSPITIDGMTSLVGMNIPGHTGTGWCIFVYNLSPDSDESVLWQLFGPFGAVNNVKVIRDFNTNKCKGFGFVTMTNYDEAAMAIASLNGYRLGDRVLQVSFKTNKAHKS

SEQ ID NO: 757566 - protein, 263 aa, Homo sapiens
MEWNGLKMIISTMEPQVSNGPTSNTSNGPSSNNRNCPSPMQTGATTDDSKTNLIVNYLPQNMTQEEFRSLFGSIGEIESCKLVRDKITGQSLGYGFVNYIDPKDAEKAINTLNGLRLQTKTIKVSYARPSSASIRDANLYVSGLPKTMTQKELEQLFSQYGRIITSRILVDQVTGVSRGVGFIRFDKRIEAEEAIKGLNGQKPSGATEPITVKFANNPSQKSSQALLSQLYQSPNRRYPGPLHHQAQRFRLDNLLNMAYGVKR

SEQ ID NO: 757567 - protein, 54 aa, Homo sapiens
DEISIPLGPKHLHMTQAEMQKEAHQRQADMQEIALWRTGHIRDNTLTRTHTQRK

SEQ ID NO: 757568 - protein, 95 aa, Homo sapiens
LEDPPKVHSSISTKDKNVMMSARTLIHLFRTLNPQMLQKKFRGKPTEASIEARVQEYGELDAKDYIPGAEVLEVEKEENAENDEDGMGNDHAARR

SEQ ID NO: 757569 - protein, 687 aa, Homo sapiens
MSNRNNNKLPSNLPQLQNLIKRDPPAYIEEFLQQYNHYKSNVEIFKLQPNKPSKELAELVMFMAQISHCYPEYLSNFPQEVKDLLSCNHTVLDPDLRMTFCKALILLRNKNLINPSSLLELFFELFRCHDKLLRKTLYTHIVTDIKNINAKHKNNKVNVVLQNFMYTMLRDSNATAAKMSLDVMIELYRRNIWNDAKTVNVITTACFSKVTKILVAALTFFLGKDEDEKQDSDSESEDDGPTARDLLVQYATGKKSSKNKKKLEKAMKVLKKQKKKKKPEVFNFSAIHLIHDPQDFAEKLLKQLECCKERFEVKMMLMNLISRLVGIHELFLFNFYPFLQRFLQPHQREVTKILLFAAQASHHLVPPEIIQSLLMTVANNFVTDKNSGEVMTVGINAIKEITARCPLAMTEELLQDLAQYKTHKDKNVMMSARTLIHLFRTLNPQMLQKKFRGKPTEASIEARVQEYGELDAKDYIPGAEVLEVEKEENAENDEDGWESTSLSEEEDADGEWIDVQHSSDEEQQEISKKLNSMPMEERKAKAAAISTSRVLTQEDFQKIRMAQMRKELDAAPGKSQKRKYIEIDSDEEPRGELLSLRDIERLHKKPKSDKETRLATAMAGKTDRKEFVRKKTKTNPFSSSTNKEKKKQKNFMMMRYSQNVRSKNKRSFREKQLALRDALLKKRKRMK

SEQ ID NO: 757570 - protein, 702 aa, Homo sapiens
MSNRNNNKLPSNLPQLQNLIKRDPPAYIEEFLQQYNHYKSNVEIFKLQPNKPSKELAELVMFMAQEEKESNFRRAFALLQISHCYPEYLSNFPQEVKDLLSCNHTVLDPDLRMTFCKALILLRNKNLINPSSLLELFFELFRCHDKLLRKTLYTHIVTDIKNINAKHKNNKVNVVLQNFMYTMLRDSNATAAKMSLDVMIELYRRNIWNDAKTVNVITTACFSKVTKILVAALTFFLGKDEDEKQDSDSESEDDGPTARDLLVQYATGKKSSKNKKKLEKAMKVLKKQKKKKKPEVFNFSAIHLIHDPQDFAEKLLKQLECCKERFEVKMMLMNLISRLVGIHELFLFNFYPFLQRFLQPHQREVTKILLFAAQASHHLVPPEIIQSLLMTVANNFVTDKNSGEVMTVGINAIKEITARCPLAMTEELLQDLAQYKTHKDKNVMMSARTLIHLFRTLNPQMLQKKFRGKPTEASIEARVQEYGELDAKDYIPGAEVLEVEKEENAENDEDGWESTSLSEEEDADGEWIDVQHSSDEEQQEISKKLNSMPMEERKAKAAAISTSRVLTQEDFQKIRMAQMRKELDAAPGKSQKRKYIEIDSDEEPRGELLSLRDIERLHKKPKSDKETRLATAMAGKTDRKEFVRKKTKTNPFSSSTNKEKKKQKNFMMMRYSQNVRSKNKRSFREKQLALRDALLKKRKRMK

SEQ ID NO: 757571 - protein, 687 aa, Homo sapiens; identical to SEQ ID NO: 757569

SEQ ID NO: 757572 - protein, 421 aa, Homo sapiens
MKVLKKQKKKKKPEVFNFSAIHLIHDPQDFAEKLLKQLECCKERFEVKMMLMNLISRLVGIHELFLFNFYPFLQRFLQPHQREVTKILLFAAQASHHLVPPEIIQSLLMTVANNFVTDKNSGEVMTVGINAIKEITARCPLAMTEELLQDLAQYKTHKDKNVMMSARTLIHLFRTLNPQMLQKKFRGKPTEASIEARVQEYGELDAKDYIPGAEVLEVEKEENAENDEDGWESTSLSEEEDADGEWIDVQHSSDEEQQEISKKLNSMPMEERKAKAAAISTSRVLTQEDFQKIRMAQMRKELDAAPGKSQKRKYIEIDSDEEPRGELLSLRDIERLHKKPKSDKETRLATAMAGKTDRKEFVRKKTKTNPFSSSTNKEKKKQKNFMMMRYSQNVRSKNKRSFREKQLALRDALLKKRKRMK

SEQ ID NO: 757573 - protein, 249 aa, Homo sapiens
MSNRNNNKLPSNLPQLQNLIKRDPPAYIEEFLQQYNHYKSNVEIFKLQPNKPSKELAELVMFMAQISHCYPEYLSNFPQEVKDLLSCNHTVLDPDLRMTFCKALILLRNKNLINPSSLLELFFELFRCHDKLLRKTLYTHIVTDIKNINAKHKNNKVNVVLQNFMYTMLRDSNATAAKMSLDVMIELYRRNIWNDAKTVNVITTACFSKVTKILVAALTFFLGKDEDEKQDSDSESEDDGPTARDLLVQ

SEQ ID NO: 757574 - protein, 505 aa, Homo sapiens
MSNRNNNKLPSNLPQLQNLIKRDPPAYIEEFLQQYNHYKSNVEIFKLQPNKPSKELAELVMFMAQISHCYPEYLSNFPQEVKDLLSCNHTVLDPDLRMTFCKALILLRNKNLINPSSLLELFFELFRCHDKLLRKTLYTHIVTDIKNINAKHKNNKVNVVLQNFMYTMLRDSNATAAKMSLDVMIELYRRNIWNDAKTVNVITTACFSKVTKILVAALTFFLGKDEDEKQDSDSESEDDGPTARDLLVQYATGKKSSKNKKKLEKAMKVLKKQKKKKKPEVFNFSAIHLIHDPQDFAEKLLKQLECCKERFEVKMMLMNLISRLVGIHELFLFNFYPFLQRFLQPHQREVTKILLFAAQASHHLVPPEIIQSLLMTVANNFVTDKNSGEVMTVGINAIKEITARCPLAMTEELLQDLAQYKTHKDKNVMMSARTLIHLFRTLNPQMLQKKFRGKPTEASIEARVQEYGELDAKDYIPGAEVLEVEKEENAENDEDGMGNDHAARR

SEQ ID NO: 757575 - protein, 147 aa, Homo sapiens
MSNRNNNKLPSNLPQLQNLIKRDPPAYIEEFLQQYNHYKSNVEIFKLQPNKPSKELAELVMFMAQISHCYPEYLSNFPQEVKDLLSCNHTVLDPDLRMTFCKALILLRNKNLINPSSLLELFFELFRCHDKLLRKVKGKTNISLHLP

SEQ ID NO: 757576 - protein, 193 aa, Homo sapiens [sequence omitted]

SEQ ID NO: 757577 - protein, 113 aa, Homo sapiens
MDHLGASLWPQVGSLCLLLAGAAWAPPPNLPDPKFESKAALLAARGPEELLCFTERLEDLVCFWEEAASAGVGPGNYSFSYQLELSPIRRVPPRAEGGGGAELPGGRSLVCPL

SEQ ID NO: 757578 - protein, 508 aa, Homo sapiens
MDHLGASLWPQVGSLCLLLAGAAWAPPPNLPDPKFESKAALLAARGPEELLCFTERLEDLVCFWEEAASAGVGPGNYSFSYQLEDEPWKLCRLHQAPTARGAVRFWCSLPTADTSSFVPLELRVTAASGAPRYHRVIHINEVVLLDAPVGLVARLADESGHVVLRWLPPPETPMTSHIRYEVDVSAGNGAGSVQRVEILEGRTECVLSNLRGRTRYTFAVRARMAEPSFGGFWSAWSEPVSLLTPSDLDPLILTLSLILVVILVLLTVLALLSHRRALKQKIWPGIPSPESEFEGLFTTHKGNFQLWLYQNDGCLWWSPCTPFTEDPPASLEVLSERCWGTMQAVEPGTDDEGPLLEPVGSEHAQDTYLVLDKWLLPRNPPSEDLPGPGGSVDIVAMDEGSEASSCSSALASKPSPEGASAASFEYTILDPSSQLLRPWTLCPELPPTPPHLKYLYLVVSDSGISTDYSSGDSQGAQGGLSDGPYSNPYENSLIPAAEPLPPSYVACS

SEQ ID NO: 757579 - protein, 571 aa, Homo sapiens
MDHLGASLWPQVGSLCLLLAGAAWAPPPNLPDPKFESKAALLAARGPEELLCFTERLEDLVCFWEEAASAGVGPGNYSFSYQLEDEPWKLCRLHQAPTARGAVRFWCSLPTADTSSFVPLELRVTAASGAPRYHRVIHINEVVLLDAPVGLVARLADESGHVVLRWLPPPETPMTSHIRYEVDVSAGNGAGSVQRGTVFLSPDWLSSTRARPHVIYFCLLRVPRPDSSPQVEILEGRTECVLSNLRGRTRYTFAVRARMAEPSFGGFWSAWSEPVSLLTPSGEAPGGGVGGARANHGASPPPCPPPRLLDLDPLILTLSLILVVILVLLTVLALLSHRRALKQKIWPGIPSPESEFEGLFTTHKGNFQLWLYQNDGCLWWSPCTPFTEDPPASLEVLSERCWGTMQAVEPGTDDEGPLLEPVGSEHAQDTYLVLDKWLLPRNPPSEDLPGPGGSVDIVAMDEGSEASSCSSALASKPSPEGASAASFEYTILDPSSQLLRPWTLCPELPPTPPHLKYLYLVVSDSGISTDYSSGDSQGAQGGLSDGPYSNPYENSLIPAAEPLPPSYVACS

SEQ ID NO: 757580 - protein, 540 aa, Homo sapiens
MDHLGASLWPQVGSLCLLLAGAAWAPPPNLPDPKFESKAALLAARGPEELLCFTERLEDLVCFWEEAASAGVGPGNYSFSYQLEDEPWKLCRLHQAPTARGAVRFWCSLPTADTSSFVPLELRVTAASGAPRYHRVIHINEVVLLDAPVGLVARLADESGHVVLRWLPPPETPMTSHIRYEVDVSAGNGAGSVQRVEILEGRTECVLSNLRGRTRYTFAVRARMAEPSFGGFWSAWSEPVSLLTPSDLDPLILTLSLILVVILVLLTVLALLSHRRALKQKIWPGIPSPESEFEGLFTTHKGNFQVGGLVVPSVPGLPCFSAAKLQASLSRLVLFLQLWLYQNDGCLWWSPCTPFTEDPPASLEVLSERCWGTMQAVEPGTDDEGPLLEPVGSEHAQDTYLVLDKWLLPRNPPSEDLPGPGGSVDIVAMDEGSEASSCSSALASKPSPEGASAASFEYTILDPSSQLLRPWTLCPELPPTPPHLKYLYLVVSDSGISTDYSSGDSQGAQGGLSDGPYSNPYENSLIPAAEPLPPSYVACS

SEQ ID NO: 757581 - protein, 577 aa, Homo sapiens
MDHLGASLWPQVGSLCLLLAGAAWAPPPNLPDPKFESKAALLAARGPEELLCFTERLEDLVCFWEEAASAGVGPGNYSFSYQLEDEPWKLCRLHQAPTARGAVRFWCSLPTADTSSFVPLELRVTAASGAPRYHRVIHINEVVLLDAPVGLVARLADESGHVVLRWLPPPETPMTSHIRYEVDVSAGNGAGSVQRGTVFLSPDWLSSTRARPHVIYFCLLRVPRPDSSPQVEILEGRTECVLSNLRGRTRYTFAVRARMAEPSFGGFWSAWSEPVSLLTPSGEAPGGGVGGARANHGASPPPCPPPRLLDLDPLILTLSLILVVILVLLTVLALLSHRRALKQKIWPGIPSPESEFEGLFTTHKGNFQVVLFLQLWLYQNDGCLWWSPCTPFTEDPPASLEVLSERCWGTMQAVEPGTDDEGPLLEPVGSEHAQDTYLVLDKWLLPRNPPSEDLPGPGGSVDIVAMDEGSEASSCSSALASKPSPEGASAASFEYTILDPSSQLLRPWTLCPELPPTPPHLKYLYLVVSDSGISTDYSSGDSQGAQGGLSDGPYSNPYENSLIPAAEPLPPSYVACS

SEQ ID NO: 757582 - protein, 167 aa, Homo sapiens [sequence omitted]

SEQ ID NO: 757583 - protein, 508 aa, Homo sapiens; identical to SEQ ID NO: 757578

SEQ ID NO: 757584 - protein, 543 aa, Homo sapiens
MDHLGASLWPQVGSLCLLLAGAAWAPPPNLPDPKFESKAALLAARGPEELLCFTERLEDLVCFWEEAASAGVGPGNYSFSYQLEDEPWKLCRLHQAPTARGAVRFWCSLPTADTSSFVPLELRVTAASGAPRYHRVIHINEVVLLDAPVGLVARLADESGHVVLRWLPPPETPMTSHIRYEVDVSAGNGAGSVQRGTVFLSPDWLSSTRARPHVIYFCLLRVPRPDSSPQVEILEGRTECVLSNLRGRTRYTFAVRARMAEPSFGGFWSAWSEPVSLLTPSDLDPLILTLSLILVVILVLLTVLALLSHRRALKQKIWPGIPSPESEFEGLFTTHKGNFQLWLYQNDGCLWWSPCTPFTEDPPASLEVLSERCWGTMQAVEPGTDDEGPLLEPVGSEHAQDTYLVLDKWLLPRNPPSEDLPGPGGSVDIVAMDEGSEASSCSSALASKPSPEGASAASFEYTILDPSSQLLRPWTLCPELPPTPPHLKYLYLVVSDSGISTDYSSGDSQGAQGGLSDGPYSNPYENSLIPAAEPLPPSYVACS

SEQ ID NO: 757585 - protein, 603 aa, Homo sapiens
MDHLGASLWPQVGSLCLLLAGAAWAPPPNLPDPKFESKAALLAARGPEELLCFTERLEDLVCFWEEAASAGVGPGNYSFSYQLEDEPWKLCRLHQAPTARGAVRFWCSLPTADTSSFVPLELRVTAASGAPRYHRVIHINEVVLLDAPVGLVARLADESGHVVLRWLPPPETPMTSHIRYEVDVSAGNGAGSVQRGTVFLSPDWLSSTRARPHVIYFCLLRVPRPDSSPQVEILEGRTECVLSNLRGRTRYTFAVRARMAEPSFGGFWSAWSEPVSLLTPSGEAPGGGVGGARANHGASPPPCPPPRLLDLDPLILTLSLILVVILVLLTVLALLSHRRALKQKIWPGIPSPESEFEGLFTTHKGNFQVGGLVVPSVPGLPCFSAAKLQASLSRLVLFLQLWLYQNDGCLWWSPCTPFTEDPPASLEVLSERCWGTMQAVEPGTDDEGPLLEPVGSEHAQDTYLVLDKWLLPRNPPSEDLPGPGGSVDIVAMDEGSEASSCSSALASKPSPEGASAASFEYTILDPSSQLLRPWTLCPELPPTPPHLKYLYLVVSDSGISTDYSSGDSQGAQGGLSDGPYSNPYENSLIPAAEPLPPSYVACS

SEQ ID NO: 757586 - protein, 276 aa, Homo sapiens
MYSSASIVITGTKCICASMTGSGGGIGEYSMSHIYVTIYIGFNRALKQKIWPGIPSPESEFEGLFTTHKGNFQLWLYQNDGCLWWSPCTPFTEDPPASLEVLSERCWGTMQAVEPGTDDEGPLLEPVGSEHAQDTYLVLDKWLLPRNPPSEDLPGPGGSVDIVAMDEGSEASSCSSALASKPSPEGASAASFEYTILDPSSQLLRPWTLCPELPPTPPHLKYLYLVVSDSGISTDYSSGDSQGAQGGLSDGPYSNPYENSLIPAAEPLPPSYVACS

SEQ ID NO: 757587 - protein, 480 aa, Homo sapiens
MDHLGASLWPQVGSLCLLLAGAAWAPPPNLPDPKFESKAALLAARGPEELLCFTERLEDLVCFWEEAASAGVGPGNYSFSYQLEDEPWKLCRLHQAPTARGAVRFWCSLPTADTSSFVPLELRVTAASGAPRYHRVIHINEVVLLDAPVGLVARLADESGHVVLRWLPPPETPMTSHIRYEVDVSAGNGAGSVQRVEILEGRTECVLSNLRGRTRYTFAVRARMAEPSFGGFWSAWSEPVSLLTPSDLDPLILTLSLILVVILVLLTVLALLSHRRALKQKIWPGIPSPESEFEGLFTTHKGNFQLWLYQNDGCLWWSPCTPFTEDPPASLEVLSERCWGTMQAVEPGTDDEGPLLEPVGSEHAQDTYLVLDKWLLPRNPPSEDLPGPGGSVDIVAMDEGSEASSCSSALASKPSPEGASAASFEYTILDPSSQLLRPWTLCPELPPTPPHLKYLYLVVSDSGISTDYTMWLALRTPGCR

SEQ ID NO: 757588 - protein, 139 aa, Homo sapiens
MVLGEFWGLGSPSLFLLAQCRQDRQTRAHERDTQLAVSTRAPTPVNGGRSRPSAHPSLLVGCSDLELNSREPSATACSQPSPNQRSVSKEAVFCLFVCFLKTRSPSIPLAEVRWCKHNSPQPQPPGLKRSSSLSLPSSC

SEQ ID NO: 757589 - protein, 57 aa, Homo sapiens
MDEQTPPSNVAKGRERVDTSPRPPKGAQTCCSASWPLEGSVATSIVLPPRASGGERP

SEQ ID NO: 757590 - protein, 709 aa, Homo sapiens
MAETLEFNDVYQEVKGSMNDGRLRLSRQGIIFKNSKTGKVDNIQAGELTEGIWRRVALGHGLKLLTKNGHVYKYDGFRESEFEKLSDFFKTHYRLELMEKDLCVKGWNWGTVKFGGQLLSFDIGDQPVFEIPLSNVSQCTTGKNEVTLEFHQNDDAEVSLMEVRFYVPPTQEDGVDPVEAFAQNVLSKADVIQATGDAICIFRELQCLTPRGRYDIRIYPTFLHLHGKTFDYKIPYTTVLRLFLLPHKDQRQMFFVISLDPPIKQGQTRYHFLILLFSKDEDISLTLNMNEEEVEKRFEGRLTKNMSGSLYEMVSRVMKALVNRKITVPGNFQGHSGAQCITCSYKASSGLLYPLERGFIYVHKPPVHIRFDEISFVNFARGTTTTRSFDFEIETKQGTQYTFSSIEREEYGKLFDFVNAKKLNIKNRGLKEGMNPSYDEYADSDEDQHDAYLERMKEEGKIREENANDSSDDSGEETDESFNPGEEEEDVAEEFDSNASASSSSNEGDSDRDEKKRKQLKKAKMAKDRKSRKKPVEVKKGKDPNAPKRPMSAYMLWLNASREKIKSDHPGISITDLSKKAGEIWKGMSKEKKEEWDRKAEDARRDYEKAMKEYEGGRGESSKRDKSKKKKKVKVKMEKKSTPSRGSSSKSSSRQLSESFKSKEFVSSDESSSGENKSKKKRRRSEDSEEEELASTPPSSEDSASGSDE

SEQ ID NO: 757591 - protein, 233 aa, Homo sapiens
WRPWSRRRTPWAMSENLDNEGPKPMESCGQESSSALSCPTVSVPPAAPAALEEVEKEGAGAATGPGPQPGLYSYIRDDLFTSEIFKLELQNVPRHASFSDVRRFLGRFGLQPHKEKKEEWDRKAEDARRDYEKAMKEYEGGRGESSKRDKSKKKKKVKVKMEKKSTPSRGSSSKSSSRQLSESFKSKEFVSSDESSSGENKSKKKRRRSEDSEEEELASTPPSSEDSASGSDE

SEQ ID NO: 757592 - protein, 875 aa, Homo sapiens
MWGGGEPWVWGRGVVGAVRGKPCTLSWIGSRAMCGLLADPGVPLLVAMAPAGAARAGVGLGVSGIPGPVLHPGLDLDPRALQRPSVGFQAEEILRHPGAAGSCYLAPSVSTARCCLSCLSVFLLNSDSQPAEHPHTHSGVGAQLPVYLVSLVQPGALPRPPQAGVDMAETLEFNDVYQEVKGSMNDGRLRLSRQGIIFKNSKTGKVDNIQAGELTEGIWRRVALGHGLKLLTKNGHVYKYDGFRESEFEKLSDFFKTHYRLELMEKDLCVKGWNWGTVKFGGQLLSFDIGDQPVFEIPLSNVSQCTTGKNEVTLEFHQNDDAEVSLMEVRFYVPPTQEDGVDPVEAFAQNVLSKADVIQATGDAICIFRELQCLTPRGRYDIRIYPTFLHLHGKTFDYKIPYTTVLRLFLLPHKDQRQMFFVISLDPPIKQGQTRYHFLILLFSKDEDISLTLNMNEEEVEKRFEGRLTKNMSGSLYEMVSRVMKALVNRKITVPGNFQGHSGAQCITCSYKASSGLLYPLERGFIYVHKPPVHIRFDEISFVNFARGTTTTRSFDFEIETKQGTQYTFSSIEREEYGKLFDFVNAKKLNIKNRGLKEGMNPSYDEYADSDEDQHDAYLERMKEEGKIREENANDSSDDSGEETDESFNPGEEEEDVAEEFDSNASASSSSNEGDSDRDEKKRKQLKKAKMAKDRKSRKKPVEVKKGKDPNAPKRPMSAYMLWLNASREKIKSDHPGISITDLSKKAGEIWKGMSKEKKEEWDRKAEDARRDYEKAMKEYEGGRGESSKRDKSKKKKKVKVKMEKKSTPSRGSSSKSSSRQLSESFKSKEFVSSDESSSGENKSKKKRRRSEDSEEEELASTPPSSEDSASGSDE

SEQ ID NO: 757593 - protein, 709 aa, Homo sapiens; identical to SEQ ID NO: 757590

SEQ ID NO: 757594 - protein, 743 aa, Homo sapiens
MAETLEFNDVYQEVKGSMNDGRLRLSRQGIIFKNSKTGKVDNIQAGELTEGIWRRVALGHGLKLLTKNGHVYKYDGFRESEFEKLSDFFKTHYRLELMEKDLCVKGWNWGTVKFGGQLLSFDIGDQPVFEIPLSNVSQCTTGKNEVTLEFHQNDDAEVSLMEVRFYVPPTQEDGVDPVEVRLPLVALAADGAEQALAGLGAGPAAWLPYVLLQAFAQNVLSKADVIQATGDAICIFRELQCLTPRGRYDIRIYPTFLHLHGKTFDYKIPYTTVLRLFLLPHKDQRQMFFVISLDPPIKQGQTRYHFLILLFSKDEDISLTLNMNEEEVEKRFEGRLTKNMSGSLYEMVSRVMKALVNRKITVPGNFQGHSGAQCITCSYKASSGLLYPLERGFIYVHKPPVHIRFDEISFVNFARGTTTTRSFDFEIETKQGTQYTFSSIEREEYGKLFDFVNAKKLNIKNRGLKEGMNPSYDEYADSDEDQHDAYLERMKEEGKIREENANDSSDDSGEETDESFNPGEEEEDVAEEFDSNASASSSSNEGDSDRDEKKRKQLKKAKMAKDRKSRKKPVEVKKGKDPNAPKRPMSAYMLWLNASREKIKSDHPGISITDLSKKAGEIWKGMSKEKKEEWDRKAEDARRDYEKAMKEYEGGRGESSKRDKSKKKKKVKVKMEKKSTPSRGSSSKSSSRQLSESFKSKEFVSSDESSSGENKSKKKRRRSEDSEEEELASTPPSSEDSASGSDE

SEQ ID NO: 757595 - protein, 624 aa, Homo sapiens [sequence omitted]

SEQ ID NO: 757596 - protein, 709 aa, Homo sapiens; identical to SEQ ID NO: 757590

SEQ ID NO: 757597 - protein, 709 aa, Homo sapiens; identical to SEQ ID NO: 757590

SEQ ID NO: 757598 - protein, 629 aa, Homo sapiens
MAETLEFNDVYQEVKGSMNDGRLRLSRQGIIFKNSKTGKVDNIQAGELTEGIWRRVALGHGLKLLTKNGHVYKYDGFRESEFEKLSDFFKTHYRLELMEKDLCVKGWNWGTVKFGGQLLSFDIGDQPVFEIPLSNVSQCTTGKNEVTLEFHQNDDAEVSLMEVRFYVPPTQEDGVDPVEAFAQNVLSKADVIQATGDAICIFRELQCLTPRGRYDIRIYPTFLHLHGKTFDYKIPYTTVLRLFLLPHKDQRQMFFVISLDPPIKQGQTRYHFLILLFSKDEDISLTLNMNEEEVEKRFEGRLTKNMSGSLYEMVSRVMKALVNRKITVPGNFQGHSGAQCITCSYKASSGLLYPLERGFIYVHKPPVHIRFDEISFVNFARGTTTTRSFDFEIETKQGTQYTFSSIEREEYGKLFDFVNAKKLNIKNRGLKEGMNPSYDEYADSDEDQHDAYLERMKEEGKIREENANDSSDDSGEETDESFNPGEEEEDVAEEFDSNASASSSSNEGDSDRDEKKRKQLKKAKMAKDRKSRKKPVEVKKGKDPNAPKRPMSAYMLWLNASREKIKSDHPGISITDLSKKAGEIWKGMSKEKKEEWDRKAEDARRDYEKAMEIGIINGAGAQGRFFIQG

SEQ ID NO: 757599 - protein, 277 aa, Homo sapiens
MAEATTVNGRKQCWGLVVDTVLWSSSLAPFGWVSLDLSSSCPEAVGSCLPSSSLSLAVFSGRFDSNASASSSSNEGDSDRDEKKRKQLKKAKMAKDRKSRKKPVEVKKGKDPNAPKRPMSAYMLWLNASREKIKSDHPGISITDLSKKAGEIWKGMSKEKKEEWDRKAEDARRDYEKAMKEYEGGRGESSKRDKSKKKKKVKVKMEKKSTPSRGSSSKSSSRQLSESFKSKEFVSSDESSSGENKSKKKRRRSEDSEEEELASTPPSSEDSASGSDE

SEQ ID NO: 757600 - protein, 494 aa, Homo sapiens
MAETLEFNDVYQEVKGSMNDGRLRLSRQGIIFKNSKTGKVDNIQAGELTEGIWRRVALGHGLKLLTKNGHVYKYDGFRESEFEKLSDFFKTHYRLELMEKDLCVKGWNWGTVKFGGQLLSFDIGDQPVFEIPLSNVSQCTTGKNEVTLEFHQNDDAEVSLMEVRFYVPPTQEDGVDPVEAFAQNVLSKADVIQATGDAICIFRELQCLTPRGRYDIRIYPTFLHLHGKTFDYKIPYTTVLRLFLLPHKDQRQMFFVISLDPPIKQGQTRYHFLILLFSKDEDISLTLNMNEEEVEKRFEGRLTKNMSGSLYEMVSRVMKALVNRKITVPGNFQGHSGAQCITCSYKASSGLLYPLERGFIYVHKPPVHIRFDEISFVNFARGTTTTRSFDFEIETKQGTQYTFSSIEREEYGKLFDFVNAKKLNIKNRGLKEGMNPSYDEYADSDEDQHDAYLERMKEEGKIREENANDSSDDSGEETDESFNPGEEEEDVAEE

SEQ ID NO: 757601 - protein, 179 aa, Homo sapiens
  misc_feature (3)..(4): Xaa can be any naturally occurring amino acid
NSXXRRQVKKGKDPNAPKRPMSAYMLWLNASREKIKSDHPGISITDLSKKAGEIWKGMSKEKKEEWDRKAEDARRDYEKAMKEYEGGRGESSKRDKSKKKKKVKVKMEKKSTPSRGSSSKSSSRQLSESFKSKEFVSSDESSSGENKSKKKRRRSEDSEEEELASTPPSSEDSASGSDE

SEQ ID NO: 757602 - protein, 233 aa, Homo sapiens; identical to SEQ ID NO: 757591

SEQ ID NO: 757603 - protein, 406 aa, Homo sapiens
MAETLEFNDVYQEVKGSMNDGRLRLSRQGIIFKNSKTGKVDNIQAGELTEGIWRRVALGHGLKLLTKNGHVYKYDGFRESEFEKLSDFFKTHYRLELMEKDLCVKGWNWGTVKFGGQLLSFDIGDQPVFEIPLSNVSQCTTGKNEVTLEFHQNDDAEVSLMEVRFYVPPTQEDGVDPVEAFAQNVLSKADVIQATGDAICIFRELQCLTPRGRYDIRIYPTFLHLHGKTFDYKIPYTTVLRLFLLPHKDQRQMFFVISLDPPIKQGQTRYHFLILLFSKDEDISLTLNMNEEEVEKRFEGRLTKNMSGSLYEMVSRVMKALVNRKITVPGNFQGHSGAQCITCSYKASSGLLYPLERGFIYVHKPPVHIRFDEISFVNFARGTTTTRYVQSQRNVLVLGEEEIRKW

SEQ ID NO: 757604 - protein, 219 aa, Homo sapiens
MAETLEFNDVYQEVKGSMNDGRLRLSRQGIIFKNSKTGKVDNIQAGELTEGIWRRVALGHGLKLLTKNGHVYKYDGFRESEFEKLSDFFKTHYRLELMEKDLCVKGWNWGTVKFGGQLLSFDIGDQPVFEIPLSNVSQCTTGKNEVTLEFHQNDDAEVSLMEVRFYVPPTQEDGVDPVEAFAQNVLSKADVIQATGDAICIFRELQCLTPRGRYDIRIL

SEQ ID NO: 757605 - protein, 80 aa, Homo sapiens
TTSLVTWCMSPHREEYGKLFDFVNAKKLNIKNRGLKEVLLCGEDETLSWSFYRGERGGDFFRLLFHSFFSSYPYRKKRCV

SEQ ID NO: 757606 - protein, 118 aa, Homo sapiens
APLSEQLSEVYLVEDMSTRVAAARYSPLPLLRLALTRLPAPSVRHSGAQCITCSYKASSGLLYPLERGFIYVHKPPVHIRFDEISFVNFARGTTTTRSFDFEIETKQGTQYTFSSIER

SEQ ID NO: 757607 - protein, 601 aa, Homo sapiens
VPPGSELRQLLSFDIGDQPVFEIPLSNVSQCTTGKNEVTLEFHQNDDAEVSLMEVRFYVPPTQEDGVDPVEAFAQNVLSKADVIQATGDAICIFRELQCLTPRGRYDIRIYPTFLHLHGKTFDYKIPYTTVLRLFLLPHKDQRQMFFVISLDPPIKQGQTRYHFLILLFSKDEDISLTLNMNEEEVEKRFEGRLTKNMSGSLYEMVSRVMKALVNRKITVPGNFQGHSGAQCITCSYKASSGLLYPLERGFIYVHKPPVHIRFDEISFVNFARGTTTTRSFDFEIETKQGTQYTFSSIEREEYGKLFDFVNAKKLNIKNRGLKEGMNPSYDEYADSDEDQHDAYLERMKEEGKIREENANDSSDDSGEETDESFNPGEEEEDVAEEFDSNASASSSSNEGDSDRDEKKRKQLKKAKMAKDRKSRKKPVEVKKGKDPNAPKRPMSAYMLWLNASREKIKSDHPGISITDLSKKAGEIWKGMSKEKKEEWDRKAEDARRDYEKAMKEYEGGRGESSKRDKSKKKKKVKVKMEKKSTPSRGSSSKSSSRQLSESFKSKEFVSSDESSSGENKSKKKRRRSEDSEEEELASTPPSSEDSASGSDE

SEQ ID NO: 757608 - protein, 709 aa, Homo sapiens; identical to SEQ ID NO: 757590

SEQ ID NO: 757609 - protein, 709 aa, Homo sapiens; identical to SEQ ID NO: 757590

SEQ ID NO: 757610 - protein, 446 aa, Homo sapiens
MSRYQHANGLILLFSKDEDISLTLNMNEEEVEKRFEGRLTKNMSGSLYEMVSRVMKALVNRKITVPGNFQGHSGAQCITCSYKASSGLLYPLERGFIYVHKPPVHIRFDEISFVNFARGTTTTRSFDFEIETKQGTQYTFSSIEREEYGKLFDFVNAKKLNIKNRGLKEGMNPSYDEYADSDEDQHDAYLERMKEEGKIREENANDSSDDSGEETDESFNPGEEEEDVAEEFDSNASASSSSNEGDSDRDEKKRKQLKKAKMAKDRKSRKKPVEVKKGKDPNAPKRPMSAYMLWLNASREKIKSDHPGISITDLSKKAGEIWKGMSKEKKEEWDRKAEDARRDYEKAMKEYEGGRGESSKRDKSKKKKKVKVKMEKKSTPSRGSSSKSSSRQLSESFKSKEFVSSDESSSGENKSKKKRRRSEDSEEEELASTPPSSEDSASGSDE

SEQ ID NO: 757611 - protein, 301 aa, Homo sapiens
PTRPRPTRPRTRGSTHASDRGLKEGMNPSYDEYADSDEDQHDAYLERMKEEGKIREENANDSSDDSGEETDESFNPGEEEEDVAEEFDSNASASSSSNEGDSDRDEKKRKQLKKAKMAKDRKSRKKPVEVKKGKDPNAPKRPMSAYMLWLNASREKIKSDHPGISITDLSKKAGEIWKGMSKEKKEEWDRKAEDARRDYEKAMKEYEGGRGESSKRDKSKKKKKVKVKMEKKSTPSRGSSSKSSSRQLSESFKSKEFVSSDESSSGENKSKKKRRRSEDSEEEELASTPPSSEDSASGSDE

SEQ ID NO: 757612 - protein, 502 aa, Homo sapiens
MAETLEFNDVYQEVKGSMNDGRLRLSRQGIIFKNSKTGKVDNIQAGELTEGIWRRVALGHGLKLLTKNGHVYKYDGFRESEFEKLSDFFKTHYRLELMEKDLCVKGWNWGTVKFGGQLLSFDIGDQPVFEIPLSNVSQCTTGKNEVTLEFHQNDDAEVSLMEVRFYVPPTQEDGVDPVEAFAQNVLSKADVIQATGDAICIFRELQCLTPRGRYDIRIYPTFLHLHGKTFDYKIPYTTVLRLFLLPHKDQRQMFFVISLDPPIKQGQTRYHFLILLFSKDEDISLTLNMNEEEVEKRFEGRLTKNMSGSLYEMVSRVMKALVNRKITVPGNFQGHSGAQCITCSYKASSGLLYPLERGFIYVHKPPVHIRFDEISFVNFARGTTTTRSFDFEIETKQGTQYTFSSIEREEYGKLFDFVNAKKLNIKNRGLKEGMNPSYDEYADSDEDQHDAYLERMKEEGKIREENANDSSDDSGEETDESFNPGEEEEDVAEDLRHASLVR

SEQ ID NO: 757613 - protein, 238 aa, Homo sapiens
GCVLDFLDQLHFVHWLRLGQADRVNMCPFFRYGVSSSTASWSAAACTAPDITPPIGTSPTSWIFNVFFRSSLRSEISKRVRLAMSWTSCCILWSERTGPLRTITDLSKKAGEIWKGMSKEKKEEWDRKAEDARRDYEKAMKEYEGGRGESSKRDKSKKKKKVKVKMEKKSTPSRGSSSKSSSRQLSESFKSKEFVSSDESSSGENKSKKKRRRSEDSEEEELASTPPSSEDSASGSDE

SEQ ID NO: 757614 - protein, 213 aa, Homo sapiens
MAIVDQRRAKKLNIKNRGLKEGMNPSYDEYADSDEDQHDAYLERMKEEGKIREENANDSSDDSGEETDESFNPGEEEEDVAEEFDSNASASSSSNEGDSDRDEKKRKQLKKAKMAKDRKSRKKPVEVKKGKDPNAPKRPMSAYMLWLNASREKIKSDHPGISITDLSKKAGEIWKGMSKEKKEEWDRKAEDARRDYEKAMKEYEGGRGESSKR

SEQ ID NO: 757615 - protein, 221 aa, Homo sapiens
MAETLEFNDVYQEVKGSMNDGRLRLSRQGIIFKNSKTGKVDNIQAGELTEGIWRRVALGHGLKLLTKNGHVYKYDGFRESEFEKLSDFFKTHYRLELMEKDLCVKGWNWGTVKFGGQLLSFDIGDQPVFEIPLSNVSQCTTGKNEVTLEFHQNDDAEVSLMEVRFYVPPTQEDGVDPVEAFAQNVLSKADVIQATGDAICIFRELQCLTTPHPYFGTSFSS

SEQ ID NO: 757616 - protein, 73 aa, Homo sapiens
WTRFLPLSRQETGVPLEGSSVVTSPCFLCREEVEKRFEGRLTKNMSGSLYEMVSRVMKALVNRKITVPGNFQG

SEQ ID NO: 757617 - protein, 208 aa, Homo sapiens
ERGRSRLPALRWARMSGFLEELLGEKLVTGGGEEVDVHSLGARGISLLGLYFGCSLSAPCAQLSASLAAFYGRLRGDAAAGPGPGAGAGAAAEPEPRRRLEIVFVSSDQDQRQWQDFVRDMPWLALPYKEKHRKLKLWNKYRISNIPSLIFLDATTGKVVCRNGLLVIRDDPEGKTSARAYGPLITQPSLLHALRLISVPPVERVLVK

SEQ ID NO: 757618 - protein, 449 aa, Homo sapiens
ERGRSRLPALRWARMSGFLEELLGEKLVTGGGEEVDVHSLGARGISLLGLYFGCSLSAPCAQLSASLAAFYGRLRGDAAAGPGPGAGAGAAAEPEPRRRLEIVFVSSDQDQRQWQDFVRDMPWLALPYKEKHRKLKLWNKYRISNIPSLIFLDATTGKVVCRNGLLVIRDDPEGLEFPWGPKPFREVIAGPLLRNNGQSLESSSLEGSHVGVYFSAHWCPPCRSLTRVLVESYRKIKEAGQNFEIIFVSADRSEESFKQYFSEMPWLAVPYTDEARRSRLNRLYGIQGIPTLIMLDPQGEVITRQGRVEVLNDEDCREFPWHPKPVLELSDSNAAQLNEGPCLVLFVDSEDDGESEAAKQLIQPIAEKIIAKYKAKEEEAPLLFFVAGEDDMTDSLRDYTNLPEAAPLLTILDMSARAKYVMDVEEITPAIVEAFVNDFLAEKLKPEPI

SEQ ID NO: 757619 - protein, 186 aa, Homo sapiens
MPWLAVPYTDEARRSRLNRLYGIQGIPTLIMLDPQGEVITRQGRVEVLNDEDCREFPWHPKPVLELSDSNAAQLNEGPCLVLFVDSEDDGESEAAKQLIQPIAEKIIAKYKAKEEEAPLLFFVAGEDDMTDSLRDYTNLPEAAPLLTILDMSARAKYVMDVEEITPAIVEAFVNDFLAEKLKPEPI

SEQ ID NO: 757620 - protein, 449 aa, Homo sapiens; identical to SEQ ID NO: 757618

SEQ ID NO: 757621 - protein, 449 aa, Homo sapiens; identical to SEQ ID NO: 757618

SEQ ID NO: 757622 - protein, 122 aa, Homo sapiens
MTDSLRDYTNLPEAASSFLSDSEDDGESEAAKQLIQPIAEKIIAKYKAKEEEAPLLFFVAGEDDMTDSLRDYTNLPEAAPLLTILDMSARAKYVMDVEEITPAIVEAFVNDFLAEKLKPEPI

SEQ ID NO: 757623 - protein, 163 aa, Homo sapiens
HWEVGGRRSWLLILWLRETLAGASGPGLGEAQPPRRVCEEFNGKTVYLGEQSCSVRQVPPGEPGAGEHCELCCWDACAHTPMHAGSKTCIQGELHFRSGAAQAGVSAAQAPSAGAALFDKPVLFLPVFFSPDPITDSEDDGESEAAKQLIQPIAEKIIAKYKA

SEQ ID NO: 757624 - protein, 343 aa, Homo sapiens
HRNRATVTVPLHRNRAMADVSLHRNPATLKLWNKYRISNIPSLIFLDATTGKVVCRNGLLVIRDDPEGLEFPWGPKPFREVIAGPLLRNNGQSLESSSLEGSHVGVYFSAHWCPPCRSLTRVLVESYRKIKEAGQNFEIIFVSADRSEESFKQYFSEMPWLAVPYTDEARRSRLNRLYGIQGIPTLIMLDPQGEVITRQGRVEVLNDEDCREFPWHPKPVLELSDSNAAQLNEGPCLVLFVDSEDDGESEAAKQLIQPIAEKIIAKYKAKEEEAPLLFFVAGEDDMTDSLRDYTNLPEAAPLLTILDMSARAKYVMDVEEITPAIVEAFVNDFLAEKLKPEPI

SEQ ID NO: 757625 - protein, 122 aa, Homo sapiens
MTQKVWSSPGDRNPSGKSLQGPCLETMGSLWRAAAWRGLTWASISPHIGVRPAEASPGSWWNPTGRSRRQARTSRSSSLVQTGRRSPSNSTSVRCPGSPSPTRMRPGGRASTGCTESKVLRP

SEQ ID NO: 757626 - protein, 343 aa, Homo sapiens; identical to SEQ ID NO: 757624

SEQ ID NO: 757627 - protein, 322 aa, Homo sapiens
MQELRNSLKLWNKYRISNIPSLIFLDATTGKVVCRNGLLVIRDDPEGLEFPWGPKPFREVIAGPLLRNNGQSLESSSLEGSHVGVYFSAHWCPPCRSLTRVLVESYRKIKEAGQNFEIIFVSADRSEESFKQYFSEMPWLAVPYTDEARRSRLNRLYGIQGIPTLIMLDPQGEVITRQGRVEVLNDEDCREFPWHPKPVLELSDSNAAQLNEGPCLVLFVDSEDDGESEAAKQLIQPIAEKIIAKYKAKEEEAPLLFFVAGEDDMTDSLRDYTNLPEAAPLLTILDMSARAKYVMDVEEITPAIVEAFVNDFLAEKLKPEPI

SEQ ID NO: 757628 - protein, 449 aa, Homo sapiens; identical to SEQ ID NO: 757618

SEQ ID NO: 757629 - protein, 449 aa, Homo sapiens; identical to SEQ ID NO: 757618

SEQ ID NO: 757630 - protein, 900 aa, Homo sapiens
MGDSGSRRSTLVSRLPIFRRSINRRHDSLPSSPSSSNTVGVHSSSPSSTNSSSGSTGKRRSIFRTPSISFHHKKGSEPKQEPTNQNLSISNGAQPGHSNMQKLSLEEHIKTRGRHSVGFSSSRNKKITRSLTEDFEREKEHSTNKNVFINCLSSGKSEGDDSGFTEDQTRRSVKQSTRKLLPKSFSSHYKFSKPVLQSQSISLVQQSEFSLEVTQYQEREPVLVRASPSCSVDVTERAGSSLQSPLLSADLTTAQTPSEFLALTEDSVSEMDAFSKSGSMASHCDNFGHNDSTSQMSLNSAAVTKTTTELTGTVPCAIMSPGKYRLEGQCSTESNSLPETSAANQKEVLLQIAELPATSVSHSESNLPADSEREENIGLQNGETMLGTNSPRKLGFYEQHKAIAEHVKGIHPISDSKIIPTSGDHHIFNKTSHGYEANPAKVLASSLSPFREGRFIERRLRSSSEGTAGSSRMILKPKDGNIEEVNSLRKQRAGSSSSKMNSLDVLNNLGSCELDEDDLMLDLEFLEEQSLHPSVCREDSYHSVVSCAAVVLTPMEPMIEMKKREEPEFPEPSKQNLSLKLTKDVDQEARCSHISRMPNSPSADWPLQGVEENGGIDSLPFRLMLQDCTAVKTLLLKMKRVLQESADMSPASSTTSLPVSPLTEEPVPFKDIMKDECSMLKLQLKEKDELISQLQEELGKVRHLQKAFASRVDKSTQTELLCYDGLNLKRLETVQGGREATYRNRIVSQNLSTRDRKAIHTPTEDRFRYSAADQTSPYKNKTCQLPSLCLSNFLKDKELAEVIKHSRGTYETLTSDVTQNLRATVGQSSLKPTAKTEGLSTFLEKPKDQVATARQHSTFTGRFGQPPRGPISLHMYSRKNVFLHHNLHSTELQTLGQQDG

SEQ ID NO: 757631 - protein, 248 aa, Homo sapiens
NFKDVDQEARCSHISRMPNSPSADWPLQGVEENGGIDSLPFRLMLQDCTAVKTLLLKMKKFFKRNLSLKLTKDVDQEARCSHISRMPNSPSADWPLQGVEENGGIDSLPFRLMLQDCTAVKTLLLKMKRVLQESADMSPASSTTSLPVSPLTEEPVPFKDIMKDECSMLKLQLKEKDELISQLQEELGKVRHLQKAFASRVDKSTQTELLCYDPLGILPALNGYPRPFLLARSVPAPPVNKTFLAPPR

SEQ ID NO: 757632 - protein, 607 aa, Homo sapiens
MGDSGSRRSTLVSRLPIFRRSINRRHDSLPSSPSSSNTVGVHSSSPSSTNSSSGSTGKRRSIFRTPSISFHHKKGSEPKQEPTNQNLSISNGAQPGHSNMQKLSLEEHIKTRGRHSVGFSSSRNKKITRSLTEDFEREKEHSTNKNVFINCLSSGKSEGDDSGFTEDQTRRSVKQSTRKLLPKSFSSHYKFSKPVLQSQSISLVQQSEFSLEVTQYQEREPVLVRASPSCSVDVTERAGSSLQSPLLSADLTTAQTPSEFLALTEDSVSEMDAFSKSGSMASHCDNFGHNDSTSQMSLNSAAVTKTTTELTGTVPCAIMSPGKYRLEGQCSTESNSLPETSAANQKEVLLQIAELPATSVSHSESNLPADSEREENIGLQNGETMLGTNSPRKLGFYEQHKAIAEHVKGIHPISDSKIIPTSGDHHIFNKTSHGYEANPAKVLASSLSPFREGRFIERRLRSSSEGTAGSSRMILKPKDGNIEEVNSLRKQRAGSSSSKMNSLDVLNNLGSCELDEDDLMLDLEFLEEQSLHPSELPQEHTRKAKRIHRPLKELDHRHRLPEMAKNFCREDSYHSVVSCAAVVLTPMEPMIEMKKREEPEFPEPSKQ

SEQ ID NO: 757633 - protein, 779 aa, Homo sapiens
MGDSGSRRSTLVSRLPIFRRSINRRHDSLPSSPSSSNTVGVHSSSPSSTNSSSGSTGKRRSIFRTPSISFHHKKGSEPKQEPTNQNLSISNGAQPGHSNMQKLSLEEHIKTRGRHSVGFSSSRNKKITRSLTEDFEREKEHSTNKNVFINCLSSGKSEGDDSGFTEDQTRRSVKQSTRKLLPKSFSSHYKFSKPVLQSQSISLVQQSEFSLEVTQYQEREPVLVRASPSCSVDVTERAGSSLQSPLLSADLTTAQTPSEFLALTEDSVSEMDAFSKSGSMASHCDNFGHNDSTSQMSLNSAAVTKTTTELTGTVPCAIMSPGKYRLEGQCSTESNSLPETSAANQKEVLLQIAELPATSVSHSESNLPADSEREENIGLQNGETMLGTNSPRKLGFYEQHKAIAEHVKGIHPISDSKIIPTSGDHHIFNKTSHGYEANPAKVLASSLSPFREGRFIERRLRSSSEGTAGSSRMILKPKDGNIEEVNSLRKQRAGSSSSKMNSLDVLNNLGSCELDEDDLMLDLEFLEEQSLHPSELPQEHTRKAKRIHRPLKELDHRHRLPEMAKNFCREDSYHSVVSCAAVVLTPMEPMIEMKKREEPEFPEPSKQNLSLKLTKDVDQEARCSHISRMPNSPSADWPLQGVEENGGIDSLPFRLMLQDCTAVKTLLLKMKRVLQESADMSPASSTTSLPVSPLTEEPVPFKDIMKDECSMLKLQLKEKDELISQLQEELLPKILCSMRGGFICLAVFLEDSTDVFSDMHAPIKGKSPAFTEGFCFKSR

SEQ ID NO: 757634 - protein, 185 aa, Homo sapiens
MGKRTESVEGLNLKRLETVQGGREATYRNRIVSQNLSTRDRKAIHTPTEDRFRYSAADQTSPYKNKTCQLPSLCLSNFLKDKELAEVIKHSRGTYETLTSDVTQNLRATVGQSSLKPTAKTEGLSTFLEKPKDQVATARQHSTFTGRFGQPPRGPISLHMYSRKNVFLHHNLHSTELQTLGQQDG

SEQ ID NO: 757635 - protein, 35 aa, Homo sapiens
MAPFMGLQDQSQLLKKSSSVLAPQVSHKRPGKSHG

SEQ ID NO: 757636 - protein, 861 aa, Homo sapiens
MEALGPGPPASLFQPPRRPGLGTVGKPIRLLANHFQVQIPKIDVYHYDVDIKPEKRPRRVNREVVDTMVRHFKMQIFGDRQPGYDGKRNMYTAHPLPIGRDRVDMEVTLPGEGKDQTFKVSVQWVSVVSLQLLLEALAGHLNEVPDDSVQALDVITRHLPSMRYTPVGRSFFSPPEGYYHPLGGGREVWFGFHQSVRPAMWNMMLNIDVSATAFYRAQPIIEFMCEVLDIQNINEQTKPLTDSQRVKFTKEIRGLKVEVTHCGQMKRKYRVCNVTRRPASHQTFPLQLENGQAMECTVAQYFKQKYSLQLKYPHLPCLQVGQEQKHTYLPLEVCNIVAGQRCIKKLTDNQTSTMIKATARSAPDRQEEISRLVKSNSMVGGPDPYLKEFGIVVHNEMTELTGRVLPAPMLQYGGRNKTVATPNQGVWDMRGKQFYAGIEIKVWAVACFAPQKQCREDLLKSFTDQLRKISKDAGMPIQGQPCFCKYAQGADSVEPMFKHLKMTYVGLQLIVVILPGKTPVYAEVKRVGDTLLGMATQCVQVKNVVKTSPQTLSNLCLKINAKLGGINNVLVPHQRPSVFQQPVIFLGADVTHPPAGDGKKPSIAAVVGSMDGHPSRYCATVRVQTSRQEISQELLYSQEVIQDLTNMVRELLIQFYKSTRFKPTRIIYYRGGVSEGQMKQVAWPELIAIRKACISLEEDYRPGITYIVVQKRHHTRLFCADKTERVGKSGNVPAGTTVDSTITHPSEFDFYLCSHAGIQGTSRPSHYQVLWDDNCFTADELQLLTYQLCHTYVRCTRSVSIPAPAYYARLVAFRARYHLVDKDHDSAEGSHVSGQSNGRDPQALAKAVQIHHDTQHTMYFA

SEQ ID NO: 757637 - protein, 861 aa, Homo sapiens; identical to SEQ ID NO: 757636

SEQ ID NO: 757638 - protein, 986 aa, Homo sapiens
MEALGPGPPASLFQPPRRPGLGTVGKPIRLLANHFQVQIPKIDVYHYDVDIKPEKRPRRVNREVVDTMVRHFKMQIFGDRQPGYDGKRNMYTAHPLPIGRDRVDMEVTLPGEGKDQTFKVSVQWVSVVSLQLLLEALAGHLNEVPDDSVQALDVITRHLPSMRYTPVGRSFFSPPEGYYHPLGGGREVWFGFHQSVRPAMWNMMLNIDVSATAFYRAQPIIEFMCEVLDIQNINEQTKPLTDSQRVKFTKEIRGLKVEVTHCGQMKRKYRVCNVTRRPASHQTFPLQLENGQAMECTVAQYFKQKYSLQLKYPHLPCLQVGQEQKHTYLPLEVCNIVAGQRCIKKLTDNQTSTMIKATARSAPDRQEEISRLVSKAWSSRCASFEMTKNKRIENSSWDTVTLWFLYMQAFLFFEVKSNSMVGGPDPYLKEFGIVVHNEMTELTGRVLPAPMLQYGGRVSFLFYSASFFHNSQKENNPGFLYSATAEFTHSFVHYCLLCSGSYLIEFVYSLVNSKMALDCNVFSLFFCFFFFFFFFFFFSKNKTVATPNQGVWDMRGKQFYAGIEIKVWAVACFAPQKQCREDLLKSFTDQLRKISKDAGMPIQGQPCFCKYAQGADSVEPMFKHLKMTYVGLQLIVVILPGKTPVYAEVKRVGDTLLGMATQCVQVKNVVKTSPQTLSNLCLKINAKLGGINNVLVPHQRPSVFQQPVIFLGADVTHPPAGDGKKPSIAAVVGSMDGHPSRYCATVRVQTSRQEISQELLYSQEVIQDLTNMVRELLIQFYKSTRFKPTRIIYYRGGVSEGQMKQVAWPELIAIRKACISLEEDYRPGITYIVVQKRHHTRLFCADKTERVGKSGNVPAGTTVDSTITHPSEFDFYLCSHAGIQGTSRPSHYQVLWDDNCFTADELQLLTYQLCHTYVRCTRSVSIPAPAYYARLVAFRARYHLVDKDHDSAEGSHVSGQSNGRDPQALAKAVQIHHDTQHTMYFA

SEQ ID NO: 757639 - protein, 851 aa, Homo sapiens
MEALGPGPPASLFQPPRRPGLGTVGKPIRLLANHFQVQIPKIDVYHYDVDIKPEKRPRRVNREVVDTMVRHFKMQIFGDRQPGYDGKRNMYTAHPLPIGRDRVDMEVTLPGEGKDQTFKVSVQWVSVVSLQLLLEALAGHLNEVPDDSVQALDVITRHLPSMRYTPVGRSFFSPPEGYYHPLGGGREVWFGFHQSVRPAMWNMMLNIDVSATAFYRAQPIIEFMCEVLDIQNINEQTKPLTDSQRVKFTKEIRGLKVEVTHCGQMKRKYRVCNVTRRPASHQTFPLQLENGQAMECTVAQYFKQKYSLQLKYPHLPCLQVGQEQKHTYLPLEVCNIVAGQRCIKKLTDNQTSTMIKATARSAPDRQEEISRLVSKAWSSRCASFEMTKNKRIENSSWDTVTLWFLYMQAFLFFEVKSNSMVGGPDPYLKEFGIVVHNEMTELTGRVLPAPMLQYGGRVSFLFYSASFFHNSQKENNPGFLYSATAEFTHSFVHYCLLCSGSYLIEFVYSLVNSKMALDCNVFSLFFCFFFFFFFFFFFSKNKTVATPNQGVWDMRGKQFYAGIEIKVWAVACFAPQKQCREDLLKSFTDQLRKISKDAGMPIQGQPCFCKYAQGADSVEPMFKHLKMTYVGLQLIVVILPGKTPVYAEVKRVGDTLLGMATQCVQVKNVVKTSPQTLSNLCLKINAKLGGINNVLVPHQRPSVFQQPVIFLGADVTHPPAGDGKKPSIAAVVGSMDGHPSRYCATVRVQTSRQEISQELLYSQEVIQDLTNMVRELLIQFYKSTRFKPTRIIYYRGGVSEGQMKQVAWPELIAIRKACISLEEDYRPGITYIVVQKRHHTRLFCADKTERI

SEQ ID NO: 757640 - protein, 398 aa, Homo sapiens
MVLSTVVPAGTCHFSLPFLFYLHRRVVCDVFFAPQYKLFLAGNLHPKLIHASRIDISSGQDTSDICPLLGMATQCVQVKNVVKTSPQTLSNLCLKINAKLGGINNVLVPHQRPSVFQQPVIFLGADVTHPPAGDGKKPSIAAVVGSMDGHPSRYCATVRVQTSRQEISQELLYSQEVIQDLTNMVRELLIQFYKSTRFKPTRIIYYRGGVSEGQMKQVAWPELIAIRKACISLEEDYRPGITYIVVQKRHHTRLFCADKTERVGKSGNVPAGTTVDSTITHPSEFDFYLCSHAGIQGTSRPSHYQVLWDDNCFTADELQLLTYQLCHTYVRCTRSVSIPAPAYYARLVAFRARYHLVDKDHDSAEGSHVSGQSNGRDPQALAKAVQIHHDTQHTMYFA

SEQ ID NO: 757641 - protein, 986 aa, Homo sapiens; identical to SEQ ID NO: 757638

SEQ ID NO: 757642 - protein, 986 aa, Homo sapiens; identical to SEQ ID NO: 757638

SEQ ID NO: 757643 - protein, 986 aa, Homo sapiens; identical to SEQ ID NO: 757638

SEQ ID NO: 757644 - protein, 986 aa, Homo sapiens; identical to SEQ ID NO: 757638

SEQ ID NO: 757645 - protein, 986 aa, Homo sapiens; identical to SEQ ID NO: 757638

SEQ ID NO: 757646 - protein, 986 aa, Homo sapiens; identical to SEQ ID NO: 757638

SEQ ID NO: 757647 - protein, 81 aa, Homo sapiens
KLNKQDEFGALESVKAASELFSPLSGEVPEINEALAENPGLVNKSCYEDGWLIKMTLSNPSELDELMSEEAYEKYIKSIEE

SEQ ID NO: 757648 - protein, 81 aa, Homo sapiens; identical to SEQ ID NO: 757647

SEQ ID NO: 757649 - protein, 491 aa, Homo sapiens
CEGKAGGICSATGYWKAAFCLTDVHKMPYFTRLILFLFCLMVLVESRKPKRKRWTGQVEMPKPSHLYKKNLDVTKIRKGKPQQLLRVDEHDFSMRPAFGGPAIPVGVDVQVESLDSISEVDMDFTMTLYLRHYWKDERLAFSSASNKSMTFDGRLVKKIWVPDVFFVHSKRSFTHDTTTDNIMLRVFPDGHVLYSMRITVTAMCNMDFSHFPLDSQTCSLELESYAYTDEDLMLHWKNGDESLKTDEKISLSQFLIQKFHTTSRLAFYSSTGWYNRLYINFTLRRHIFFFLLQTYFPATLMVMLSWVSFWIDRRAVPARVSLGITTVLTMTTIITGVNASMPRVSYVKAVDIYLWVSFVFVFLSVLEYAAVNYLTTVQERKERKLREKFPCMCGMLHSKTMMLDGSYSESEANSLAGYPRSHILTEEERQDKIVVHLGLSGEANAARKKGLLKGQTGFRIFQNTHAIDKYSRLIFPASYIFFNLIYWSVFS

SEQ ID NO: 757650 - protein, 106 aa, Homo sapiens
MAHVCTSREEDRRPSSHVSPGRSHGPCLHIQGGGQKAQLTCESWQKPWPMSAHPGRRTEGPAQWPPPPTPHARTAGAEQPSFEVCPSPHLSLVLGPSPTPGLGSLS

SEQ ID NO: 757651 - protein, 635 aa, Homo sapiens
MTTWSLRRRPARTLGLLLLVVLGFLVLRRLDWSTLVPLRLRHRQLGLQAKGWNFMLEDSTFWIFGGSIHYFRVPREYWRDRLLKMKACGLNTLTTYVPWNLHEPERGKFDFSGNLDLEAFVLMAAEIGLWVILRPGPYICSEMDLGGLPSWLLQDPGMRLRTTYKGFTEAVDLYFDHLMSRVVPLQYKRGGPIIAVQVENEYGSYNKDPAYMPYVKKALEDRGIVELLLTSDNKDGLSKGIVQGVLATINLQSTHELQLLTTFLFNVQGTQPKMVMEYWTGWFDSWGGPHNILDSSEVLKTVSAIVDAGSSINLYMFHGGTNFGFMNGAMHFHDYKSDVTSYDYDAVLTEAGDYTAKYMKLRDFFGSISGIPLPPPPDLLPKMPYEPLTPVLYLSLWDALKYLGEPIKSEKPINMENLPVNGGNGQSFGYILYETSITSSGILSGHVHDRGQVFVNTVSIGFLDYKTTKIAVPLIQGYTVLRILVENRGRVNYGENIDDQRKGLIGNLYLNDSPLKNFRIYSLDMKKSFFQRFGLDKWSSLPETPTLPAFFLGSLSISSTPCDTFLKLEGWEKGVVFINGQNLGRYWNIGPQKTLYLPGPWLSSGINQVIVFEETMAGPALQFHGNPPPGQEPVH

SEQ ID NO: 757652 - protein, 141 aa, Homo sapiens
MTTWSLRRRPARTLGLLLLVVLGFLVLRRLDWSTLVPLRLRHRQLGLQAKGWNFMLEDSTFWIFGGSIHYFRVPREYWRDRLLKMKACGLNTLTTYVPWNLHEPGPWLSSGINQVIVFEETMAGPALQFHGNPPPGQEPVH

SEQ ID NO: 757653 - protein, 584 aa, Homo sapiens
MTTWSLRRRPARTLGLLLLVVLGFLVLRRLDWSTLVPLRLRHRQLGLQAKGWNFMLEDSTFWIFGGSIHYFRVPREYWRDRLLKMKACGLNTLTTYVPWNLHEPERGKFDFSGNLDLEAFVLMAAEIGLWVILRPGPYICSEMDLGGLPSWLLQDPGMRLRTTYKGFTEAVDLYFDHLMSRVVPLQYKRGGPIIAVQVENEYGSYNKDPAYMPYVKKALEDRGIVELLLTSDNKDGLSKGIVQGVLATINLQSTHELQLLTTFLFNVQGTQPKMVMEYWTGWFDSWGGPHNILDSSEVLKTVSAIVDAGSSINLYMFHGGTNFGFMNGAMHFHDYKSDVTSYDYDAVLTEAGDYTAKYMKLRDFFGSISGIPLPPPPDLLPKMPYEPLTPVLYLSLWDALKYLGEPIKSEKPINMENLPVNGGNGQSFGYILYETSITSSGILSGHVHDRGQVFVNTVSIGFLDYKTTKIAVPLIQGYTVLRILVENRGRVNYGENIDDQRKGLIGNLYLNDSPLKNFRIYSLDMKKSFFQRFGLDKWSSLPETPTLPAFFLGSLSISSTPLCPSPHLSLVLGPSPTPGLGSLS

SEQ ID NO: 757654 - protein, 410 aa, Homo sapiens
MTTWSLRRRPARTLGLLLLVVLGFLVLRRLDWSTLVPLRLRHRQLGLQAKGWNFMLEDSTFWIFGGSIHYFRVPREYWRDRLLKMKACGLNTLTTYVPWNLHEPERGKFDFSGNLDLEAFVLMAAEIGLWVILRPGPYICSEMDLGGLPSWLLQDPGMRLRTTYKGFTEAVDLYFDHLMSRVVPLQYKRGGPIIAVQVENEYGSYNKDPAYMPYVKKALEDRGIVELLLTSDNKDGLSKGIVQGVLATINLQSTHELQLLTTFLFNVQGTQPKMVMEYWTGWFDSWGGPHNILDSSEVLKTVSAIVDAGSSINLYMFHGGTNFGFMNGAMHFHDYKSDVTSYDYDAVLTEAGDYTAKYMKLRDFFGSISGTQQTADSSSNSGPRFCSQTPKELLPYCPTSTPVDLRARIS

SEQ ID NO: 757655 - protein, 635 aa, Homo sapiens; identical to SEQ ID NO: 757651

SEQ ID NO: 757656 - protein, 635 aa, Homo sapiens; identical to SEQ ID NO: 757651

SEQ ID NO: 757657 - protein, 635 aa, Homo sapiens; identical to SEQ ID NO: 757651

SEQ ID NO: 757658 - protein, 113 aa, Homo sapiens
MAQKCLASPMAEMKTCGPSKLLPVLLCYMCCAGDRNDHDRARCLADYDAVLTEAGDYTAKYMKLRDFFGSISGTQQTADSSSNSGPRFCSQTPKELLPYCPTSTPVDLRARIS

SEQ ID NO: 757659 - protein, 397 aa, Homo sapiens
MGLLLPLALCILVLCCGAMSPPQLALNPSALLSRGCNDSDVLAVAGFALRDINKDRKDGYVLRLNRVNDAQEYRRGGLGSLFYLTLDVLETDCHVLRKKAWQDCGMRIFFESVYGQCKAIFYMNNPSRVLYLAAYNCTLRPVSKKKIYMTCPDCPSSIPTDSSNHQVLEAATESLAKYNNENTSKQYSLFKVTRASSQWVVGPSYFVEYLIKESPCTKSQASSCSLQSSDSVPVGLCKGSLTRTHWEKFVSVTCDFFESQAPATGSENSAVNQKPTNLPKVEESQQKNTPPTDSPSKAGPRGSVQYLPDLDDKNSQEKGPQEAFPVHLGPNHESPGRNPGYFLPLPGAYGGEAGCPAFPPEKKHALLSAQGQPRMPALLSFRHENHTESSVGVWCAA

SEQ ID NO: 757660 - protein, 375 aa, Homo sapiens
MGLLLPLALCILVLCCGAMSPPQLALNPSALLSRGCNDSDVLAVAGFALRDINKDRKDGYVLRLNRVNDAQEYRRGGLGSLFYLTLDVLETDCHVLRKKAWQDCGMRIFFESVYGQCKAIFYMNNPSRVLYLAAYNCTLRPDHQVLEAATESLAKYNNENTSKQYSLFKVTRASSQWVVGPSYFVEYLIKESPCTKSQASSCSLQSSDSVPVGLCKGSLTRTHWEKFVSVTCDFFESQAPATGSENSAVNQKPTNLPKVEESQQKNTPPTDSPSKAGPRGSVQYLPDLDDKNSQEKGPQEAFPVHLGPNHESPGRNPGYFLPLPGAYGGEAGCPAFPPEKKHALLSAQGQPRMPALLSFRHENHTESSVGVWCAA

SEQ ID NO: 757661 - protein, 302 aa, Homo sapiens
  misc_feature (3)..(3): Xaa can be any naturally occurring amino acid
EEXLGDQAEGALLPFWEECEWLPFAARSIVLSNCKLIRLVVIIDFALSKKKIYMTCPDCPSSIPTDSSNHQVLEAATESLAKYNNENTSKQYSLFKVTRASSQWVVGPSYFVEYLIKESPCTKSQASSCSLQSSDSVPVGLCKGSLTRTHWEKFVSVTCDFFESQAPATGSENSAVNQKPTNLPKVEESQQKNTPPTDSPSKAGPRGSVQYLPDLDDKNSQEKGPQEAFPVHLGPNHESPGRNPGYFLPLPGAYGGEAGCPAFPPEKKHALLSAQGQPRMPALLSFRHENHTESSVGVWCAA

SEQ ID NO: 757662 - protein, 313 aa, Homo sapiens
MGLLLPLALCILVLCCGAMSPPQLALNPSALLSRGCNDSDVLAVAGFALRDINKDRKDGYVLRLNRVNDAQEYRRGGLGSLFYLTLDVLETDCHVLRKKAWQDCGMRIFFESVYGQCKAIFYMNNPSRVLYLAAYNCTLRPVSKKKIYMTCPDCPSSIPTDSSNHQVLEAATESLAKYNNENTSKQYSLFKVTRASSQWVVGPSYFVEYLIKESPCTKSQASSCSLQSSDSVPVGLCKGSLTRTHWEKFVSVTCDFFESQAPATGSENSAVNQKPTNLPKVEESQQKNTPPTDSPSFRHENHTESSVGVWCAA

SEQ ID NO: 757663 - protein, 249 aa, Homo sapiens
MTCPDCPSSIPTDSSNHQVLEAATESLAKYNNENTSKQYSLFKVTRASSQWVVGPSYFVEYLIKESPCTKSQASSCSLQSSDSVPVGLCKGSLTRTHWEKFVSVTCDFFESQAPATGSENSAVNQKPTNLPKVEESQQKNTPPTDSPSKAGPRGSVQYLPDLDDKNSQEKGPQEAFPVHLGPNHESPGRNPGYFLPLPGAYGGEAGCPAFPPEKKHALLSAQGQPRMPALLSFRHENHTESSVGVWCAA

SEQ ID NO: 757664 - protein, 249 aa, Homo sapiens; identical to SEQ ID NO: 757663

SEQ ID NO: 757665 - protein, 209 aa, Homo sapiens
MSCKYGYFLNEETNSCVTHCPDGSYQDTKKNLCRKCSENCKTCTEFHNCTECRDGLSLQGSRCSVSCEDGRYFNGQDCQPCHRFCATCAGAGADGCINCTEGYFMEDGRCVQSCSISYYFDHSSENGYKSCKKCDISCLTCNGPGFKNCTSCPSGYLLDLGMCQMGAICKDATEESWAEGGFCMLVKKNNLCQRKVLQQLCCKTCTFQG

SEQ ID NO: 757666 - protein, 882 aa, Homo sapiens
MGWGSRCCCPGRLDLLCVLALLGGCLLPVCRTRVYTNHWAVKIAGGFPEANRIASKYGFINIGQIGALKDYYHFYHSRTIKRSVISSRGTHSFISMEPKVEWIQQQVVKKRTKRDYDFSRAQSTYFNDPKWPSMWYMHCSDNTHPCQSDMNIEGAWKRGYTGKNIVVTILDDGIERTHPDLMQNYDALASCDVNGNDLDPMPRYDASNENKHGTRCAGEVAAAANNSHCTVGIAFNAKIGGVRMLDGDVTDMVEAKSVSFNPQHVHIYSASWGPDDDGKTVDGPAPLTRQAFENGVRMGRRGLGSVFVWASGNGGRSKDHCSCDGYTNSIYTISISSTAESGKKPWYLEECSSTLATTYSSGESYDKKIITTDLRQRCTDNHTGTSASAPMAAGIIALALEANPFLTWRDVQHVIVRTSRAGHLNANDWKTNAAGFKVSHLYGFGLMDAEAMVMEAEKWTTVPRQHVCVESTDRQIKTIRPNSAVRSIYKASGCSDNPNRHVNYLEHVVVRITITHPRRGDLAIYLTSPSGTRSQLLANRLFDHSMEGFKNWEFMTIHCWGERAAGDWVLEVYDTPSQLRNFKTPGKLKEWSLVLYGTSVQPYSPTNEFPKVERFRYSRVEDPTDDYGTEDYAGPCDPECSEVGCDGPGPDHCNDCLHYYYKLKNNTRICVSSCPPGHYHADKKRCRKCAPNCESCFGSHGDQCMSCKYGYFLNEETNSCVTHCPDGSYQDTKKNLCRKCSENCKTCTEFHNCTECRDGLSLQGSRCSVSCEDGRYFNGQDCQPCHRFCATCAGAGADGCINCTEGYFMEDGRCVQSCSISYYFDHSSENGYKSCKKCDISCLTCNGPGFKNCTSCPSGYLLDLGMCQMGAICKDVSLFRGA

SEQ ID NO: 757667 - protein, 913 aa, Homo sapiens
MGWGSRCCCPGRLDLLCVLALLGGCLLPVCRTRVYTNHWAVKIAGGFPEANRIASKYGFINIGQIGALKDYYHFYHSRTIKRSVISSRGTHSFISMEPKVEWIQQQVVKKRTKRDYDFSRAQSTYFNDPKWPSMWYMHCSDNTHPCQSDMNIEGAWKRGYTGKNIVVTILDDGIERTHPDLMQNYDALASCDVNGNDLDPMPRYDASNENKHGTRCAGEVAAAANNSHCTVGIAFNAKIGGVRMLDGDVTDMVEAKSVSFNPQHVHIYSASWGPDDDGKTVDGPAPLTRQAFENGVRMGRRGLGSVFVWASGNGGRSKDHCSCDGYTNSIYTISISSTAESGKKPWYLEECSSTLATTYSSGESYDKKIITTDLRQRCTDNHTGTSASAPMAAGIIALALEANPFLTWRDVQHVIVRTSRAGHLNANDWKTNAAGFKVSHLYGFGLMDAEAMVMEAEKWTTVPRQHVCVESTDRQIKTIRPNSAVRSIYKASGCSDNPNRHVNYLEHVVVRITITHPRRGDLAIYLTSPSGTRSQLLANRLFDHSMEGFKNWEFMTIHCWGERAAGDWVLEVYDTPSQLRNFKTPGKLKEWSLVLYGTSVQPYSPTNEFPKVERFRYSRVEDPTDDYGTEDYAGPCDPECSEVGCDGPGPDHCNDCLHYYYKLKNNTRICVSSCPPGHYHADKKRCRKCAPNCESCFGSHGDQCMSCKYGYFLNEETNSCVTHCPDGSYQDTKKNLCRKCSENCKTCTEFHNCTECRDGLSLQGSRCSVSCEDGRYFNGQDCQPCHRFCATCAGAGADGCINCTEGYFMEDGRCVQSCSISYYFDHSSENGYKSCKKCDISCLTCNGPGFKNCTSCPSGYLLDLGMCQMGAICKDATEESWAEGGFCMLVKKNNLCQRKVLQQLCCKTCTFQG

SEQ ID NO: 757668 - protein, 157 aa, Homo sapiens
AAATERKAKVLWRMWLQSLLLLGTVACSISAPARSPSPSTQPWEHVNAIQEARRLLNLSRDTAAEMNETVEVISEMFDLQEPTCLQTRLELYKQGLRGSLTKLKGPLTMMASHYKQHCPPTPETSCATQIITFESFKENLKDFLLVIPFDCWEPVQE

SEQ ID NO: 757669 - protein, 270 aa, Homo sapiens
MHGSCSFLMLLLPLLLLLVATTGPVGALTDEEKRLMVELHNLYRAQVSPTASDMLHMRWDEELAAFAKAYARQCVWGHNKERGRRGENLFAITDEGMDVPLAMEEWHHEREHYNLSAATCSPGQMCGHYTQVVWAKTERIGCGSHFCEKLQGVEETNIELLVCNYEPPGNVKGKRPYQEGTPCSQCPSGYHCKNSLCEPIGSPEDAQDLPYLVTEAPSFRATEASDSRKMGAEGPDKPSVVSGLNSGPGHVWGPLLGLLLLPPLVLAGIF

SEQ ID NO: 757670 - protein, 133 aa, Homo sapiens
MCPLSGCPVAISFSPDRGSQASQEPPGPSQSPGLFLEPSESRTVPQKCLLPSQGEEVSCPPVIFPTLSPAPKQDTSWLRPSGRERLRGMCLITPSILEAQGLAGCELRRPPEDCTPGPHLSCPSLLSPGGGRI

SEQ ID NO: 757671 - protein, 369 aa, Homo sapiens
MHGSCSFLMLLLPLLLLLVATTGPVGALTDEEKRLMVELHNLYRAQVSPTASDMLHMRWDEELAAFAKAYARQCVWGHNKERGRRGENLFAITDEGMDVPLAMEEWHHEREHYNLSAATCSPGQMCGHYTQVVWAKTERIGCGSHFCEKLQGVEETNIELLVCNYEPPGNVKGKRPYQEGTPCSQCPSGYHCKNSLCEPIGSPEDAQDLPYLVTEAPSFRATEASDSRKMGTPSSLATGIPAFLVTEVSGSLATKALPAVETQAPTSLATKDPPSMATEAPPCVTTEVPSILAAHSLPSLDEEPVTFPKSTHVPIPKSADKVTDKTKVPSRSPENSLDPKMSLTGARELLPHAQEEAEAEAELPPSSEV

SEQ ID NO: 757672 - protein, 270 aa, Homo sapiens; identical to SEQ ID NO: 757669

SEQ ID NO: 757673 - protein, 270 aa, Homo sapiens; identical to SEQ ID NO: 757669

SEQ ID NO: 757674 - protein, 428 aa, Homo sapiens
MTVGEYRHLANSKKYQTPPHQNFEDLERKYWKNRIYNSPIYGADISGSLFDENTKQWNLGHLGTIQDLLEKECGVVIEGVNTPYLYFGMWKTTFAWHTEDMDLYSINYLHLGEPKTWYVVPPEHGQRLERLARELFPGSSRGCGAFLRHKVALISPTVLKENGIPFNRITQEAGEFMVTFPYGYHAGFNHGFNCAEAINFATPRWIDYGKMASQCSCGEARVTFSMDAFVRILQPERYDLWKRGQDRAVVDHMEPRVPASQELSTQKEVQLPRRAALGLRQLPSHWARHSPWPMAARSGTRCHTLVCSSLPRRSAVSGTATQPRAAAVHSSKKPSSTPSSTPGPSAQIIHPSNGRRGRGRPPQKLRAQELTLQTPAKRPLLAGTTCTASGPEPEPLPEDGALMDKPVPLSPGLQHPVKASGCSWAPVP

SEQ ID NO: 757675 - protein, 2142 aa, Homo sapiens
MSDRSGPTAKGKDGKKYSSLNLFDTYKGKSLEIQKPACCPSPWPAESRESCHCPAYRPPANLPSLKAENKGNDPNVSLVPKDGTGWASKQEQSDPKSSDASTAQPPESQPLPASQTPASNQPKRPPAAPENTPLVPSGVKSWAQASVTHGAHGDGGRASSLLSRFSREEFPTLQAAGDQDKAAKERESAEQSSGPGPSLRPQNSTTWRDGGGRGPDELEGPDSKLHHGHDPRGGLQPSGPPQFPPYRGMMPPFMYPPYLPFPPPYGPQGPYRYPTPDGPSRFPRVAGPRGSGPPMRLVEPVGRPSILKEDNLKEFDQLDQENDDGWAGAHEEVDYTEKLKFSDEEDGRDSDEEGAEGHRDSQSASGEERPPEADGKKGNSPNSEPPTPKTAWAETSRPPETEPGPPAPKPPLPPGDYPDRGGPPCKPPAPEDEDEAWRQRRKQSSSEISLAVERARRRREEEERRMQEERRAACAEKLKRLDEKFGAPDKRLKAEPAAPPAAPSTPAPPPAVPKELPAPPAPPPASAPTPETEPEEPAQAPPAQSTPTPGVAAAPTLVSGGGSTSSTSSGSFEASPVEPQLPSKEGPEPPEEVPPPTTPPVPKVEPKGDGIGPTRQPPSQGLGYPKYQKSLPPRFQRQQQEQLLKQQQQHQWQQHQQGSAPPTPVPPSPPQPVTLGAVPAPQAPPPPPKALYPGALGRPPPMPPMNFDPRWMMIPPYVDPRLLQGRPPLEFYPPGVHPSGLVPRERSDSLGLSSEPFDRHAPAMLRERGTPPVDPKLAWVGDVFTATPAEPRPLTSPLRQAADEDDKGMRSETPPVPPPPPYLASYPGFPENGAPGPPISRFPLEEPGPRPLPWPPGSDEVAKIQTPPPKKEPPKEETAQLTGPEAGRKLPASRSGAGPPPPRRESRTETRWGPRPGSSRRGIPPEEPGAPPRRAGPIKKPPPPTKVEELPPKPLEQGDETPKPPKPDPLKITKGKLGGPKETPPNGNLSPAPRLRRDYSYERVGPTSCRGRGRGEYFARGRGFRGTYGGRGRGGQANSAVTESFEEMMGVEVGQGDQTTLLLPEAAMPARHGARVQSMRKSPSGAGSGAQKQAARPMRVIWLLQTRRLPHPRREHSPRSSRSPTTRSPTLHRAPARFTCPGVGESSLPEGAISPGPRRREAPPQVCPGWSPPAKSLAPKKPPTGPLPPSKEPLKEKLIPGPLSPVARGGSNGGSNVGMEDGERPRRRRHGRAQQQDKPPRFRRLKQERENAARGSEGKPSLTLPASAPGPEEALTTVTVAPAPRRAAAKSPDLSNQNSDQANEEWETASESSDFTSERRGDKEAPPPVLLTPKAVGTPGGGGGGAVPGISAMSRGDLSQRAKDLSKRSFSSQRPGMERQNRRPGPGGKAGSSGSSSGGGGGGPGGRTGPGRGDKRSWPSPKNRSRPPEERPPGLPLPPPPPSSSAVFRLDQVIHSNPAGIQQALAQLSSRQGSVTAPGGHPRHKPGPPQAPQGPSPRPPTRYEPQRVNSGLSSDPHFEEPGPMVRGVGGTPRDSAGVSPFPPKRRERPPRKPELLQEESLPPPHSSGFLGSKPEGPGPQAESRDTGTEALTPHIWNRLHTATSRKSYRPSSMEPWMEPLSPFEDVAGTEMSQSDSGVDLSGDSQVSSGPCSQRSSPDGGLKGAAEGPPKRPGGSSPLNAVPCEGPPGSEPPRRPPPAPHDGDRKELPREQPLPPGPIGTERSQRTDRGTEPGPIRPSHRPGPPVQFGTSDKDSDLRLVVGDSLKAEKELTASVTEAIPVSRDWELLPSAAASAEPQSKNLDSGHCVPEPSSSGQRLYPEVFYGSAGPSSSQISGGSHGLSITSKQWRLRPGTPSLHPYRSQPLYLPPGPAPPSALLSGVALKGQFLDFSTMQATELGKLPAGGVLYPPPSFLYSPAFCPSPLPDTSLLQVRQDLPSPSDFYSTPLQPGGQSGFLPSGAPAQQMLLPMVDSQLPVVNFGSLPPAPPPAPPPLSLLPVGPALQPPSLAVRPPPAPATRVLPSPARPFPASLGRAELHPVELKPFQDYQKLSSNLGGPGSSRTPPTGRSFSGLNSRLKATPSTYSGVFRTQRVDLYQQASPPDALRWIPKPWERTGPPPREGPSRRAEEPGSRGDKEPGLPPPR

SEQ ID NO: 757676 - protein, 663 aa, Homo sapiens
PRDRPRVRERPRRRRHGRAQQQDKPPRFRRLKQERENAARGSEGKPSLTLPASAPGPEEALTTVTVAPAPRRAAAKSPDLSNQNSDQANEEWETASESSDFTSERRGDKEAPPPVLLTPKAVGTPGGGGGGAVPGISAMSRGDLSQRAKDLSKRSFSSQRPGMERQNRRPGPGGKAGSSGSSSGGGGGGPGGRTGPGRGDKRSWPSPKNRSRPPEERPPGLPLPPPPPSSSAVFRLDQVIHSNPAGIQQALAQLSSRQGSVTAPGGHPRHKPGPPQAPQGPSPRPPTRYEPQRVNSGLSSDPHFEEPGPMVRGVGGTPRDSAGVSPFPPKRRERPPRKPELLQEESLPPPHSSGFLGSKPEGPGPQAESRDTGTEALTPHIWNRLHTATSRKSYRPSSMEPWMEPLSPFEDVAGTEMSQSDSGVDLSGDSQVSSGPCSQRSSPDGGLKGAAEGPPKRPGGSSPLNAVPCEGPPGSEPPRRPPPAPHDGDRKELPREQPLPPGPIGTERSQRTDRGTEPGPIRPSHRPGPPVQFGTSDKDSDLRLVVGDSLKAEKELTASVTEAIPVSRDWELLPSAAASAEPQSKNLDSGHCVPEPSSSGQRLYPEVFYGSAGPSSSQISGGAMDFSPKPWERTGPPPREGPSRRAEEPGSRGDKEPGLPPPR

SEQ ID NO: 757677 - protein, 1877 aa, Homo sapiens
MSDRSGPTAKGKDGKKYSSLNLFDTYKGKSLEIQKPACCPSPWPAESRESCHCPAYRPPANLPSLKAENKGNDPNVSLVPKDGTGWASKQEQSDPKSSDASTAQPPESQPLPASQTPASNQPKRPPAAPENTPLVPSGVKSWAQASVTHGAHGDGGRASSLLSRFSREEFPTLQAAGDQDKAAKERESAEQSSGPGPSLRPQNSTTWRDGGGRGPDELEGPDSKLHHGHDPRGGLQPSGPPQFPPYRGMMPPFMYPPYLPFPPPYGPQGPYRYPTPDGPSRFPRVAGPRGSGPPMRLVEPVGRPSILKEDNLKEFDQLDQENDDGWAGAHEEVDYTEKLKFSDEEDGRDSDEEGAEGHRDSQSASGEERPPEADGKKGNSPNSEPPTPKTAWAETSRPPETEPGPPAPKPPLPPGDYPDRGGPPCKPPAPEDEDEAWRQRRKQSSSEISLAVERARRRREEEERRMQEERRAACAEKLKRLDEKFGAPDKRLKAEPAAPPAAPSTPAPPPAVPKELPAPPAPPPASAPTPETEPEEPAQAPPAQSTPTPGVAAAPTLVSGGGSTSSTSSGSFEASPVEPQLPSKEGPEPPEEVPPPTTPPVPKVEPKGDGIGPTRQPPSQGLGYPKYQKSLPPRFQRQQQEQLLKQQQQHQWQQHQQGSAPPTPVPPSPPQPVTLGAVPAPQAPPPPPKALYPGALGRPPPMPPMNFDPRWMMIPPYVDPRLLQGRPPLEFYPPGVHPSGLVPRERSDSLGLSSEPFDRHAPAMLRERGTPPVDPKLAWVGDVFTATPAEPRPLTSPLRQAADEDDKGMRSETPPVPPPPPYLASYPGFPENGAPGPPISRFPLEEPGPRPLPWPPGSDEVAKIQTPPPKKEPPKEETAQLTGPEAGRKLPASRSGAGPPPPRRESRTETRWGPRPGSSRRGIPPEEPGAPPRRAGPIKKPPPPTKVEELPPKPLEQGDETPKPPKPDPLKITKGKLGGPKETPPNGNLSPAPRLRRDYSYERVGPTSCRGRGRGEYFARGRGFRGTYGGRGRGGQANSAVTESFEEMMGVEVGQGDQTTLLLPEAAMPARHGARVQSMRKSPSGAGSGAQKQAARPMRVIWLLQTRRLPHPRREHSPRSSRSPTTRSPTLHRAPARFTCPGVGESSLPEGAISPGPRRREAPPQVCPGWSPPAKSLAPKKPPTGPLPPSKEPLKEKLIPGPLSPVARGGSNGGSNVGMEDGERPRRRRHGRAQQQDKPPRFRRLKQERENAARGSEGKPSLTLPASAPGPEEALTTVTVAPAPRRAAAKSPDLSNQNSDQANEEWETASESSDFTSERRGDKEAPPPVLLTPKAVGTPGGGGGGAVPGISAMSRGDLSQRAKDLSKRSFSSQRPGMERQNRRPGPGGKAGSSGSSSGGGGGGPGGRTGPGRGDKRSWPSPKNRSRPPEERPPGLPLPPPPPSSSAVFRLDQVIHSNPAGIQQALAQLSSRQGSVTAPGGHPRHKPGPPQAPQGPSPRPPTRYEPQRVNSGLSSDPHFEEPGPMVRGVGGTPRDSAGVSPFPPKRRERPPRKPELLQEESLPPPHSSGFLGSKPEGPGPQAESRDTGTEALTPHIWNRLHTATSRKSYRPSSMEPWMEPLSPFEDVAGTEMSQSDSGVDLSGDSQVSSGPCSQRSSPDGGLKGAAEGPPKRPGGSSPLNAVPCEGPPGSEPPRRPPPAPHDGDRKELPREQPLPPGPIGTERSQRTDRGTEPGPIRPSHRPGPPVQFGTSDKDSDLRLVVGDSLKAEKELTASVTEAIPVSRDWELLPSAAASAEPQSKNLDSGHCVPEPSSSGQRLYPEVFYGSAGPSSSQISGGAMDFSPKPWERTGPPPREGPSRRAEEPGSRGDKEPGLPPPR

SEQ ID NO: 757678 - protein, 3176 aa, Homo sapiens
MRKHRHLPLVAVFCLFLSGFPTTHAQQQQADVKNGAAADIIFLVDSSWTIGEEHFQLVREFLYDVVKSLAVGENDFHFALVQFNGNPHTEFLLNTYRTKQEVLSHISNMSYIGGTNQTGKGLEYIMQSHLTKAAGSRAGDGVPQVIVVLTDGHSKDGLALPSAELKSADVNVFAIGVEDADEGALKEIASEPLNMHMFNLENFTSLHDIVGNLVSCVHSSVSPERAGDTETLKDITAQDSADIIFLIDGSNNTGSVNFAVILDFLVNLLEKLPIGTQQIRVGVVQFSDEPRTMFSLDTYSTKAQVLGAVKALGFAGGELANIGLALDFVVENHFTRAGGSRVEEGVPQVLVLISAGPSSDEIRYGVVALKQASVFSFGLGAQAASRAELQHIATDDNLVFTVPEFRSFGDLQEKLLPYIVGVAQRHIVLKPPTIVTQVIEVNKRDIVFLVDGSSALGLANFNAIRDFIAKVIQRLEIGQDLIQVAVAQYADTVRPEFYFNTHPTKREVITAVRKMKPLDGSALYTGSALDFVRNNLFTSSAGYRAAEGIPKLLVLITGGKSLDEISQPAQELKRSSIMAFAIGNKGADQAELEEIAFDSSLVFIPAEFRAAPLQGMLPGLLAPLRTLSGTPEVHSNKRDIIFLLDGSANVGKTNFPYVRDFVMNLVNSLDIGNDNIRVGLVQFSDTPVTEFSLNTYQTKSDILGHLRQLQLQGGSGLNTGSALSYVYANHFTEAGGSRIREHVPQLLLLLTAGQSEDSYLQAANALTRAGILTFCVGASQANKAELEQIAFNPSLVYLMDDFSSLPALPQQLIQPLTTYVSGGVEEVPLAQPESKRDILFLFDGSANLVGQFPVVRDFLYKIIDELNVKPEGTRIAVAQYSDDVKVESRFDEHQSKPEILNLVKRMKIKTGKALNLGYALDYAQRYIFVKSAGSRIEDGVLQFLVLLVAGRSSDRVDGPASNLKQSGVVPFIFQAKNADPAELEQIVLSPAFILAAESLPKIGDLHPQIVNLLKSVHNGAPAPVSGEKDVVFLLDGSEGVRSGFPLLKEFVQRVVESLDVGQDRVRVAVVQYSDRTRPEFYLNSYMNKQDVVNAVRQLTLLGGPTPNTGAALEFVLRNILVSSAGSRITEGVPQLLIVLTADRSGDDVRNPSVVVKRGGAVPIGIGIGNADITEMQTISFIPDFAVAIPTFRQLGTVQQVISERVTQLTREELSRLQPVLQPLPSPGVGGKRDVVFLIDGSQSAGPEFQYVRTLIERLVDYLDVGFDTTRVAVIQFSDDPKAEFLLNAHSSKDEVQNAVQRLRPKGGRQINVGNALEYVSRNIFKRPLGSRIEEGVPQFLVLISSGKSDDEVDDPAVELKQFGVAPFTIARNADQEELVKISLSPEYVFSVSTFRELPSLEQKLLTPITTLTSEQIQKLLASTRYPPPAVESDAADIVFLIDSSEGVRPDGFAHIRDFVSRIVRRLNIGPSKVRVGVVQFSNDVFPEFYLKTYRSQAPVLDAIRRLRLRGGSPLNTGKALEFVARNLFVKSAGSRIEDGVPQHLVLVLGGKSQDDVSRFAQVIRSSGIVSLGVGDRNIDRTELQTITNDPRLVFTVREFRELPNIEERIMNSFGPSAATPAPPGVDTPPPSRPEKKKADIVFLLDGSINFRRDSFQEVLRFVSEIVDTVYEDGDSIQVGLVQYNSDPTDEFFLKDFSTKRQIIDAINKVVYKGGRHANTKVGLEHLRVNHFVPEAGSRLDQRVPQIAFVITGGKSVEDAQDVSLALTQRGVKVFAVGVRNIDSEEVGKIASNSATAFRVGNVQELSELSEQVLETLHDAMHETLCPGVTDAAKACNLDVILGFDGSRDQNVFVAQKGFESKVDAILNRISQMHRVSCSGGRSPTVRVSVVANTPSGPVEAFDFDEYQPEMLEKFRNMRSQHPYVLTEDTLKVYLNKFRQSSPDSVKVVIHFTDGADGDLADLHRASENLRQEGVRALILVGLERVVNLERLMHLEFGRGFMYDRPLRLNLLDLDYELAEQLDNIAEKACCGVPCKCSGQRGDRGPIGSIGPKGIPGEDGYRGYPGDEGGPGERGPPGVNGTQGFQGCPGQRGVKGSRGFPGEKGEVGEIGLDGLDGEDGDKGLPGSSGEKGNPGRRGDKGPRGEKGERGDVGIRGDPGNPGQDSQERGPKGETGDLGPMGVPGRDGVPGGPGETGKNGGFGRRGPPGAKGNKGGPGQPGFEGEQGTRGAQGPAGPAGPPGLIGEQGISGPRGSGGAAGAPGERGRTGPLGRKGEPGEPGPKGGIGNRGPRGETGDDGRDGVGSEGRRGKKGERGFPGYPGPKGNPGEPGLNGTTGPKGIRGRRGNSGPPGIVGQKGDPGYPGPAGPKGNRGDSIDQCALIQSIKDKCPCCYGPLECPVFPTELAFALDTSEGVNQDTFGRMRDVVLSIVNDLTIAESNCPRGARVAVVTYNNEVTTEIRFADSKRKSVLLDKIKNLQVALTSKQQSLETAMSFVARNTFKRVRNGFLMRKVAVFFSNTPTRASPQLREAVLKLSDAGITPLFLTRQEDRQLINALQINNTAVGHALVLPAGRDLTDFLENVLTCHVCLDICNIDPSCGFGSWRPSFRDRRAAGSDVDIDMAFILDSAETTTLFQFNEMKKYIAYLVRQLDMSPDPKASQHFARVAVVQHAPSESVDNASMPPVKVEFSLTDYGSKEKLVDFLSRGMTQLQGTRALGSAIEYTIENVFESAPNPRDLKIVVLMLTGEVPEQQLEEAQRVILQAKCKGYFFVVLGIGRKVNIKEVYTFASEPNDVFFKLVDKSTELNEEPLMRFGRLLPSFVSSENAFYLSPDIRKQCDWFQGDQPTKNLVKFGHKQVNVPNNVTSSPTSNPVTTTKPVTTTKPVTTTTKPVTTTTKPVTIINQPSVKPAAAKPAPAKPVAAKPVATKTATVRPPVAVKPATAAKPVAAKPAAVRPPAAAAKPVATKPEVPRPQAAKPAATKPATTKPVVKMLREVQVFEITENSAKLHWERPEPPGPYFYDLTVTSAHDQSLVLKQNLTVTDRVIGGLLAGQTYHVAVVCYLRSQVRATYHGSFSTKKSQPPPPQPARSASSSTINLMVSTEPLALTETDICKLPKDEGTCRDFILKWYYDPNTKSCARFWYGGCGGNENKFGSQKECEKVCAPVLAKPGVISVMGT

SEQ ID NO: 757679 - protein, 2951 aa, Homo sapiens
MSFFKDVKNGAAADIIFLVDSSWTIGEEHFQLVREFLYDVVKSLAVGENDFHFALVQFNGNPHTEFLLNTYRTKQEVLSHISNMSYIGGTNQTGKGLEYIMQSHLTKAAGSRAGDGVPQVIVVLTDGHSKDGLALPSAELKSADVNVFAIGVEDADEGALKEIASEPLNMHMFNLENFTSLHDIVGNLVSCVHSSVSPERAGDTETLKDITAQDSADIIFLIDGSNNTGSVNFAVILDFLVNLLEKLPIGTQQIRVGVVQFSDEPRTMFSLDTYSTKAQVLGAVKALGFAGGELANIGLALDFVVENHFTRAGGSRVEEGVPQVLVLISAGPSSDEIRYGVVALKQASVFSFGLGAQAASRAELQHIATDDNLVFTVPEFRSFGDLQEKLLPYIVGVAQRHIVLKPPTIVTQVIEVNKRDIVFLVDGSSALGLANFNAIRDFIAKVIQRLEIGQDLIQVAVAQYADTVRPEFYFNTHPTKREVITAVRKMKPLDGSALYTGSALDFVRNNLFTSSAGYRAAEGIPKLLVLITGGKSLDEISQPAQELKRSSIMAFAIGNKGADQAELEEIAFDSSLVFIPAEFRAAPLQGMLPGLLAPLRTLSGTPEESKRDILFLFDGSANLVGQFPVVRDFLYKIIDELNVKPEGTRIAVAQYSDDVKVESRFDEHQSKPEILNLVKRMKIKTGKALNLGYALDYAQRYIFVKSAGSRIEDGVLQFLVLLVAGRSSDRVDGPASNLKQSGVVPFIFQAKNADPAELEQIVLSPAFILAAESLPKIGDLHPQIVNLLKSVHNGAPAPVSGEKDVVFLLDGSEGVRSGFPLLKEFVQRVVESLDVGQDRVRVAVVQYSDRTRPEFYLNSYMNKQDVVNAVRQLTLLGGPTPNTGAALEFVLRNILVSSAGSRITEGVPQLLIVLTADRSGDDVRNPSVVVKRGGAVPIGIGIGNADITEMQTISFIPDFAVAIPTFRQLGTVQQVISERVTQLTREELSRLQPVLQPLPSPGVGGKRDVVFLIDGSQSAGPEFQYVRTLIERLVDYLDVGFDTTRVAVIQFSDDPKAEFLLNAHSSKDEVQNAVQRLRPKGGRQINVGNALEYVSRNIFKRPLGSRIEEGVPQFLVLISSGKSDDEVDDPAVELKQFGVAPFTIARNADQEELVKISLSPEYVFSVSTFRELPSLEQKLLTPITTLTSEQIQKLLASTRYPPPAVESDAADIVFLIDSSEGVRPDGFAHIRDFVSRIVRRLNIGPSKVRVGVVQFSNDVFPEFYLKTYRSQAPVLDAIRRLRLRGGSPLNTGKALEFVARNLFVKSAGSRIEDGVPQHLVLVLGGKSQDDVSRFAQVIRSSGIVSLGVGDRNIDRTELQTITNDPRLVFTVREFRELPNIEERIMNSFGPSAATPAPPGVDTPPPSRPEKKKADIVFLLDGSINFRRDSFQEVLRFVSEIVDTVYEDGDSIQVGLVQYNSDPTDEFFLKDFSTKRQIIDAINKVVYKGGRHANTKVGLEHLRVNHFVPEAGSRLDQRVPQIAFVITGGKSVEDAQDVSLALTQRGVKVFAVGVRNIDSEEVGKIASNSATAFRVGNVQELSELSEQVLETLHDAMHETLCPGVTDAAKACNLDVILGFDGSRDQNVFVAQKGFESKVDAILNRISQMHRVSCSGGRSPTVRVSVVANTPSGPVEAFDFDEYQPEMLEKFRNMRSQHPYVLTEDTLKVYLNKFRQSSPDSVKVVIHFTDGADGDLADLHRASENLRQEGVRALILVGLERVVNLERLMHLEFGRGFMYDRPLRLNLLDLDYELAEQLDNIAEKACCGVPCKCSGQRGDRGPIGSIGPKGIPGEDGYRGYPGDEGGPGERGPPGVNGTQGFQGCPGQRGVKGSRGFPGEKGEVGEIGLDGLDGEDGDKGLPGSSGEKGNPGRRGDKGPRGEKGERGDVGIRGDPGNPGQDSQERGPKGETGDLGPMGVPGRDGVPGGPGETGKNGGFGRRGPPGAKGNKGGPGQPGFEGEQGTRGAQGPAGPAGPPGLIGEQGISGPRGSGGAAGAPGERGRTGPLGRKGEPGEPGPKGGIGNRGPRGETGDDGRDGVGSEGRRGKKGERGFPGYPGPKGNPGEPGLNGTTGPKGIRGRRGNSGPPGIVGQKGDPGYPGPAGPKGNRGDSIDQCALIQSIKDKCPCCYGPLECPVFPTELAFALDTSEGVNQDTFGRMRDVVLSIVNDLTIAESNCPRGARVAVVTYNNEVTTEIRFADSKRKSVLLDKIKNLQVALTSKQQSLETAMSFVARNTFKRVRNGFLMRKVAVFFSNTPTRASPQLREAVLKLSDAGITPLFLTRQEDRQLINALQINNTAVGHALVLPAGRDLTDFLENVLTCHVCLDICNIDPSCGFGSWRPSFRDRRAAGSDVDIDMAFILDSAETTTLFQFNEMKKYIAYLVRQLDMSPDPKASQHFARVAVVQHAPSESVDNASMPPVKVEFSLTDYGSKEKLVDFLSRGMTQLQGTRALGSAIEYTIENVFESAPNPRDLKIVVLMLTGEVPEQQLEEAQRVILQAKCKGYFFVVLGIGRKVNIKEVYTFASEPNDVFFKLVDKSTELNEEPLMRFGRLLPSFVSSENAFYLSPDIRKQCDWFQGDQPTKNLVKFGHKQVNVPNNVTSSPTSNPVTTTKPVTTTKPVTTTTKPVTTTTKPVTIINQPSVKPAAAKPAPAKPVAAKPVATKTATVRPPVAVKPATAAKPVAAKPAAVRPPAAAAKPVATKPEVPRPQAAKPAATKPATTKPVVKMLREVQVFEITENSAKLHWERPEPPGPYFYDLTVTSAHDQSLVLKQNLTVTDRVIGGLLAGQTYHVAVVCYLRSQVRATYHGSFSTKKSQPPPPQPARSASSSTINLMVSTEPLALTETDICKLPKDEGTCRDFILKWYYDPNTKSCARFWYGGCGGNENKFGSQKECEKVCAPVLAKPGVISVMGT

SEQ ID NO: 757680 - protein, 2769 aa, Homo sapiens
MRKHRHLPLVAVFCLFLSGFPTTHAQQQQAVIEVNKRDIVFLVDGSSALGLANFNAIRDFIAKVIQRLEIGQDLIQVAVAQYADTVRPEFYFNTHPTKREVITAVRKMKPLDGSALYTGSALDFVRNNLFTSSAGYRAAEGIPKLLVLITGGKSLDEISQPAQELKRSSIMAFAIGNKGADQAELEEIAFDSSLVFIPAEFRAAPLQGMLPGLLAPLRTLSGTPEVHSNKRDIIFLLDGSANVGKTNFPYVRDFVMNLVNSLDIGNDNIRVGLVQFSDTPVTEFSLNTYQTKSDILGHLRQLQLQGGSGLNTGSALSYVYANHFTEAGGSRIREHVPQLLLLLTAGQSEDSYLQAANALTRAGILTFCVGASQANKAELEQIAFNPSLVYLMDDFSSLPALPQQLIQPLTTYVSGGVEEVPLAQPESKRDILFLFDGSANLVGQFPVVRDFLYKIIDELNVKPEGTRIAVAQYSDDVKVESRFDEHQSKPEILNLVKRMKIKTGKALNLGYALDYAQRYIFVKSAGSRIEDGVLQFLVLLVAGRSSDRVDGPASNLKQSGVVPFIFQAKNADPAELEQIVLSPAFILAAESLPKIGDLHPQIVNLLKSVHNGAPAPVSGEKDVVFLLDGSEGVRSGFPLLKEFVQRVVESLDVGQDRVRVAVVQYSDRTRPEFYLNSYMNKQDVVNAVRQLTLLGGPTPNTGAALEFVLRNILVSSAGSRITEGVPQLLIVLTADRSGDDVRNPSVVVKRGGAVPIGIGIGNADITEMQTISFIPDFAVAIPTFRQLGTVQQVISERVTQLTREELSRLQPVLQPLPSPGVGGKRDVVFLIDGSQSAGPEFQYVRTLIERLVDYLDVGFDTTRVAVIQFSDDPKAEFLLNAHSSKDEVQNAVQRLRPKGGRQINVGNALEYVSRNIFKRPLGSRIEEGVPQFLVLISSGKSDDEVDDPAVELKQFGVAPFTIARNADQEELVKISLSPEYVFSVSTFRELPSLEQKLLTPITTLTSEQIQKLLASTRYPPPAVESDAADIVFLIDSSEGVRPDGFAHIRDFVSRIVRRLNIGPSKVRVGVVQFSNDVFPEFYLKTYRSQAPVLDAIRRLRLRGGSPLNTGKALEFVARNLFVKSAGSRIEDGVPQHLVLVLGGKSQDDVSRFAQVIRSSGIVSLGVGDRNIDRTELQTITNDPRLVFTVREFRELPNIEERIMNSFGPSAATPAPPGVDTPPPSRPEKKKADIVFLLDGSINFRRDSFQEVLRFVSEIVDTVYEDGDSIQVGLVQYNSDPTDEFFLKDFSTKRQIIDAINKVVYKGGRHANTKVGLEHLRVNHFVPEAGSRLDQRVPQIAFVITGGKSVEDAQDVSLALTQRGVKVFAVGVRNIDSEEVGKIASNSATAFRVGNVQELSELSEQVLETLHDAMHETLCPGVTDAAKACNLDVILGFDGSRDQNVFVAQKGFESKVDAILNRISQMHRVSCSGGRSPTVRVSVVANTPSGPVEAFDFDEYQPEMLEKFRNMRSQHPYVLTEDTLKVYLNKFRQSSPDSVKVVIHFTDGADGDLADLHRASENLRQEGVRALILVGLERVVNLERLMHLEFGRGFMYDRPLRLNLLDLDYELAEQLDNIAEKACCGVPCKCSGQRGDRGPIGSIGPKGIPGEDGYRGYPGDEGGPGERGPPGVNGTQGFQGCPGQRGVKGSRGFPGEKGEVGEIGLDGLDGEDGDKGLPGSSGEKGNPGRRGDKGPRGEKGERGDVGIRGDPGNPGQDSQERGPKGETGDLGPMGVPGRDGVPGGPGETGKNGGFGRRGPPGAKGNKGGPGQPGFEGEQGTRGAQGPAGPAGPPGLIGEQGISGPRGSGGAAGAPGERGRTGPLGRKGEPGEPGPKGGIGNRGPRGETGDDGRDGVGSEGRRGKKGERGFPGYPGPKGNPGEPGLNGTTGPKGIRGRRGNSGPPGIVGQKGDPGYPGPAGPKGNRGDSIDQCALIQSIKDKCPCCYGPLECPVFPTELAFALDTSEGVNQDTFGRMRDVVLSIVNDLTIAESNCPRGARVAVVTYNNEVTTEIRFADSKRKSVLLDKIKNLQVALTSKQQSLETAMSFVARNTFKRVRNGFLMRKVAVFFSNTPTRASPQLREAVLKLSDAGITPLFLTRQEDRQLINALQINNTAVGHALVLPAGRDLTDFLENVLTCHVCLDICNIDPSCGFGSWRPSFRDRRAAGSDVDIDMAFILDSAETTTLFQFNEMKKYIAYLVRQLDMSPDPKASQHFARVAVVQHAPSESVDNASMPPVKVEFSLTDYGSKEKLVDFLSRGMTQLQGTRALGSAIEYTIENVFESAPNPRDLKIVVLMLTGEVPEQQLEEAQRVILQAKCKGYFFVVLGIGRKVNIKEVYTFASEPNDVFFKLVDKSTELNEEPLMRFGRLLPSFVSSENAFYLSPDIRKQCDWFQGDQPTKNLVKFGHKQVNVPNNVTSSPTSNPVTTTKPVTTTKPVTTTTKPVTTTTKPVTIINQPSVKPAAAKPAPAKPVAAKPVATKTATVRPPVAVKPATAAKPVAAKPAAVRPPAAAAKPVATKPEVPRPQAAKPAATKPATTKPVVKMLREVQVFEITENSAKLHWERPEPPGPYFYDLTVTSAHDQSLVLKQNLTVTDRVIGGLLAGQTYHVAVVCYLRSQVRATYHGSFSTKKSQPPPPQPARSASSSTINLMVSTEPLALTETDICKLPKDEGTCRDFILKWYYDPNTKSCARFWYGGCGGNENKFGSQKECEKVCAPVLAKPGVISVMGT

SEQ ID NO: 757681 - protein, 1094 aa, Homo sapiens
AARYPSCLLPRSPSLGYPGEKGEVGEIGLDGLDGEDGDKGLPGSSGEKGNPGRRGDKGPRGEKGERGDVGIRGDPGNPGQDSQERGPKGETGDLGPMGVPGRDGVPGGPGETGKNGGFGRRGPPGAKGNKGGPGQPGFEGEQGTRGAQGPAGPAGPPGLIGEQGISGPRGSGGAAGAPGERGRTGPLGRKGEPGEPGPKGGIGNRGPRGETGDDGRDGVGSEGRRGKKGERGFPGYPGPKGNPGEPGLNGTTGPKGIRGRRGNSGPPGIVGQKGDPGYPGPAGPKGNRGDSIDQCALIQSIKDKCPCCYGPLECPVFPTELAFALDTSEGVNQDTFGRMRDVVLSIVNDLTIAESNCPRGARVAVVTYNNEVTTEIRFADSKRKSVLLDKIKNLQVALTSKQQSLETAMSFVARNTFKRVRNGFLMRKVAVFFSNTPTRASPQLREAVLKLSDAGITPLFLTRQEDRQLINALQINNTAVGHALVLPAGRDLTDFLENVLTCHVCLDICNIDPSCGFGSWRPSFRDRRAAGSDVDIDMAFILDSAETTTLFQFNEMKKYIAYLVRQLDMSPDPKASQHFARVAVVQHAPSESVDNASMPPVKVEFSLTDYGSKEKLVDFLSRGMTQLQGTRALGSAIEYTIENVFESAPNPRDLKIVVLMLTGEVPEQQLEEAQRVILQAKCKGYFFVVLGIGRKVNIKEVYTFASEPNDVFFKLVDKSTELNEEPLMRFGRLLPSFVSSENAFYLSPDIRKQCDWFQGDQPTKNLVKFGHKQVNVPNNVTSSPTSNPVTTTKPVTTTKPVTTTTKPVTTTTKPVTIINQPSVKPAAAKPAPAKPVAAKPVATKTATVRPPVAVKPATAAKPVAAKPAAVRPPAAAAKPVATKPEVPRPQAAKPAATKPATTKPVVKMLREVQVFEITENSAKLHWERPEPPGPYFYDLTVTSAHDQSLVLKQNLTVTDRVIGGLLAGQTYHVAVVCYLRSQVRATYHGSFSTKKSQPPPPQPARSASSSTINLMVSTEPLALTETDICKLPKDEGTCRDFILKWYYDPNTKSCARFWYGGCGGNENKFGSQKECEKVCAPVLAKPGVISVMGT

SEQ ID NO: 757682 - protein, 2176 aa, Homo sapiens
MSFFKDVKNGAAADIIFLVDSSWTIGEEHFQLVREFLYDVVKSLAVGENDFHFALVQFNGNPHTEFLLNTYRTKQEVLSHISNMSYIGGTNQTGKGLEYIMQSHLTKAAGSRAGDGVPQVIVVLTDGHSKDGLALPSAELKSADVNVFAIGVEDADEGALKEIASEPLNMHMFNLENFTSLHDIVGNLVSCVHSSVSPERAGDTETLKDITAQDSADIIFLIDGSNNTGSVNFAVILDFLVNLLEKLPIGTQQIRVGVVQFSDEPRTMFSLDTYSTKAQVLGAVKALGFAGGELANIGLALDFVVENHFTRAGGSRVEEGVPQVLVLISAGPSSDEIRYGVVALKQASVFSFGLGAQAASRAELQHIATDDNLVFTVPEFRSFGDLQEKLLPYIVGVAQRHIVLKPPTIVTQVIEVNKRDIVFLVDGSSALGLANFNAIRDFIAKVIQRLEIGQDLIQVAVAQYADTVRPEFYFNTHPTKREVITAVRKMKPLDGSALYTGSALDFVRNNLFTSSAGYRAAEGIPKLLVLITGGKSLDEISQPAQELKRSSIMAFAIGNKGADQAELEEIAFDSSLVFIPAEFRAAPLQGMLPGLLAPLRTLSGTPEVHSNKRDIIFLLDGSANVGKTNFPYVRDFVMNLVNSLDIGNDNIRVGLVQFSDTPVTEFSLNTYQTKSDILGHLRQLQLQGGSGLNTGSALSYVYANHFTEAGGSRIREHVPQLLLLLTAGQSEDSYLQAANALTRAGILTFCVGASQANKAELEQIAFNPSLVYLMDDFSSLPALPQQLIQPLTTYVSGGVEEVPLAQPESKRDILFLFDGSANLVGQFPVVRDFLYKIIDELNVKPEGTRIAVAQYSDDVKVESRFDEHQSKPEILNLVKRMKIKTGKALNLGYALDYAQRYIFVKSAGSRIEDGVLQFLVLLVAGRSSDRVDGPASNLKQSGVVPFIFQAKNADPAELEQIVLSPAFILAAESLPKIGDLHPQIVNLLKSVHNGAPAPVSGEKDVVFLLDGSEGVRSGFPLLKEFVQRVVESLDVGQDRVRVAVVQYSDRTRPEFYLNSYMNKQDVVNAVRQLTLLGGPTPNTGAALEFVLRNILVSSAGSRITEGVPQLLIVLTADRSGDDVRNPSVVVKRGGAVPIGIGIGNADITEMQTISFIPDFAVAIPTFRQLGTVQQVISERVTQLTREELSRLQPVLQPLPSPGVGGKRDVVFLIDGSQSAGPEFQYVRTLIERLVDYLDVGFDTTRVAVIQFSDDPKAEFLLNAHSSKDEVQNAVQRLRPKGGRQINVGNALEYVSRNIFKRPLGSRIEEGVPQFLVLISSGKSDDEVDDPAVELKQFGVAPFTIARNADQEELVKISLSPEYVFSVSTFRELPSLEQKLLTPITTLTSEQIQKLLASTRYPPPAVESDAADIVFLIDSSEGVRPDGFAHIRDFVSRIVRRLNIGPSKVRVGVVQFSNDVFPEFYLKTYRSQAPVLDAIRRLRLRGGSPLNTGKALEFVARNLFVKSAGSRIEDGVPQHLVLVLGGKSQDDVSRFAQVIRSSGIVSLGVGDRNIDRTELQTITNDPRLVFTVREFRELPNIEERIMNSFGPSAATPAPPGVDTPPPSRPEKKKADIVFLLDGSINFRRDSFQEVLRFVSEIVDTVYEDGDSIQVGLVQYNSDPTDEFFLKDFSTKRQIIDAINKVVYKGGRHANTKVGLEHLRVNHFVPEAGSRLDQRVPQIAFVITGGKSVEDAQDVSLALTQRGVKVFAVGVRNIDSEEVGKIASNSATAFRVGNVQELSELSEQVLETLHDAMHETLCPGVTDAAKACNLDVILGFDGSRDQNVFVAQKGFESKVDAILNRISQMHRVSCSGGRSPTVRVSVVANTPSGPVEAFDFDEYQPEMLEKFRNMRSQHPYVLTEDTLKVYLNKFRQSSPDSVKVVIHFTDGADGDLADLHRASENLRQEGVRALILVGLERVVNLERLMHLEFGRGFMYDRPLRLNLLDLDYELAEQLDNIAEKACCGVPCKCSGQRGDRGPIGSIGPKGIPGEDGYRGYPGDEGGPGERGPPGVNGTQGFQGCPGQRGVKGSRGFPGEKGEVGEIGLDGLDGEDGDKGLPGSSGEKGNPGRRGNGRKRNLRFMEAEARENFGAWMWRSPTAELTQEIVFQKKAERRLGLRIRLGYGGGTCMFKGKEN

SEQ ID NO: 757683 - protein, 914 aa, Homo sapiens
IVDPRVRGRKGEPGEPGPKGGIGNRGPRGETGDDGRDGVGSEGRRGKKGERGFPGYPGPKGNPGEPGLNGTTGPKGIRGRRGNSGPPGIVGQKGDPGYPGPAGPKGNRGDSIDQCALIQSIKDKCPCCYGPLECPVFPTELAFALDTSEGVNQDTFGRMRDVVLSIVNDLTIAESNCPRGARVAVVTYNNEVTTEIRFADSKRKSVLLDKIKNLQVALTSKQQSLETAMSFVARNTFKRVRNGFLMRKVAVFFSNTPTRASPQLREAVLKLSDAGITPLFLTRQEDRQLINALQINNTAVGHALVLPAGRDLTDFLENVLTCHVCLDICNIDPSCGFGSWRPSFRDRRAAGSDVDIDMAFILDSAETTTLFQFNEMKKYIAYLVRQLDMSPDPKASQHFARVAVVQHAPSESVDNASMPPVKVEFSLTDYGSKEKLVDFLSRGMTQLQGTRALGSAIEYTIENVFESAPNPRDLKIVVLMLTGEVPEQQLEEAQRVILQAKCKGYFFVVLGIGRKVNIKEVYTFASEPNDVFFKLVDKSTELNEEPLMRFGRLLPSFVSSENAFYLSPDIRKQCDWFQGDQPTKNLVKFGHKQVNVPNNVTSSPTSNPVTTTKPVTTTKPVTTTTKPVTTTTKPVTIINQPSVKPAAAKPAPAKPVAAKPVATKTATVRPPVAVKPATAAKPVAAKPAAVRPPAAAAKPVATKPEVPRPQAAKPAATKPATTKPVVKMLREVQVFEITENSAKLHWERPEPPGPYFYDLTVTSAHDQSLVLKQNLTVTDRVIGGLLAGQTYHVAVVCYLRSQVRATYHGSFSTKKSQPPPPQPARSASSSTINLMVSTEPLALTETDICKLPKDEGTCRDFILKWYYDPNTKSCARFWYGGCGGNENKFGSQKECEKVCAPVLAKPGVISVMGT

SEQ ID NO: 757684 - protein, 1418 aa, Homo sapiens
MSFFKDVKNGAAADIIFLVDSSWTIGEEHFQLVREFLYDVVKSLAVGENDFHFALVQFNGNPHTEFLLNTYRTKQEVLSHISNMSYIGGTNQTGKGLEYIMQSHLTKAAGSRAGDGVPQVIVVLTDGHSKDGLALPSAELKSADVNVFAIGVEDADEGALKEIASEPLNMHMFNLENFTSLHDIVGNLVSCVHSSVSPERAGDTETLKDITAQDSADIIFLIDGSNNTGSVNFAVILDFLVNLLEKLPIGTQQIRVGVVQFSDEPRTMFSLDTYSTKAQVLGAVKALGFAGGELANIGLALDFVVENHFTRAGGSRVEEGVPQVLVLISAGPSSDEIRYGVVALKQASVFSFGLGAQAASRAELQHIATDDNLVFTVPEFRSFGDLQEKLLPYIVGVAQRHIVLKPPTIVTQVIEVNKRDIVFLVDGSSALGLANFNAIRDFIAKVIQRLEIGQDLIQVAVAQYADTVRPEFYFNTHPTKREVITAVRKMKPLDGSALYTGSALDFVRNNLFTSSAGYRAAEGIPKLLVLITGGKSLDEISQPAQELKRSSIMAFAIGNKGADQAELEEIAFDSSLVFIPAEFRAAPLQGMLPGLLAPLRTLSGTPEVHSNKRDIIFLLDGSANVGKTNFPYVRDFVMNLVNSLDIGNDNIRVGLVQFSDTPVTEFSLNTYQTKSDILGHLRQLQLQGGSGLNTGSALSYVYANHFTEAGGSRIREHVPQLLLLLTAGQSEDSYLQAANALTRAGILTFCVGASQANKAELEQIAFNPSLVYLMDDFSSLPALPQQLIQPLTTYVSGGVEEVPLAQPESKRDILFLFDGSANLVGQFPVVRDFLYKIIDELNVKPEGTRIAVAQYSDDVKVESRFDEHQSKPEILNLVKRMKIKTGKALNLGYALDYAQRYIFVKSAGSRIEDGVLQFLVLLVAGRSSDRVDGPASNLKQSGVVPFIFQAKNADPAELEQIVLSPAFILAAESLPKIGDLHPQIVNLLKSVHNGAPAPVSGEKDVVFLLDGSEGVRSGFPLLKEFVQRVVESLDVGQDRVRVAVVQYSDRTRPEFYLNSYMNKQDVVNAVRQLTLLGGPTPNTGAALEFVLRNILVSSAGSRITEGVPQLLIVLTADRSGDDVRNPSVVVKRGGAVPIGIGIGNADITEMQTISFIPDFAVAIPTFRQLGTVQQVISERVTQLTREELSRLQPVLQPLPSPGVGGKRDVVFLIDGSQSAGPEFQYVRTLIERLVDYLDVGFDTTRVAVIQFSDDPKAEFLLNAHSSKDEVQNAVQRLRPKGGRQINVGNALEYVSRNIFKRPLGSRIEEGVPQFLVLISSGKSDDEVDDPAVELKQFGVAPFTIARNADQEELVKISLSPEYVFSVSTFRELPSLEQKLLTPITTLTSEQIQKLLASTRYPPPGEMGASEVLLGAFSI

SEQ ID NO: 757685 - protein, 628 aa, Homo sapiens
MSFFKDVKNGAAADIIFLVDSSWTIGEEHFQLVREFLYDVVKSLAVGENDFHFALVQFNGNPHTEFLLNTYRTKQEVLSHISNMSYIGGTNQTGKGLEYIMQSHLTKAAGSRAGDGVPQVIVVLTDGHSKDGLALPSAELKSADVNVFAIGVEDADEGALKEIASEPLNMHMFNLENFTSLHDIVGNLVSCVHSSVSPERAGDTETLKDITAQDSADIIFLIDGSNNTGSVNFAVILDFLVNLLEKLPIGTQQIRVGVVQFSDEPRTMFSLDTYSTKAQVLGAVKALGFAGGELANIGLALDFVVENHFTRAGGSRVEEGVPQVLVLISAGPSSDEIRYGVVALKQASVFSFGLGAQAASRAELQHIATDDNLVFTVPEFRSFGDLQEKLLPYIVGVAQRHIVLKPPTIVTQVIEVNKRDIVFLVDGSSALGLANFNAIRDFIAKVIQRLEIGQDLIQVAVAQYADTVRPEFYFNTHPTKREVITAVRKMKPLDGSALYTGSALDFVRNNLFTSSAGYRAAEGIPKLLVLITGGKSLDEISQPAQELKRSSIMAFAIGNKGADQAELEEIAFDSSLVFIPAEFRAAPLQGMLPGLLAPLRTLSGTPEVHSNKRNYLSFGLEKVILMER

SEQ ID NO: 757686 - protein, 3151 aa, Homo sapiens
MSFFKDVKNGAAADIIFLVDSSWTIGEEHFQLVREFLYDVVKSLAVGENDFHFALVQFNGNPHTEFLLNTYRTKQEVLSHISNMSYIGGTNQTGKGLEYIMQSHLTKAAGSRAGDGVPQVIVVLTDGHSKDGLALPSAELKSADVNVFAIGVEDADEGALKEIASEPLNMHMFNLENFTSLHDIVGNLVSCVHSSVSPERAGDTETLKDITAQDSADIIFLIDGSNNTGSVNFAVILDFLVNLLEKLPIGTQQIRVGVVQFSDEPRTMFSLDTYSTKAQVLGAVKALGFAGGELANIGLALDFVVENHFTRAGGSRVEEGVPQVLVLISAGPSSDEIRYGVVALKQASVFSFGLGAQAASRAELQHIATDDNLVFTVPEFRSFGDLQEKLLPYIVGVAQRHIVLKPPTIVTQVIEVNKRDIVFLVDGSSALGLANFNAIRDFIAKVIQRLEIGQDLIQVAVAQYADTVRPEFYFNTHPTKREVITAVRKMKPLDGSALYTGSALDFVRNNLFTSSAGYRAAEGIPKLLVLITGGKSLDEISQPAQELKRSSIMAFAIGNKGADQAELEEIAFDSSLVFIPAEFRAAPLQGMLPGLLAPLRTLSGTPEVHSNKRDIIFLLDGSANVGKTNFPYVRDFVMNLVNSLDIGNDNIRVGLVQFSDTPVTEFSLNTYQTKSDILGHLRQLQLQGGSGLNTGSALSYVYANHFTEAGGSRIREHVPQLLLLLTAGQSEDSYLQAANALTRAGILTFCVGASQANKAELEQIAFNPSLVYLMDDFSSLPALPQQLIQPLTTYVSGGVEEVPLAQPESKRDILFLFDGSANLVGQFPVVRDFLYKIIDELNVKPEGTRIAVAQYSDDVKVESRFDEHQSKPEILNLVKRMKIKTGKALNLGYALDYAQRYIFVKSAGSRIEDGVLQFLVLLVAGRSSDRVDGPASNLKQSGVVPFIFQAKNADPAELEQIVLSPAFILAAESLPKIGDLHPQIVNLLKSVHNGAPAPVSGEKDVVFLLDGSEGVRSGFPLLKEFVQRVVESLDVGQDRVRVAVVQYSDRTRPEFYLNSYMNKQDVVNAVRQLTLLGGPTPNTGAALEFVLRNILVSSAGSRITEGVPQLLIVLTADRSGDDVRNPSVVVKRGGAVPIGIGIGNADITEMQTISFIPDFAVAIPTFRQLGTVQQVISERVTQLTREELSRLQPVLQPLPSPGVGGKRDVVFLIDGSQSAGPEFQYVRTLIERLVDYLDVGFDTTRVAVIQFSDDPKAEFLLNAHSSKDEVQNAVQRLRPKGGRQINVGNALEYVSRNIFKRPLGSRIEEGVPQFLVLISSGKSDDEVDDPAVELKQFGVAPFTIARNADQEELVKISLSPEYVFSVSTFRELPSLEQKLLTPITTLTSEQIQKLLASTRYPPPAVESDAADIVFLIDSSEGVRPDGFAHIRDFVSRIVRRLNIGPSKVRVGVVQFSNDVFPEFYLKTYRSQAPVLDAIRRLRLRGGSPLNTGKALEFVARNLFVKSAGSRIEDGVPQHLVLVLGGKSQDDVSRFAQVIRSSGIVSLGVGDRNIDRTELQTITNDPRLVFTVREFRELPNIEERIMNSFGPSAATPAPPGVDTPPPSRPEKKKADIVFLLDGSINFRRDSFQEVLRFVSEIVDTVYEDGDSIQVGLVQYNSDPTDEFFLKDFSTKRQIIDAINKVVYKGGRHANTKVGLEHLRVNHFVPEAGSRLDQRVPQIAFVITGGKSVEDAQDVSLALTQRGVKVFAVGVRNIDSEEVGKIASNSATAFRVGNVQELSELSEQVLETLHDAMHETLCPGVTDAAKACNLDVILGFDGSRDQNVFVAQKGFESKVDAILNRISQMHRVSCSGGRSPTVRVSVVANTPSGPVEAFDFDEYQPEMLEKFRNMRSQHPYVLTEDTLKVYLNKFRQSSPDSVKVVIHFTDGADGDLADLHRASENLRQEGVRALILVGLERVVNLERLMHLEFGRGFMYDRPLRLNLLDLDYELAEQLDNIAEKACCGVPCKCSGQRGDRGPIGSIGPKGIPGEDGYRGYPGDEGGPGERGPPGVNGTQGFQGCPGQRGVKGSRGFPGEKGEVGEIGLDGLDGEDGDKGLPGSSGEKGNPGRRGDKGPRGEKGERGDVGIRGDPGNPGQDSQERGPKGETGDLGPMGVPGRDGVPGGPGETGKNGGFGRRGPPGAKGNKGGPGQPGFEGEQGTRGAQGPAGPAGPPGLIGEQGISGPRGSGGAAGAPGERGRTGPLGRKGEPGEPGPKGGIGNRGPRGETGDDGRDGVGSEGRRGKKGERGFPGYPGPKGNPGEPGLNGTTGPKGIRGRRGNSGPPGIVGQKGDPGYPGPAGPKGNRGDSIDQCALIQSIKDKCPCCYGPLECPVFPTELAFALDTSEGVNQDTFGRMRDVVLSIVNDLTIAESNCPRGARVAVVTYNNEVTTEIRFADSKRKSVLLDKIKNLQVALTSKQQSLETAMSFVARNTFKRVRNGFLMRKVAVFFSNTPTRASPQLREAVLKLSDAGITPLFLTRQEDRQLINALQINNTAVGHALVLPAGRDLTDFLENVLTCHVCLDICNIDPSCGFGSWRPSFRDRRAAGSDVDIDMAFILDSAETTTLFQFNEMKKYIAYLVRQLDMSPDPKASQHFARVAVVQHAPSESVDNASMPPVKVEFSLTDYGSKEKLVDFLSRGMTQLQGTRALGSAIEYTIENVFESAPNPRDLKIVVLMLTGEVPEQQLEEAQRVILQAKCKGYFFVVLGIGRKVNIKEVYTFASEPNDVFFKLVDKSTELNEEPLMRFGRLLPSFVSSENAFYLSPDIRKQCDWFQGDQPTKNLVKFGHKQVNVPNNVTSSPTSNPVTTTKPVTTTKPVTTTTKPVTTTTKPVTIINQPSVKPAAAKPAPAKPVAAKPVATKTATVRPPVAVKPATAAKPVAAKPAAVRPPAAAAKPVATKPEVPRPQAAKPAATKPATTKPVVKMLREVQVFEITENSAKLHWERPEPPGPYFYDLTVTSAHDQSLVLKQNLTVTDRVIGGLLAGQTYHVAVVCYLRSQVRATYHGSFSTKKSQPPPPQPARSASSSTINLMVSTEPLALTETDICKLPKDEGTCRDFILKWYYDPNTKSCARFWYGGCGGNENKFGSQKECEKVCAPVLAKPGVISVMGT

SEQ ID NO: 757687 - protein, 2338 aa, Homo sapiens
SILKSLYPNLVGQFPVVRDFLYKIIDELNVKPEGTRIAVAQYSDDVKVESRFDEHQSKPEILNLVKRMKIKTGKALNLGYALDYAQRYIFVKSAGSRIEDGVLQFLVLLVAGRSSDRVDGPASNLKQSGVVPFIFQAKNADPAELEQIVLSPAFILAAESLPKIGDLHPQIVNLLKSVHNGAPAPVSGEKDVVFLLDGSEGVRSGFPLLKEFVQRVVESLDVGQDRVRVAVVQYSDRTRPEFYLNSYMNKQDVVNAVRQLTLLGGPTPNTGAALEFVLRNILVSSAGSRITEGVPQLLIVLTADRSGDDVRNPSVVVKRGGAVPIGIGIGNADITEMQTISFIPDFAVAIPTFRQLGTVQQVISERVTQLTREELSRLQPVLQPLPSPGVGGKRDVVFLIDGSQSAGPEFQYVRTLIERLVDYLDVGFDTTRVAVIQFSDDPKAEFLLNAHSSKDEVQNAVQRLRPKGGRQINVGNALEYVSRNIFKRPLGSRIEEGVPQFLVLISSGKSDDEVDDPAVELKQFGVAPFTIARNADQEELVKISLSPEYVFSVSTFRELPSLEQKLLTPITTLTSEQIQKLLASTRYPPPAVESDAADIVFLIDSSEGVRPDGFAHIRDFVSRIVRRLNIGPSKVRVGVVQFSNDVFPEFYLKTYRSQAPVLDAIRRLRLRGGSPLNTGKALEFVARNLFVKSAGSRIEDGVPQHLVLVLGGKSQDDVSRFAQVIRSSGIVSLGVGDRNIDRTELQTITNDPRLVFTVREFRELPNIEERIMNSFGPSAATPAPPGVDTPPPSRPEKKKADIVFLLDGSINFRRDSFQEVLRFVSEIVDTVYEDGDSIQVGLVQYNSDPTDEFFLKDFSTKRQIIDAINKVVYKGGRHANTKVGLEHLRVNHFVPEAGSRLDQRVPQIAFVITGGKSVEDAQDVSLALTQRGVKVFAVGVRNIDSEEVGKIASNSATAFRVGNVQELSELSEQVLETLHDAMHETLCPGVTDAAKACNLDVILGFDGSRDQNVFVAQKGFESKVDAILNRISQMHRVSCSGGRSPTVRVSVVANTPSGPVEAFDFDEYQPEMLEKFRNMRSQHPYVLTEDTLKVYLNKFRQSSPDSVKVVIHFTDGADGDLADLHRASENLRQEGVRALILVGLERVVNLERLMHLEFGRGFMYDRPLRLNLLDLDYELAEQLDNIAEKACCGVPCKCSGQRGDRGPIGSIGPKGIPGEDGYRGYPGDEGGPGERGPPGVNGTQGFQGCPGQRGVKGSRGFPGEKGEVGEIGLDGLDGEDGDKGLPGSSGEKGNPGRRGDKGPRGEKGERGDVGIRGDPGNPGQDSQERGPKGETGDLGPMGVPGRDGVPGGPGETGKNGGFGRRGPPGAKGNKGGPGQPGFEGEQGTRGAQGPAGPAGPPGLIGEQGISGPRGSGGAAGAPGERGRTGPLGRKGEPGEPGPKGGIGNRGPRGETGDDGRDGVGSEGRRGKKGERGFPGYPGPKGNPGEPGLNGTTGPKGIRGRRGNSGPPGIVGQKGDPGYPGPAGPKGNRGDSIDQCALIQSIKDKCPCCYGPLECPVFPTELAFALDTSEGVNQDTFGRMRDVVLSIVNDLTIAESNCPRGARVAVVTYNNEVTTEIRFADSKRKSVLLDKIKNLQVALTSKQQSLETAMSFVARNTFKRVRNGFLMRKVAVFFSNTPTRASPQLREAVLKLSDAGITPLFLTRQEDRQLINALQINNTAVGHALVLPAGRDLTDFLENVLTCHVCLDICNIDPSCGFGSWRPSFRDRRAAGSDVDIDMAFILDSAETTTLFQFNEMKKYIAYLVRQLDMSPDPKASQHFARVAVVQHAPSESVDNASMPPVKVEFSLTDYGSKEKLVDFLSRGMTQLQGTRALGSAIEYTIENVFESAPNPRDLKIVVLMLTGEVPEQQLEEAQRVILQAKCKGYFFVVLGIGRKVNIKEVYTFASEPNDVFFKLVDKSTELNEEPLMRFGRLLPSFVSSENAFYLSPDIRKQCDWFQGDQPTKNLVKFGHKQVNVPNNVTSSPTSNPVTTTKPVTTTKPVTTTTKPVTTTTKPVTIINQPSVKPAAAKPAPAKPVAAKPVATKTATVRPPVAVKPATAAKPVAAKPAAVRPPAAAAKPVATKPEVPRPQAAKPAATKPATTKPVVKMLREVQVFEITENSAKLHWERPEPPGPYFYDLTVTSAHDQSLVLKQNLTVTDRVIGGLLAGQTYHVAVVCYLRSQVRATYHGSFSTKKSQPPPPQPARSASSSTINLMVSTEPLALTETDICKLPKDEGTCRDFILKWYYDPNTKSCARFWYGGCGGNENKFGSQKECEKVCAPVLAKPGVISVMGT

SEQ ID NO: 757688 - protein, 2192 aa, Homo sapiens
MSFFKDVKNGAAADIIFLVDSSWTIGEEHFQLVREFLYDVVKSLAVGENDFHFALVQFNGNPHTEFLLNTYRTKQEVLSHISNMSYIGGTNQTGKGLEYIMQSHLTKAAGSRAGDGVPQVIVVLTDGHSKDGLALPSAELKSADVNVFAIGVEDADEGALKEIASEPLNMHMFNLENFTSLHDIVGNLVSCVHSSVSPERAGDTETLKDITAQDSADIIFLIDGSNNTGSVNFAVILDFLVNLLEKLPIGTQQIRVGVVQFSDEPRTMFSLDTYSTKAQVLGAVKALGFAGGELANIGLALDFVVENHFTRAGGSRVEEGVPQVLVLISAGPSSDEIRYGVVALKQASVFSFGLGAQAASRAELQHIATDDNLVFTVPEFRSFGDLQEKLLPYIVGVAQRHIVLKPPTIVTQVIEVNKRDIVFLVDGSSALGLANFNAIRDFIAKVIQRLEIGQDLIQVAVAQYADTVRPEFYFNTHPTKREVITAVRKMKPLDGSALYTGSALDFVRNNLFTSSAGYRAAEGIPKLLVLITGGKSLDEISQPAQELKRSSIMAFAIGNKGADQAELEEIAFDSSLVFIPAEFRAAPLQGMLPGLLAPLRTLSGTPEVHSNKRDIIFLLDGSANVGKTNFPYVRDFVMNLVNSLDIGNDNIRVGLVQFSDTPVTEFSLNTYQTKSDILGHLRQLQLQGGSGLNTGSALSYVYANHFTEAGGSRIREHVPQLLLLLTAGQSEDSYLQAANALTRAGILTFCVGASQANKAELEQIAFNPSLVYLMDDFSSLPALPQQLIQPLTTYVSGGVEEVPLAQPESKRDILFLFDGSANLVGQFPVVRDFLYKIIDELNVKPEGTRIAVAQYSDDVKVESRFDEHQSKPEILNLVKRMKIKTGKALNLGYALDYAQRYIFVKSAGSRIEDGVLQFLVLLVAGRSSDRVDGPASNLKQSGVVPFIFQAKNADPAELEQIVLSPAFILAAESLPKIGDLHPQIVNLLKSVHNGAPAPVSGEKDVVFLLDGSEGVRSGFPLLKEFVQRVVESLDVGQDRVRVAVVQYSDRTRPEFYLNSYMNKQDVVNAVRQLTLLGGPTPNTGAALEFVLRNILVSSAGSRITEGVPQLLIVLTADRSGDDVRNPSVVVKRGGAVPIGIGIGNADITEMQTISFIPDFAVAIPTFRQLGTVQQVISERVTQLTREELSRLQPVLQPLPSPGVGGKRDVVFLIDGSQSAGPEFQYVRTLIERLVDYLDVGFDTTRVAVIQFSDDPKAEFLLNAHSSKDEVQNAVQRLRPKGGRQINVGNALEYVSRNIFKRPLGSRIEEGVPQFLVLISSGKSDDEVDDPAVELKQFGVAPFTIARNADQEELVKISLSPEYVFSVSTFRELPSLEQKLLTPITTLTSEQIQKLLASTRYPPPAVESDAADIVFLIDSSEGVRPDGFAHIRDFVSRIVRRLNIGPSKVRVGVVQFSNDVFPEFYLKTYRSQAPVLDAIRRLRLRGGSPLNTGKALEFVARNLFVKSAGSRIEDGVPQHLVLVLGGKSQDDVSRFAQVIRSSGIVSLGVGDRNIDRTELQTITNDPRLVFTVREFRELPNIEERIMNSFGPSAATPAPPGVDTPPPSRPEKKKADIVFLLDGSINFRRDSFQEVLRFVSEIVDTVYEDGDSIQVGLVQYNSDPTDEFFLKDFSTKRQIIDAINKVVYKGGRHANTKVGLEHLRVNHFVPEAGSRLDQRVPQIAFVITGGKSVEDAQDVSLALTQRGVKVFAVGVRNIDSEEVGKIASNSATAFRVGNVQELSELSEQVLETLHDAMHETLCPGVTDAAKACNLDVILGFDGSRDQNVFVAQKGFESKVDAILNRISQMHRVSCSGGRSPTVRVSVVANTPSGPVEAFDFDEYQPEMLEKFRNMRSQHPYVLTEDTLKVYLNKFRQSSPDSVKVVIHFTDGADGDLADLHRASENLRQEGVRALILVGLERVVNLERLMHLEFGRGFMYDRPLRLNLLDLDYELAEQLDNIAEKACCGVPCKCSGQRGDRGPIGSIGPKGIPGEDGYRGYPGDEGGPGERGPPGVNGTQGFQGCPGQRGVKGSRGFPGEKGEVGEIGLDGLDGEDGDKGLPGSSGEKGNPGRRGDKGPRGEKGERGDVGIRGDPGNPGQDSQERGPKGETGDLGPMVRCCTFLDSPCTEGKRKDTLLGSSAATEAKDVAFNTAT

SEQ ID NO: 757689 - protein, 2079 aa, Homo sapiens
MSFFKDVKNGAAADIIFLVDSSWTIGEEHFQLVREFLYDVVKSLAVGENDFHFALVQFNGNPHTEFLLNTYRTKQEVLSHISNMSYIGGTNQTGKGLEYIMQSHLTKAAGSRAGDGVPQVIVVLTDGHSKDGLALPSAELKSADVNVFAIGVEDADEGALKEIASEPLNMHMFNLENFTSLHDIVGNLVSCVHSSVSPERAGDTETLKDITAQDSADIIFLIDGSNNTGSVNFAVILDFLVNLLEKLPIGTQQIRVGVVQFSDEPRTMFSLDTYSTKAQVLGAVKALGFAGGELANIGLALDFVVENHFTRAGGSRVEEGVPQVLVLISAGPSSDEIRYGVVALKQASVFSFGLGAQAASRAELQHIATDDNLVFTVPEFRSFGDLQEKLLPYIVGVAQRHIVLKPPTIVTQVIEVNKRDIVFLVDGSSALGLANFNAIRDFIAKVIQRLEIGQDLIQVAVAQYADTVRPEFYFNTHPTKREVITAVRKMKPLDGSALYTGSALDFVRNNLFTSSAGYRAAEGIPKLLVLITGGKSLDEISQPAQELKRSSIMAFAIGNKGADQAELEEIAFDSSLVFIPAEFRAAPLQGMLPGLLAPLRTLSGTPEVHSNKRDIIFLLDGSANVGKTNFPYVRDFVMNLVNSLDIGNDNIRVGLVQFSDTPVTEFSLNTYQTKSDILGHLRQLQLQGGSGLNTGSALSYVYANHFTEAGGSRIREHVPQLLLLLTAGQSEDSYLQAANALTRAGILTFCVGASQANKAELEQIAFNPSLVYLMDDFSSLPALPQQLIQPLTTYVSGGVEEVPLAQPESKRDILFLFDGSANLVGQFPVVRDFLYKIIDELNVKPEGTRIAVAQYSDDVKVESRFDEHQSKPEILNLVKRMKIKTGKALNLGYALDYAQRYIFVKSAGSRIEDGVLQFLVLLVAGRSSDRVDGPASNLKQSGVVPFIFQAKNADPAELEQIVLSPAFILAAESLPKIGDLHPQIVNLLKSVHNGAPAPVSGEKDVVFLLDGSEGVRSGFPLLKEFVQRVVESLDVGQDRVRVAVVQYSDRTRPEFYLNSYMNKQDVVNAVRQLTLLGGPTPNTGAALEFVLRNILVSSAGSRITEGVPQLLIVLTADRSGDDVRNPSVVVKRGGAVPIGIGIGNADITEMQTISFIPDFAVAIPTFRQLGTVQQVISERVTQLTREELSRLQPVLQPLPSPGVGGKRDVVFLIDGSQSAGPEFQYVRTLIERLVDYLDVGFDTTRVAVIQFSDDPKAEFLLNAHSSKDEVQNAVQRLRPKGGRQINVGNALEYVSRNIFKRPLGSRIEEGVPQFLVLISSGKSDDEVDDPAVELKQFGVAPFTIARNADQEELVKISLSPEYVFSVSTFRELPSLEQKLLTPITTLTSEQIQKLLASTRYPPPAVESDAADIVFLIDSSEGVRPDGFAHIRDFVSRIVRRLNIGPSKVRVGVVQFSNDVFPEFYLKTYRSQAPVLDAIRRLRLRGGSPLNTGKALEFVARNLFVKSAGSRIEDGVPQHLVLVLGGKSQDDVSRFAQVIRSSGIVSLGVGDRNIDRTELQTITNDPRLVFTVREFRELPNIEERIMNSFGPSAATPAPPGVDTPPPSRPEKKKADIVFLLDGSINFRRDSFQEVLRFVSEIVDTVYEDGDSIQVGLVQYNSDPTDEFFLKDFSTKRQIIDAINKVVYKGGRHANTKVGLEHLRVNHFVPEAGSRLDQRVPQIAFVITGGKSVEDAQDVSLALTQRGVKVFAVGVRNIDSEEVGKIASNSATAFRVGNVQELSELSEQVLETLHDAMHETLCPGVTDAAKACNLDVILGFDGSRDQNVFVAQKGFESKVDAILNRISQMHRVSCSGGRSPTVRVSVVANTPSGPVEAFDFDEYQPEMLEKFRNMRSQHPYVLTEDTLKVYLNKFRQSSPDSVKVVIHFTDGADGDLADLHRASENLRQEGVRALILVGLERVVNLERLMHLEFGRGFMYDRPLRLNLLDLDYELAEQLDNIAEKACCGVPCKCSGQRGDRGPIGSIGPKGIPGEDGYRGYPGDEGGPGERGPPGVNGTQGFQGCPGQRGVKLSRVPQTQRN

SEQ ID NO: 757690 - protein, 844 aa, Homo sapiens
AGNPLANGIRGVWGDRLQDEWTEGRPWYPGPAGPKGNRGDSIDQCALIQSIKDKCPCCYGPLECPVFPTELAFALDTSEGVNQDTFGRMRDVVLSIVNDLTIAESNCPRGARVAVVTYNNEVTTEIRFADSKRKSVLLDKIKNLQVALTSKQQSLETAMSFVARNTFKRVRNGFLMRKVAVFFSNTPTRASPQLREAVLKLSDAGITPLFLTRQEDRQLINALQINNTAVGHALVLPAGRDLTDFLENVLTCHVCLDICNIDPSCGFGSWRPSFRDRRAAGSDVDIDMAFILDSAETTTLFQFNEMKKYIAYLVRQLDMSPDPKASQHFARVAVVQHAPSESVDNASMPPVKVEFSLTDYGSKEKLVDFLSRGMTQLQGTRALGSAIEYTIENVFESAPNPRDLKIVVLMLTGEVPEQQLEEAQRVILQAKCKGYFFVVLGIGRKVNIKEVYTFASEPNDVFFKLVDKSTELNEEPLMRFGRLLPSFVSSENAFYLSPDIRKQCDWFQGDQPTKNLVKFGHKQVNVPNNVTSSPTSNPVTTTKPVTTTKPVTTTTKPVTTTTKPVTIINQPSVKPAAAKPAPAKPVAAKPVATKTATVRPPVAVKPATAAKPVAAKPAAVRPPAAAAKPVATKPEVPRPQAAKPAATKPATTKPVVKMLREVQVFEITENSAKLHWERPEPPGPYFYDLTVTSAHDQSLVLKQNLTVTDRVIGGLLAGQTYHVAVVCYLRSQVRATYHGSFSTKKSQPPPPQPARSASSSTINLMVSTEPLALTETDICKLPKDEGTCRDFILKWYYDPNTKSCARFWYGGCGGNENKFGSQKECEKVCAPVLAKPGVISVMGT

SEQ ID NO: 757691 - protein, 1419 aa, Homo sapiens
MSFFKDVKNGAAADIIFLVDSSWTIGEEHFQLVREFLYDVVKSLAVGENDFHFALVQFNGNPHTEFLLNTYRTKQEVLSHISNMSYIGGTNQTGKGLEYIMQSHLTKAAGSRAGDGVPQVIVVLTDGHSKDGLALPSAELKSADVNVFAIGVEDADEGALKEIASEPLNMHMFNLENFTSLHDIVGNLVSCVHSSVSPERAGDTETLKDITAQDSADIIFLIDGSNNTGSVNFAVILDFLVNLLEKLPIGTQQIRVGVVQFSDEPRTMFSLDTYSTKAQVLGAVKALGFAGGELANIGLALDFVVENHFTRAGGSRVEEGVPQVLVLISAGPSSDEIRYGVVALKQASVFSFGLGAQAASRAELQHIATDDNLVFTVPEFRSFGDLQEKLLPYIVGVAQRHIVLKPPTIVTQVIEVNKRDIVFLVDGSSALGLANFNAIRDFIAKVIQRLEIGQDLIQVAVAQYADTVRPEFYFNTHPTKREVITAVRKMKPLDGSALYTGSALDFVRNNLFTSSAGYRAAEGIPKLLVLITGGKSLDEISQPAQELKRSSIMAFAIGNKGADQAELEEIAFDSSLVFIPAEFRAAPLQGMLPGLLAPLRTLSGTPEVHSNKRDIIFLLDGSANVGKTNFPYVRDFVMNLVNSLDIGNDNIRVGLVQFSDTPVTEFSLNTYQTKSDILGHLRQLQLQGGSGLNTGSALSYVYANHFTEAGGSRIREHVPQLLLLLTAGQSEDSYLQAANALTRAGILTFCVGASQANKAELEQIAFNPSLVYLMDDFSSLPALPQQLIQPLTTYVSGGVEEVPLAQPESKRDILFLFDGSANLVGQFPVVRDFLYKIIDELNVKPEGTRIAVAQYSDDVKVESRFDEHQSKPEILNLVKRMKIKTGKALNLGYALDYAQRYIFVKSAGSRIEDGVLQFLVLLVAGRSSDRVDGPASNLKQSGVVPFIFQAKNADPAELEQIVLSPAFILAAESLPKIGDLHPQIVNLLKSVHNGAPAPVSGEKDVVFLLDGSEGVRSGFPLLKEFVQRVVESLDVGQDRVRVAVVQYSDRTRPEFYLNSYMNKQDVVNAVRQLTLLGGPTPNTGAALEFVLRNILVSSAGSRITEGVPQLLIVLTADRSGDDVRNPSVVVKRGGAVPIGIGIGNADITEMQTISFIPDFAVAIPTFRQLGTVQQVISERVTQLTREELSRLQPVLQPLPSPGVGGKRDVVFLIDGSQSAGPEFQYVRTLIERLVDYLDVGFDTTRVAVIQFSDDPKAEFLLNAHSSKDEVQNAVQRLRPKGGRQINVGNALEYVSRNIFKRPLGSRIEEGVPQFLVLISSGKSDDEVDDPAVELKQFGVAPFTIARNADQEELVKISLSPEYVFSVSTFRELPSLEQKLLTPITTLTSEQIQKLLASTRYPPPAVESDAQTSSALGASS

SEQ ID NO: 757692 - protein, 384 aa, Homo sapiens
MAIAYLGSSCPSQPPSSLALSLSPTPSDFEQESGIETAMRFSPDVALAVSTTPAVLPTTNIQPVGTPFEELPSERPTLEPATSPLVVTEVPEEPSQRATTVSTTMATTAATSTGDPTVATVPATVATATPSTPAAPPFTATTAVIRTTGVRRLLPLPLTTVATARATTPEAPSPPTTAAVLDTEAPTPRLVSTATSRPRALPRPATTQEPDIPERSTLPLGTTAPGPTEVAQTPTPETFLTTIRDEPEVPVSGGPSGDFELPEEETTQPDTANEVVAVGGAAAKASSPPGTLPKGARPGPGLLDNAIDSGSSAAQLPQKSILERKEVLVAVIVGGVVGALFAAFLVTLLIYRMKKKDEGSYTLEEPKQASVTYQKPDKQEEFYA

SEQ ID NO: 757693 - protein, 370 aa, Homo sapiens
MAIAYLGSSCPSQPPSSLALSLSPTPSDFEQESGIETAMRFSPDVALAVSTTPFEELPSERPTLEPATSPLVVTEVPEEPSQRATTVSTTMATTAATSTGDPTVATVPATVATATPSTPAAPPFTATTAVIRTTGVRRLLPLPLTTVATARATTPEAPSPPTTAAVLDTEAPTPRLVSTATSRPRALPRPATTQEPDIPERSTLPLGTTAPGPTEVAQTPTPETFLTTIRDEPEVPVSGGPSGDFELPEEETTQPDTANEVVAVGGAAAKASSPPGTLPKGARPGPGLLDNAIDSGSSAAQLPQKSILERKEVLVAVIVGGVVGALFAAFLVTLLIYRMKKKDEGSYTLEEPKQASVTYQKPDKQEEFYA

SEQ ID NO: 757694 - protein, 135 aa, Homo sapiens
VLQRIRKDLWAATRWRNPSRRASHTRSLTSRRSSMPSGATVPPCSLNTTLLSSPQPGPTSPSLGLGLEPGPSSSLPSLPRSAQAASLTQIFPEEEGLLPSAPDCALTSSSLVPLIPATSLGLQDLMSDGWEEESS

SEQ ID NO: 757695 - protein, 442 aa, Homo sapiens
MKPGPPHRAGAAHGAGAGAGAAAGPGARGLLLPPLLLLLLAGRAAGAQRWRSENFERPVDLEGSGDDDSFPDDELDDLYSGSGSGYFEQESGIETAMRFSPDVALAVSTTPAVLPTTNIQPVGTPFEELPSERPTLEPATSPLVVTEVPEEPSQRATTVSTTMATTAATSTGDPTVATVPATVATATPSTPAAPPFTATTAVIRTTGVRRLLPLPLTTVATARATTPEAPSPPTTAAVLDTEAPTPRLVSTATSRPRALPRPATTQEPDIPERSTLPLGTTAPGPTEVAQTPTPETFLTTIRDEPEVPVSGGPSGDFELPEEETTQPDTANEVVAVGGAAAKASSPPGTLPKGARPGPGLLDNAIDSGSSAAQLPQKSILERKEVLVAVIVGGVVGALFAAFLVTLLIYRMKKKDEGSYTLEEPKQASVTYQKPDKQEEFYA

SEQ ID NO: 757696 - protein, 442 aa, Homo sapiens; identical to SEQ ID NO: 757695

SEQ ID NO: 757697 - protein, 370 aa, Homo sapiens; identical to SEQ ID NO: 757693

SEQ ID NO: 757698 - protein, 442 aa, Homo sapiens; identical to SEQ ID NO: 757695

SEQ ID NO: 757699 - protein, 442 aa, Homo sapiens; identical to SEQ ID NO: 757695

SEQ ID NO: 757700 - protein, 280 aa, Homo sapiens
MATTAATSTGDPTVATVPATVATATPSTPAAPPFTATTAVIRTTGVRRLLPLPLTTVATARATTPEAPSPPTTAAVLDTEAPTPRLVSTATSRPRALPRPATTQEPDIPERSTLPLGTTAPGPTEVAQTPTPETFLTTIRDEPEVPVSGGPSGDFELPEEETTQPDTANEVVAVGGAAAKASSPPGTLPKGARPGPGLLDNAIDSGSSAAQLPQKSILERKEVLVAVIVGGVVGALFAAFLVTLLIYRMKKKDEGSYTLEEPKQASVTYQKPDKQEEFYA

SEQ ID NO: 757701 - protein, 116 aa, Homo sapiens [sequence omitted]

SEQ ID NO: 757702 - protein, 442 aa, Homo sapiens; identical to SEQ ID NO: 757695

SEQ ID NO: 757703 - protein, 126 aa, Homo sapiens [sequence omitted]

SEQ ID NO: 757704 - protein, 111 aa, Homo sapiens
MSFVRVNRCGPRVGVRKTPKVKKKKTSVKQEWDNTVTDLTVHRATPEDLVRRHEIHKSKNRALVHWELQEKALKRKWRKQKPETLNLEKRRLSIMKEVMLNCIRVRKKKRR

SEQ ID NO: 757705 - protein, 855 aa, Homo sapiens
MSFVRVNRCGPRVGVRKTPKVKKKKTSVKQEWDNTVTDLTVHRATPEDLVRRHEIHKSKNRALVHWELQEKALKRKWRKQKPETLNLEKRRLSIMKEILSDQYQMQDVLEKSDHLIAAAKELFPRRRTGFPNVTVAPDSSQGPIVVNQDPITQSIFNESVIEPQALNDVDGEEEGTVNSQSGESENENELDNSLNSQSNTNTDRFLQQLTEENFELISKLWTDIQQKIATQSQITPPGTPSSALSSGEQRAALNATNAVKRLQTRLQPEESTETLDSSYVVGHVLNSRKQKQLLNKVKRKPNLHALSKPKKNISSGSTTSADLPNRTNSNLDVLKHMIHEVEHEMEEYERWTGREVKGLQSSQGLTGFTLSLVSSLCRLVRYLKESEIQLRKEVETRQQLEQVLGDHRELIDALTAEILRLREENAATQARLQQYMVTTDEQLISLTHAIKNCPVINNRQEIQASESGATGRRVMDSPERPVVNANVSVPLMFREEVAEFPQEELPVKLSQVPDPPDNMNLAKNFPAHIFEPAVLLTPPRQKSNLKFSPLQDVLRRTVQTRPAPRLPPTVEIIEKEQNWEEKTLPIDTDIQNSSEENRLFTQRWRVSHMGEDLENKTQAPFVNLSQPLCNSHSNTQQSRSPTFSEELPVLGDGQQLRTNESLIQRKDIMTRIADLTLQNSAIKAHMNNIIEPRGEQGDGLRELNKQESASDMTSTFPVAQSLTPGSMEERIAELNRQSMEARGKLLQLIEQQKLVGLNLSPPMSPVQLPLRAWTEGAKRTIEVSIPGAEAPESSKCSTVSPVSGINTRRSSGATGNSCSPLNATSGSGRFTPLNPRAKIEKQNEEGWFALSTHVS

SEQ ID NO: 757706 - protein, 869 aa, Homo sapiens
MRVRTAFGSFCTELMSFVRVNRCGPRVGVRKTPKVKKKKTSVKQEWDNTVTDLTVHRATPEDLVRRHEIHKSKNRALVHWELQEKALKRKWRKQKPETLNLEKRRLSIMKEILSDQYQMQDVLEKSDHLIAAAKELFPRRRTGFPNVTVAPDSSQGPIVVNQDPITQSIFNESVIEPQALNDVDGEEEGTVNSQSGESENENELDNSLNSQSNTNTDRFLQQLTEENFELISKLWTDIQQKIATQSQITPPGTPSSALSSGEQRAALNATNAVKRLQTRLQPEESTETLDSSYVVGHVLNSRKQKQLLNKVKRKPNLHALSKPKKNISSGSTTSADLPNRTNSNLDVLKHMIHEVEHEMEEYERWTGREVKGLQSSQGLTGFTLSLVSSLCRLVRYLKESEIQLRKEVETRQQLEQVLGDHRELIDALTAEILRLREENAATQARLQQYMVTTDEQLISLTHAIKNCPVINNRQEIQASESGATGRRVMDSPERPVVNANVSVPLMFREEVAEFPQEELPVKLSQVPDPPDNMNLAKNFPAHIFEPAVLLTPPRQKSNLKFSPLQDVLRRTVQTRPAPRLPPTVEIIEKEQNWEEKTLPIDTDIQNSSEENRLFTQRWRVSHMGEDLENKTQAPFVNLSQPLCNSHSNTQQSRSPTFSEELPVLGDGQQLRTNESLIQRKDIMTRIADLTLQNSAIKAHMNNIIEPRGEQGDGLRELNKQESASDMTSTFPVAQSLTPGSMEERIAELNRQSMEARGKLLQLIEQQKLVGLNLSPPMSPVQLPLRAWTEGAKRTIEVSIPGAEAPESSKCSTVSPVSGINTRRSSGATGNSCSPLNATSGSGRFTPLNPRAKIEKQNEEGWFALSTHVS

SEQ ID NO: 757707 - protein, 855 aa, Homo sapiens; identical to SEQ ID NO: 757705

SEQ ID NO: 757708 - protein, 896 aa, Homo sapiens
DCSVGGVHRVAGERQTIQGALGPGASFKSMDVRGASQKAPPMSFVRVNRCGPRVGVRKTPKVKKKKTSVKQEWDNTVTDLTVHRATPEDLVRRHEIHKSKNRALVHWELQEKALKRKWRKQKPETLNLEKRRLSIMKEILSDQYQMQDVLEKSDHLIAAAKELFPRRRTGFPNVTVAPDSSQGPIVVNQDPITQSIFNESVIEPQALNDVDGEEEGTVNSQSGESENENELDNSLNSQSNTNTDRFLQQLTEENFELISKLWTDIQQKIATQSQITPPGTPSSALSSGEQRAALNATNAVKRLQTRLQPEESTETLDSSYVVGHVLNSRKQKQLLNKVKRKPNLHALSKPKKNISSGSTTSADLPNRTNSNLDVLKHMIHEVEHEMEEYERWTGREVKGLQSSQGLTGFTLSLVSSLCRLVRYLKESEIQLRKEVETRQQLEQVLGDHRELIDALTAEILRLREENAATQARLQQYMVTTDEQLISLTHAIKNCPVINNRQEIQASESGATGRRVMDSPERPVVNANVSVPLMFREEVAEFPQEELPVKLSQVPDPPDNMNLAKNFPAHIFEPAVLLTPPRQKSNLKFSPLQDVLRRTVQTRPAPRLPPTVEIIEKEQNWEEKTLPIDTDIQNSSEENRLFTQRWRVSHMGEDLENKTQAPFVNLSQPLCNSHSNTQQSRSPTFSEELPVLGDGQQLRTNESLIQRKDIMTRIADLTLQNSAIKAHMNNIIEPRGEQGDGLRELNKQESASDMTSTFPVAQSLTPGSMEERIAELNRQSMEARGKLLQLIEQQKLVGLNLSPPMSPVQLPLRAWTEGAKRTIEVSIPGAEAPESSKCSTVSPVSGINTRRSSGATGNSCSPLNATSGSGRFTPLNPRAKIEKQNEEGWFALSTHVS

SEQ ID NO: 757709 - protein, 364 aa, Homo sapiens [sequence omitted]

SEQ ID NO: 757710 - protein, 377 aa, Homo sapiens
MSFVRVNRCGPRVGVRKTPKVKKKKTSVKQEWDNTVTDLTVHRATPEDLVRRHEIHKSKNRALVHWELQEKALKRKWRKQKPETLNLEKRRLSIMKEILSDQYQMQDVLEKSDHLIAAAKELFPRRRTGFPNVTVAPDSSQGPIVVNQDPITQSIFNESVIEPQALNDVDGEEEGTVNSQSGESENENELDNSLNSQSNTNTDRFLQQLTEENFELISKLWTDIQQKIATQSQITPPGTPSSALSSGEQRAALNATNAVKRLQTRLQPEESTETLDSSYVVGHVLNSRKQKQLLNKEGAKRTIEVSIPGAEAPESSKCSTVSPVSGINTRRSSGATGNSCSPLNATSGSGRFTPLNPRAKIEKQNEEGWFALSTHVS

SEQ ID NO: 757711 - protein, 80 aa, Homo sapiens
MSRPGLGYGPQAWSSMLGRGLLTDELPPGIGVGVGAVVSGSERLCTGRSRTGSSSSSASADRAAMAKRSGSSRSSAAAAA

SEQ ID NO: 757712 - protein, 188 aa, Homo sapiens
GQTSERCIWDQILTVRPRHKGSNHPFPSELPYRDPCSNGGKGRNAAAQQMDKKRTGLVSGTFSEENVIREFNLNELYQRARNYQRLETISLRSSLWLQPPPQCQMGKTRRINKILTLAVLPLLSIPGSFHNHKPEAAAFYLCFPFGCDWVGQHAASDFKEASRELSGTLQEGLPCCGQLFHWSKKEIS

SEQ ID NO: 757713 - protein, 117 aa, Homo sapiens
SGQTVPVPGRGGEFSLRPRTLDGGVARRRASPAWVGLPFALEAGLSAGGPLANPEVDTREMGGIGKGTQPFRPFPQSRPASLPCGCRRLQCHSPGFRLGRRRDCRPDPNAEALRLLM

SEQ ID NO: 757714 - protein, 467 aa, Homo sapiens [sequence omitted]

SEQ ID NO: 757715 - protein, 444 aa, Homo sapiens
MQQIPQEKSINDYLEKFYQLPSNQYQSTRKNGTNVIVEKLKEMQRFFGLNVTGKPNEETLDMMKKPRCGVPDSGGFMLTPGNPKWERTNLTYRIRNYTPQLSEAEVERAIKDAFELWSVASPLIFTRISQGEADINIAFYQRDHGDNSPFDGPNGILAHAFQPGQGIGGDAHFDAEETWTNTSANYNLFLVAAHEFGHSLGLAHSSDPGALMYPNYAFRETSNYSLPQDDIDGIQAIYGLSSNPIQPTGPSTPKPCDPSLTFDAITTLRGEILFFKDRYFWRRHPQLQRVEMNFISLFWPSLPTGIQAAYEDFDRDLIFLFKGNQYWALSGYDILQGYPKDISNYGFPSSVQAIDAAVFYRSKTYFFVNDQFWRYDNQRQFMEPGYPKSISGAFPGIESKVDAVFQQEHFFHVFSGPRYYAFDLIAQRVTRVARGNKWLNCRYG

SEQ ID NO: 757716 - protein, 444 aa, Homo sapiens; identical to SEQ ID NO: 757715

SEQ ID NO: 757717 - protein, 135 aa, Homo sapiens [sequence omitted]

SEQ ID NO: 757718 - protein, 84 aa, Homo sapiens
MPVSKCPKKSESLWKGWDRKAQRNGLRSQVYAVNGDYYVGEWKDNVKHGKGTQVWKKKGAIYGGGLEVWGSETATAPSAFLDQQ

SEQ ID NO: 757719 - protein, 86 aa, Homo sapiens
MPVSKCPKKSESLWKGWDRKAQRNGLRSQVYAVNGDYYVGEWKDNVKHGSSVFQTTSITALQKTVQYGFCWVVWTPNPQLIQSPKQ

SEQ ID NO: 757720 - protein, 2468 aa, Homo sapiens
MATVVVEATEPEPSGSIANPAASTSPSLSHRFLDSKFYLLVVVGEIVTEEHLRRAIGNIELGIRSWDTNLIECNLDQELKLFVSRHSARFSPEVPGQKILHHRSDVLETVVLINPSDEAVSTEVRLMITDAARHKLLVLTGQCFENTGELILQSGSFSFQNFIEIFTDQEIGELLSTTHPANKASLTLFCPEEGDWKNSNLDRHNLQDFINIKLNSASILPEMEGLSEFTEYLSESVEVPSPFDILEPPTSGGFLKLSKPCCYIFPGGRGDSALFAVNGFNMLINGGSERKSCFWKLIRHLDRVDSILLTHIGDDNLPGINSMLQRKIAELEEEQSQGSTTNSDWMKNLISPDLGVVFLNVPENLKNPEPNIKMKRSIEEACFTLQYLNKLSMKPEPLFRSVGNTIDPVILFQKMGVGKLEMYVLNPVKSSKEMQYFMQQWTGTNKDKAEFILPNGQEVDLPISYLTSVSSLIVWHPANPAEKIIRVLFPGNSTQYNILEGLEKLKHLDFLKQPLATQKDLTGQVPTPVVKQTKLKQRADSRESLKPAAKPLPSKSVRKESKEETPEVTKVNHVEKPPKVESKEKVMVKKDKPVKTETKPSVTEKEVPSKEEPSPVKAEVAEKQATDVKPKAAKEKTVKKETKVKPEDKKEEKEKPKKEVAKKEDKTPIKKEEKPKKEEVKKEVKKEIKKEEKKEPKKEVKKETPPKEVKKEVKKEEKKEVKKEEKEPKKEIKKLPKDAKKSSTPLSEAKKPAALKPKVPKKEESVKKDSVAAGKPKEKGKIKVIKKEGKAAEAVAAAVGTGATTAAVMAAAGIAAIGPAKELEAERSLMSSPEDLTKDFEELKAEEVDVTKDIKPQLELIEDEEKLKETEPVEAYVIQKEREVTKGPAESPDEGITTTEGEGECEQTPEELEPVEKQGVDDIEKFEDEGAGFEESSETGDYEEKAETEEAEEPEEDGEEHVCVSASKHSPTEDEESAKAEADAYIREKRESVASGDDRAEEDMDEAIEKGEAEQSEEEADEEDKAEDAREEEYEPEKMEAEDYVMAVVDKAAEAGGAEEQYGFLTTPTKQLGAQSPGREPASSIHDETLPGGSESEATASDEENREDQPEEFTATSGYTQSTIEISSEPTPMDEMSTPRDVMSDETNNEETESPSQEFVNITKYESSLYSQEYSKPADVTPLNGFSEGSKTDATDGKDYNASASTISPPSSMEEDKFSRSALRDAYCSEVKASTTLDIKDSISAVSSEKVSPSKSPSLSPSPPSPLEKTPLGERSVNFSLTPNEIKVSAEAEVAPVSPEVTQEVVEEHCASPEDKTLEVVSPSQSVTGSAGHTPYYQSPTDEKSSHLPTEVIEKPPAVPVSFEFSDAKDENERASVSPMDEPVPDSESPIEKVLSPLRSPPLIGSESAYESFLSADDKASGRGAESPFEEKSGKQGSPDQVSPVSEMTSTSLYQDKQEGKSTDFAPIKEDFGQEKKTDDVEAMSSQPALALDERKLGDVSPTQIDVSQFGSFKEDTKMSISEGTVSDKSATPVDEGVAEDTYSHMEGVASVSTASVATSSFPEPTTDDVSPSLHAEVGSPHSTEVDDSLSVSVVQTPTTFQETEMSPSKEECPRPMSISPPDFSPKTAKSRTPVQDHRSEQSSMSIEFGQESPEQSLAMDFSRQSPDHPTVGAGVLHITENGPTEVDYSPSDMQDSSLSHKIPPMEEPSYTQDNDLSELISVSQVEASPSTSSAHTPSQIASPLQEDTLSDVAPPRDMSLYASLTSEKVQSLEGEKLSPKSDISPLTPRESSPLYSPTFSDSTSAVKEKTATCHSSSSPPIDAASAEPYGFRASVLFDTMQHHLALNRDLSTPGLEKDSGGKTPGDFSYAYQKPEETTRSPDEEDYDYESYEKTTRTSDVGGYYYEKIERTTKSPSDSGYSYETIGKTTKTPEDGDYSYEIIEKTTRTPEEGGYSYDISEKTTSPPEVSGYSYEKTERSRRLLDDISNGYDDSEDGGHTLGDPSYSYETTEKITSFPESEGYSYETSTKTTRTPDTSTYCYETAEKITRTPQASTYSYETSDLCYTAEKKSPSEARQDVDLCLVSSCEYKHPKTELSPSFINPNPLEWFASEEPTEESEKPLTQSGGAPPPPGGKQQGRQCDETPPTSVSESAPSQTDSDVPPETEECPSITADANIDSEDESETIPTDKTVTYKHMDPPPAPVQDRSPSPRHPDVSMVDPEALAIEQNLGKALKKDLKEKTKTKKPGTKTKSSSPVKKSDGKSKPLAASPKPAGLKESSDKVSRVASPKKKESVEKAAKPTTTPEVKAARGEEKDKETKNAANASASKSAKTATAGPGTTKTTKSSAVPPGLPVYLDLCYIPNHSNSKNVDVEFFKRVRSSYYVVSGNDPAAEEPSRAVLDALLEGKAQWGSNMQVTLIPTHDSEVMREWYQETHEKQQDLNIMVLASSSTVVMQDESFPACKIEL

SEQ ID NO: 757721 - protein, 2468 aa, Homo sapiens; identical to SEQ ID NO: 757720

SEQ ID NO: 757722 - protein, 2342 aa, Homo sapiens
MITDAARHKLLVLTGQCFENTGELILQSGSFSFQNFIEIFTDQEIGELLSTTHPANKASLTLFCPEEGDWKNSNLDRHNLQDFINIKLNSASILPEMEGLSEFTEYLSESVEVPSPFDILEPPTSGGFLKLSKPCCYIFPGGRGDSALFAVNGFNMLINGGSERKSCFWKLIRHLDRVDSILLTHIGDDNLPGINSMLQRKIAELEEEQSQGSTTNSDWMKNLISPDLGVVFLNVPENLKNPEPNIKMKRSIEEACFTLQYLNKLSMKPEPLFRSVGNTIDPVILFQKMGVGKLEMYVLNPVKSSKEMQYFMQQWTGTNKDKAEFILPNGQEVDLPISYLTSVSSLIVWHPANPAEKIIRVLFPGNSTQYNILEGLEKLKHLDFLKQPLATQKDLTGQVPTPVVKQTKLKQRADSRESLKPAAKPLPSKSVRKESKEETPEVTKVNHVEKPPKVESKEKVMVKKDKPVKTETKPSVTEKEVPSKEEPSPVKAEVAEKQATDVKPKAAKEKTVKKETKVKPEDKKEEKEKPKKEVAKKEDKTPIKKEEKPKKEEVKKEVKKEIKKEEKKEPKKEVKKETPPKEVKKEVKKEEKKEVKKEEKEPKKEIKKLPKDAKKSSTPLSEAKKPAALKPKVPKKEESVKKDSVAAGKPKEKGKIKVIKKEGKAAEAVAAAVGTGATTAAVMAAAGIAAIGPAKELEAERSLMSSPEDLTKDFEELKAEEVDVTKDIKPQLELIEDEEKLKETEPVEAYVIQKEREVTKGPAESPDEGITTTEGEGECEQTPEELEPVEKQGVDDIEKFEDEGAGFEESSETGDYEEKAETEEAEEPEEDGEEHVCVSASKHSPTEDEESAKAEADAYIREKRESVASGDDRAEEDMDEAIEKGEAEQSEEEADEEDKAEDAREEEYEPEKMEAEDYVMAVVDKAAEAGGAEEQYGFLTTPTKQLGAQSPGREPASSIHDETLPGGSESEATASDEENREDQPEEFTATSGYTQSTIEISSEPTPMDEMSTPRDVMSDETNNEETESPSQEFVNITKYESSLYSQEYSKPADVTPLNGFSEGSKTDATDGKDYNASASTISPPSSMEEDKFSRSALRDAYCSEVKASTTLDIKDSISAVSSEKVSPSKSPSLSPSPPSPLEKTPLGERSVNFSLTPNEIKVSAEAEVAPVSPEVTQEVVEEHCASPEDKTLEVVSPSQSVTGSAGHTPYYQSPTDEKSSHLPTEVIEKPPAVPVSFEFSDAKDENERASVSPMDEPVPDSESPIEKVLSPLRSPPLIGSESAYESFLSADDKASGRGAESPFEEKSGKQGSPDQVSPVSEMTSTSLYQDKQEGKSTDFAPIKEDFGQEKKTDDVEAMSSQPALALDERKLGDVSPTQIDVSQFGSFKEDTKMSISEGTVSDKSATPVDEGVAEDTYSHMEGVASVSTASVATSSFPEPTTDDVSPSLHAEVGSPHSTEVDDSLSVSVVQTPTTFQETEMSPSKEECPRPMSISPPDFSPKTAKSRTPVQDHRSEQSSMSIEFGQESPEQSLAMDFSRQSPDHPTVGAGVLHITENGPTEVDYSPSDMQDSSLSHKIPPMEEPSYTQDNDLSELISVSQVEASPSTSSAHTPSQIASPLQEDTLSDVAPPRDMSLYASLTSEKVQSLEGEKLSPKSDISPLTPRESSPLYSPTFSDSTSAVKEKTATCHSSSSPPIDAASAEPYGFRASVLFDTMQHHLALNRDLSTPGLEKDSGGKTPGDFSYAYQKPEETTRSPDEEDYDYESYEKTTRTSDVGGYYYEKIERTTKSPSDSGYSYETIGKTTKTPEDGDYSYEIIEKTTRTPEEGGYSYDISEKTTSPPEVSGYSYEKTERSRRLLDDISNGYDDSEDGGHTLGDPSYSYETTEKITSFPESEGYSYETSTKTTRTPDTSTYCYETAEKITRTPQASTYSYETSDLCYTAEKKSPSEARQDVDLCLVSSCEYKHPKTELSPSFINPNPLEWFASEEPTEESEKPLTQSGGAPPPPGGKQQGRQCDETPPTSVSESAPSQTDSDVPPETEECPSITADANIDSEDESETIPTDKTVTYKHMDPPPAPVQDRSPSPRHPDVSMVDPEALAIEQNLGKALKKDLKEKTKTKKPGTKTKSSSPVKKSDGKSKPLAASPKPAGLKESSDKVSRVASPKKKESVEKAAKPTTTPEVKAARGEEKDKETKNAANASASKSAKTATAGPGTTKTTKSSAVPPGLPVYLDLCYIPNHSNSKNVDVEFFKRVRSSYYVVSGNDPAAEEPSRAVLDALLEGKAQWGSNMQVTLIPTHDSEVMREWYQETHEKQQDLNIMVLASSSTVVMQDESFPACKIEL

SEQ ID NO: 757723 - protein, 2475 aa, Homo sapiens
RIELGTSRGGVVVEATEPEPSGSIANPAASTSPSLSHRFLDSKFYLLVVVGEIVTEEHLRRAIGNIELGIRSWDTNLIECNLDQELKLFVSRHSARFSPEVPGQKILHHRSDVLETVVLINPSDEAVSTEVRLMITDAARHKLLVLTGQCFENTGELILQSGSFSFQNFIEIFTDQEIGELLSTTHPANKASLTLFCPEEGDWKNSNLDRHNLQDFINIKLNSASILPEMEGLSEFTEYLSESVEVPSPFDILEPPTSGGFLKLSKPCCYIFPGGRGDSALFAVNGFNMLINGGSERKSCFWKLIRHLDRVDSILLTHIGDDNLPGINSMLQRKIAELEEEQSQGSTTNSDWMKNLISPDLGVVFLNVPENLKNPEPNIKMKRSIEEACFTLQYLNKLSMKPEPLFRSVGNTIDPVILFQKMGVGKLEMYVLNPVKSSKEMQYFMQQWTGTNKDKAEFILPNGQEVDLPISYLTSVSSLIVWHPANPAEKIIRVLFPGNSTQYNILEGLEKLKHLDFLKQPLATQKDLTGQVPTPVVKQTKLKQRADSRESLKPAAKPLPSKSVRKESKEETPEVTKVNHVEKPPKVESKEKVMVKKDKPVKTETKPSVTEKEVPSKEEPSPVKAEVAEKQATDVKPKAAKEKTVKKETKVKPEDKKEEKEKPKKEVAKKEDKTPIKKEEKPKKEEVKKEVKKEIKKEEKKEPKKEVKKETPPKEVKKEVKKEEKKEVKKEEKEPKKEIKKLPKDAKKSSTPLSEAKKPAALKPKVPKKEESVKKDSVAAGKPKEKGKIKVIKKEGKAAEAVAAAVGTGATTAAVMAAAGIAAIGPAKELEAERSLMSSPEDLTKDFEELKAEEVDVTKDIKPQLELIEDEEKLKETEPVEAYVIQKEREVTKGPAESPDEGITTTEGEGECEQTPEELEPVEKQGVDDIEKFEDEGAGFEESSETGDYEEKAETEEAEEPEEDGEEHVCVSASKHSPTEDEESAKAEADAYIREKRESVASGDDRAEEDMDEAIEKGEAEQSEEEADEEDKAEDAREEEYEPEKMEAEDYVMAVVDKAAEAGGAEEQYGFLTTPTKQLGAQSPGREPASSIHDETLPGGSESEATASDEENREDQPEEFTATSGYTQSTIEISSEPTPMDEMSTPRDVMSDETNNEETESPSQEFVNITKYESSLYSQEYSKPADVTPLNGFSEGSKTDATDGKDYNASASTISPPSSMEEDKFSRSALRDAYCSEVKASTTLDIKDSISAVSSEKVSPSKSPSLSPSPPSPLEKTPLGERSVNFSLTPNEIKVSAEAEVAPVSPEVTQEVVEEHCASPEDKTLEVVSPSQSVTGSAGHTPYYQSPTDEKSSHLPTEVIEKPPAVPVSFEFSDAKDENERASVSPMDEPVPDSESPIEKVLSPLRSPPLIGSESAYESFLSADDKASGRGAESPFEEKSGKQGSPDQVSPVSEMTSTSLYQDKQEGKSTDFAPIKEDFGQEKKTDDVEAMSSQPALALDERKLGDVSPTQIDVSQFGSFKEDTKMSISEGTVSDKSATPVDEGVAEDTYSHMEGVASVSTASVATSSFPEPTTDDVSPSLHAEVGSPHSTEVDDSLSVSVVQTPTTFQETEMSPSKEECPRPMSISPPDFSPKTAKSRTPVQDHRSEQSSMSIEFGQESPEQSLAMDFSRQSPDHPTVGAGVLHITENGPTEVDYSPSDMQDSSLSHKIPPMEEPSYTQDNDLSELISVSQVEASPSTSSAHTPSQIASPLQEDTLSDVAPPRDMSLYASLTSEKVQSLEGEKLSPKSDISPLTPRESSPLYSPTFSDSTSAVKEKTATCHSSSSPPIDAASAEPYGFRASVLFDTMQHHLALNRDLSTPGLEKDSGGKTPGDFSYAYQKPEETTRSPDEEDYDYESYEKTTRTSDVGGYYYEKIERTTKSPSDSGYSYETIGKTTKTPEDGDYSYEIIEKTTRTPEEGGYSYDISEKTTSPPEVSGYSYEKTERSRRLLDDISNGYDDSEDGGHTLGDPSYSYETTEKITSFPESEGYSYETSTKTTRTPDTSTYCYETAEKITRTPQASTYSYETSDLCYTAEKKSPSEARQDVDLCLVSSCEYKHPKTELSPSFINPNPLEWFASEEPTEESEKPLTQSGGAPPPPGGKQQGRQCDETPPTSVSESAPSQTDSDVPPETEECPSITADANIDSEDESETIPTDKTVTYKHMDPPPAPVQDRSPSPRHPDVSMVDPEALAIEQNLGKALKKDLKEKTKTKKPGTKTKSSSPVKKSDGKSKPLAASPKPAGLKESSDKVSRVASPKKKESVEKAAKPTTTPEVKAARGEEKDKETKNAANASASKSAKTATAGPGTTKTTKSSAVPPGLPVYLDLCYIPNHSNSKNVDVEFFKRVRSSYYVVSGNDPAAEEPSRAVLDALLEGKAQWGSNMQVTLIPTHDSEVMREWYQETHEKQQDLNIMVLASSSTVVMQDESFPACKIEL

SEQ ID NO: 757724 - protein, 2376 aa, Homo sapiens
MATVVVEATEPEPSGSIANPAASTSPSLSHRFLDSKFYLLVVVGEIVTEEHLRRAIGNIELGIRSWDTNLIECNLDQELKLFVSRHSARFSPEVPGQKILHHRSDVLETVVLINPSDEAVSTEVRLMITDAARHKLLVLTGQCFENTGELILQSGSFSFQNFIEIFTDQEIGELLSTTHPANKASLTLFCPEEGDWKNSNLDRHNLQDFINIKLNSASILPEMEGLSEFTEYLSESVEVPSPFDILEPPTSGGFLKLSKPCCYIFPGGRGDSALFAVNGFNMLINGGSERKSCFWKLIRHLDRVDSILLTHIGDDNLPGINSMLQRKIAELEEEQSQGSTTNSDWMKNLISPDLGVVFLNVPENLKNPEPNIKMKRSIEEACFTLQYLNKLSMKPEPLFRSVGNTIDPVILFQKMGVGKLEMYVLNPVKSSKEMQYFMQQWTGTNKDKAEFILPNGQEVDLPISYLTSVSSLIVWHPANPAEKIIRVLFPGNSTQYNILEGLEKLKHLDFLKQPLATQKDLTGQVPTPVVKQTKLKQRADSRESLKPAAKPLPSKSVRKESKEETPEVTKVNHVEKPPKVEKPKKEEVKKEVKKEIKKEEKKEPKKEVKKETPPKEVKKEVKKEEKKEVKKEEKEPKKEIKKLPKDAKKSSTPLSEAKKPAALKPKVPKKEESVKKDSVAAGKPKEKGKIKVIKKEGKAAEAVAAAVGTGATTAAVMAAAGIAAIGPAKELEAERSLMSSPEDLTKDFEELKAEEVDVTKDIKPQLELIEDEEKLKETEPVEAYVIQKEREVTKGPAESPDEGITTTEGEGECEQTPEELEPVEKQGVDDIEKFEDEGAGFEESSETGDYEEKAETEEAEEPEEDGEEHVCVSASKHSPTEDEESAKAEADAYIREKRESVASGDDRAEEDMDEAIEKGEAEQSEEEADEEDKAEDAREEEYEPEKMEAEDYVMAVVDKAAEAGGAEEQYGFLTTPTKQLGAQSPGREPASSIHDETLPGGSESEATASDEENREDQPEEFTATSGYTQSTIEISSEPTPMDEMSTPRDVMSDETNNEETESPSQEFVNITKYESSLYSQEYSKPADVTPLNGFSEGSKTDATDGKDYNASASTISPPSSMEEDKFSRSALRDAYCSEVKASTTLDIKDSISAVSSEKVSPSKSPSLSPSPPSPLEKTPLGERSVNFSLTPNEIKVSAEAEVAPVSPEVTQEVVEEHCASPEDKTLEVVSPSQSVTGSAGHTPYYQSPTDEKSSHLPTEVIEKPPAVPVSFEFSDAKDENERASVSPMDEPVPDSESPIEKVLSPLRSPPLIGSESAYESFLSADDKASGRGAESPFEEKSGKQGSPDQVSPVSEMTSTSLYQDKQEGKSTDFAPIKEDFGQEKKTDDVEAMSSQPALALDERKLGDVSPTQIDVSQFGSFKEDTKMSISEGTVSDKSATPVDEGVAEDTYSHMEGVASVSTASVATSSFPEPTTDDVSPSLHAEVGSPHSTEVDDSLSVSVVQTPTTFQETEMSPSKEECPRPMSISPPDFSPKTAKSRTPVQDHRSEQSSMSIEFGQESPEQSLAMDFSRQSPDHPTVGAGVLHITENGPTEVDYSPSDMQDSSLSHKIPPMEEPSYTQDNDLSELISVSQVEASPSTSSAHTPSQIASPLQEDTLSDVAPPRDMSLYASLTSEKVQSLEGEKLSPKSDISPLTPRESSPLYSPTFSDSTSAVKEKTATCHSSSSPPIDAASAEPYGFRASVLFDTMQHHLALNRDLSTPGLEKDSGGKTPGDFSYAYQKPEETTRSPDEEDYDYESYEKTTRTSDVGGYYYEKIERTTKSPSDSGYSYETIGKTTKTPEDGDYSYEIIEKTTRTPEEGGYSYDISEKTTSPPEVSGYSYEKTERSRRLLDDISNGYDDSEDGGHTLGDPSYSYETTEKITSFPESEGYSYETSTKTTRTPDTSTYCYETAEKITRTPQASTYSYETSDLCYTAEKKSPSEARQDVDLCLVSSCEYKHPKTELSPSFINPNPLEWFASEEPTEESEKPLTQSGGAPPPPGGKQQGRQCDETPPTSVSESAPSQTDSDVPPETEECPSITADANIDSEDESETIPTDKTVTYKHMDPPPAPVQDRSPSPRHPDVSMVDPEALAIEQNLGKALKKDLKEKTKTKKPGTKTKSSSPVKKSDGKSKPLAASPKPAGLKESSDKVSRVASPKKKESVEKAAKPTTTPEVKAARGEEKDKETKNAANASASKSAKTATAGPGTTKTTKSSAVPPGLPVYLDLCYIPNHSNSKNVDVEFFKRVRSSYYVVSGNDPAAEEPSRAVLDALLEGKAQWGSNMQVTLIPTHDSEVMREWYQETHEKQQDLNIMVLASSSTVVMQDESFPACKIEL

SEQ ID NO: 757725 - protein, 2127 aa, Homo sapiens
MATVVVEATEPEPSGSIANPAASTSPSLSHRFLDSKFYLLVVVGEIVTEEHLRRAIGNIELGIRSWDTNLIECNLDQELKLFVSRHSARFSPEVPGQKILHHRSDVLETVVLINPSDEAVSTEVRLMITDAARHKLLVLTGQCFENTGELILQSGSFSFQNFIEIFTDQEIGELLSTTHPANKASLTLFCPEEGDWKNSNLDRHNLQDFINIKLNSASILPEMEGLSEFTEYLSESVEVPSPFDILEPPTSGGFLKLSKPCCYIFPGGRGDSALFAVNGFNMLINGGSERKSCFWKLIRHLDRVDSILLTHIGDDNLPGINSMLQRKIAELEEEQSQGSTTNSDWMKNLISPDLGVVFLNVPENLKNPEPNIKMKRSIEEACFTLQYLNKLSMKPEPLFRSVGNTIDPVILFQKMGVGKLEMYVLNPVKSSKEMQYFMQQWTGTNKDKAEFILPNGQEVDLPISYLTSVSSLIVWHPANPAEKIIRVLFPGNSTQYNILEGLEKLKHLDFLKQPLATQKDLTGQVPTPVVKQTKLKQRADSRESLKPAAKPLPSKSVRKESKEETPEVTKVNHVEKPPKVESKEKVMVKKDKPVKTETKPSVTEKEVPSKEEPSPVKAEVAEKQATDVKPKAAKEKTVKKETKVKPEDKKEEKEKPKKEVAKKEDKTPIKKEEKPKKEEVKKEVKKEIKKEEKKEPKKEVKKETPPKEVKKEVKKEEKKEVKKEEKEPKKEIKKLPKDAKKSSTPLSEAKKPAALKPKVPKKEESVKKDSVAAGKPKEKGKIKVIKKEGKAAEAVAAAVGTGATTAAVMAAAGIAAIGPAKELEAERSLMSSPEDLTKDFEELKAEEVDVTKDIKPQLELIEDEEKLKETEPVEAYVIQKEREVTKGPAESPDEGITTTEGEGECEQTPEELEPVEKQGVDDIEKFEDEGAGFEESSETGDYEEKAETEEAEEPEEDGEEHVCVSASKHSPTEDEESAKAEADAYIREKRESVASGDDRAEEDMDEAIEKGEAEQSEEEADEEDKAEDAREEEYEPEKMEAEDYVMAVVDKAAEAGGAEEQYGFLTTPTKQLGAQSPGREPASSIHDETLPGGSESEATASDEENREDQPEEFTATSGYTQSTIEISSEPTPMDEMSTPRDVMSDETNNEETESPSQEFVNITKYESSLYSQEYSKPADVTPLNGFSEGSKTDATDGKDYNASASTISPPSSMEEDKFSRSALRDAYCSEVKASTTLDIKDSISAVSSEKVSPSKSPSLSPSPPSPLEKTPLGERSVNFSLTPNEIKVSAEAEVAPVSPEVTQEVVEEHCASPEDKTLEVVSPSQSVTGSAGHTPYYQSPTDEKSSHLPTEVIEKPPAVPVSFEFSDAKDENERASVSPMDEPVPDSESPIEKVLSPLRSPPLIGSESAYESFLSADDKASGRGAESPFEEKSGKQGSPDQVSPVSEMTSTSLYQDKQEGKSTDFAPIKEDFGQEKKTDDVEAMSSQPALALDERKLGDVSPTQIDVSQFGSFKEDTKMSISEGTVSDKSATPVDEGVAEDTYSHMEGVASVSTASVATSSFPEPTTDDVSPSLHAEVGSPHSTEVDDSLSVSVVQTPTTFQETEMSPSKEECPRPMSISPPDFSPKTAKSRTPVQDHRSEQSSMSIEFGQESPEQSLAMDFSRQSPDHPTVGAGVLHITENGPTEVDYSPSDMQDSSLSHKIPPMEEPSYTQDNDLSELISVSQVEASPSTSSAHTPSQIASPLQEDTLSDVAPPRDMSLYASLTSEKVQSLEGEKLSPKSDISPLTPRESSPLYSPTFSDSTSAVKEKTATCHSSSSPPIDAASAEPYGFRASVLFDTMQHHLALNRDLSTPGLEKDSGGKTPGDFSYAYQKPEETTRSPDEEDYDYESYEKTTRTSDVGGYYYEKIERTTKSPSDSGYSYETIGKTTKTPEDGDYSYEIIEKTTRTPEEGGYSYDISEKTTSPPEVSGYSYEKTERSRRLLDDISNGYDDSEDGGHTLGDPSYSYETTEKITSFPESEGYSYETSTKTTRTPDTSTYCYETAEKITRTPQASTYSYETSDLCYTAEKKSPSEARQDVDLCLVSSCEYKHPKTELSPFSKKSIHLVKSLNNYLPNAILCHGDASH

SEQ ID NO: 757726 - protein, 2468 aa, Homo sapiens; identical to SEQ ID NO: 757720

SEQ ID NO: 757727 - protein, 2468 aa, Homo sapiens; identical to SEQ ID NO: 757720

SEQ ID NO: 757728 - protein, 1871 aa, Homo sapiens
  misc_feature (58)..(58): Xaa can be any naturally occurring amino acid
MGRNPYVCAPPSTAPLKDEESAKAEADAYIREKRESVASGDDRAEEDMDEAIEKGEAXQSKEVAKKEDKTPIKKEEKPKKEEVKKEVKKEIKKEEKKEPKKEVKKETPPKEVKKEVKKEEKKEVKKEEKEPKKEIKKLPKDAKKSSTPLSEAKKPAALKPKVPKKEESVKKDSVAAGKPKEKGKIKVIKKEGKAAEAVAAAVGTGATTAAVMAAAGIAAIGPAKELEAERSLMSSPEDLTKDFEELKAEEVDVTKDIKPQLELIEDEEKLKETEPVEAYVIQKEREVTKGPAESPDEGITTTEGEGECEQTPEELEPVEKQGVDDIEKFEDEGAGFEESSETGDYEEKAETEEAEEPEEDGEEHVCVSASKHSPTEDEESAKAEADAYIREKRESVASGDDRAEEDMDEAIEKGEAEQSEEEADEEDKAEDAREEEYEPEKMEAEDYVMAVVDKAAEAGGAEEQYGFLTTPTKQLGAQSPGREPASSIHDETLPGGSESEATASDEENREDQPEEFTATSGYTQSTIEISSEPTPMDEMSTPRDVMSDETNNEETESPSQEFVNITKYESSLYSQEYSKPADVTPLNGFSEGSKTDATDGKDYNASASTISPPSSMEEDKFSRSALRDAYCSEVKASTTLDIKDSISAVSSEKVSPSKSPSLSPSPPSPLEKTPLGERSVNFSLTPNEIKVSAEAEVAPVSPEVTQEVVEEHCASPEDKTLEVVSPSQSVTGSAGHTPYYQSPTDEKSSHLPTEVIEKPPAVPVSFEFSDAKDENERASVSPMDEPVPDSESPIEKVLSPLRSPPLIGSESAYESFLSADDKASGRGAESPFEEKSGKQGSPDQVSPVSEMTSTSLYQDKQEGKSTDFAPIKEDFGQEKKTDDVEAMSSQPALALDERKLGDVSPTQIDVSQFGSFKEDTKMSISEGTVSDKSATPVDEGVAEDTYSHMEGVASVSTASVATSSFPEPTTDDVSPSLHAEVGSPHSTEVDDSLSVSVVQTPTTFQETEMSPSKEECPRPMSISPPDFSPKTAKSRTPVQDHRSEQSSMSIEFGQESPEQSLAMDFSRQSPDHPTVGAGVLHITENGPTEVDYSPSDMQDSSLSHKIPPMEEPSYTQDNDLSELISVSQVEASPSTSSAHTPSQIASPLQEDTLSDVAPPRDMSLYASLTSEKVQSLEGEKLSPKSDISPLTPRESSPLYSPTFSDSTSAVKEKTATCHSSSSPPIDAASAEPYGFRASVLFDTMQHHLALNRDLSTPGLEKDSGGKTPGDFSYAYQKPEETTRSPDEEDYDYESYEKTTRTSDVGGYYYEKIERTTKSPSDSGYSYETIGKTTKTPEDGDYSYEIIEKTTRTPEEGGYSYDISEKTTSPPEVSGYSYEKTERSRRLLDDISNGYDDSEDGGHTLGDPSYSYETTEKITSFPESEGYSYETSTKTTRTPDTSTYCYETAEKITRTPQASTYSYETSDLCYTAEKKSPSEARQDVDLCLVSSCEYKHPKTELSPSFINPNPLEWFASEEPTEESEKPLTQSGGAPPPPGGKQQGRQCDETPPTSVSESAPSQTDSDVPPETEECPSITADANIDSEDESETIPTDKTVTYKHMDPPPAPVQDRSPSPRHPDVSMVDPEALAIEQNLGKALKKDLKEKTKTKKPGTKTKSSSPVKKSDGKSKPLAASPKPAGLKESSDKVSRVASPKKKESVEKAAKPTTTPEVKAARGEEKDKETKNAANASASKSAKTATAGPGTTKTTKSSAVPPGLPVYLDLCYIPNHSNSKNVDVEFFKRVRSSYYVVSGNDPAAEEPSRAVLDALLEGKAQWGSNMQVTLIPTHDSEVMREWYQETHEKQQDLNIMVLASSSTVVMQDESFPACKIEL

SEQ ID NO: 757729 - protein, 1232 aa, Homo sapiens
VTQETPDYFCLCRDFNLIGLSERSPSPPSPLEKTPLGERSVNFSLTPNEIKVSAEAEVAPVSPEVTQEVVEEHCASPEDKTLEVVSPSQSVTGSAGHTPYYQSPTDEKSSHLPTEVIEKPPAVPVSFEFSDAKDENERASVSPMDEPVPDSESPIEKVLSPLRSPPLIGSESAYESFLSADDKASGRGAESPFEEKSGKQGSPDQVSPVSEMTSTSLYQDKQEGKSTDFAPIKEDFGQEKKTDDVEAMSSQPALALDERKLGDVSPTQIDVSQFGSFKEDTKMSISEGTVSDKSATPVDEGVAEDTYSHMEGVASVSTASVATSSFPEPTTDDVSPSLHAEVGSPHSTEVDDSLSVSVVQTPTTFQETEMSPSKEECPRPMSISPPDFSPKTAKSRTPVQDHRSEQSSMSIEFGQESPEQSLAMDFSRQSPDHPTVGAGVLHITENGPTEVDYSPSDMQDSSLSHKIPPMEEPSYTQDNDLSELISVSQVEASPSTSSAHTPSQIASPLQEDTLSDVAPPRDMSLYASLTSEKVQSLEGEKLSPKSDISPLTPRESSPLYSPTFSDSTSAVKEKTATCHSSSSPPIDAASAEPYGFRASVLFDTMQHHLALNRDLSTPGLEKDSGGKTPGDFSYAYQKPEETTRSPDEEDYDYESYEKTTRTSDVGGYYYEKIERTTKSPSDSGYSYETIGKTTKTPEDGDYSYEIIEKTTRTPEEGGYSYDISEKTTSPPEVSGYSYEKTERSRRLLDDISNGYDDSEDGGHTLGDPSYSYETTEKITSFPESEGYSYETSTKTTRTPDTSTYCYETAEKITRTPQASTYSYETSDLCYTAEKKSPSEARQDVDLCLVSSCEYKHPKTELSPSFINPNPLEWFASEEPTEESEKPLTQSGGAPPPPGGKQQGRQCDETPPTSVSESAPSQTDSDVPPETEECPSITADANIDSEDESETIPTDKTVTYKHMDPPPAPVQDRSPSPRHPDVSMVDPEALAIEQNLGKALKKDLKEKTKTKKPGTKTKSSSPVKKSDGKSKPLAASPKPAGLKESSDKVSRVASPKKKESVEKAAKPTTTPEVKAARGEEKDKETKNAANASASKSAKTATAGPGTTKTTKSSAVPPGLPVYLDLCYIPNHSNSKNVDVEFFKRVRSSYYVVSGNDPAAEEPSRAVLDALLEGKAQWGSNMQVTLIPTHDSEVMREWYQETHEKQQDLNIMVLASSSTVVMQDESFPACKIEL

SEQ ID NO: 757730 - protein, 2258 aa, Homo sapiens
MATVVVEATEPEPSGSIANPAASTSPSLSHRFLDSKFYLLVVVGEIVTEEHLRRAIGNIELGIRSWDTNLIECNLDQELKLFVSRHSARFSPEVPGQKILHHRSDVLETVVLINPSDEAVSTEVRLMITDAARHKLLVLTGQCFENTGELILQSGSFSFQNFIEIFTDQEIGELLSTTHPANKASLTLFCPEEGDWKNSNLDRHNLQDFINIKLNSASILPEMEGLSEFTEYLSESVEVPSPFDILEPPTSGGFLKLSKPCCYIFPGGRGDSALFAVNGFNMLINGGSERKSCFWKLIRHLDRVDSILLTHIGDDNLPGINSMLQRKIAELEEEQSQGSTTNSDWMKNLISPDLGVVFLNVPENLKNPEPNIKMKRSIEEACFTLQYLNKLSMKPEPLFRSVGNTIDPVILFQKMGVGKLEMYVLNPVKSSKEMQYFMQQWTGTNKDKAEFILPNGQEVDLPISYLTSVSSLIVWHPANPAEKIIRVLFPGNSTQYNILEGLEKLKHLDFLKQPLATQKDLTGQVPTPVVKQTKLKQRADSRESLKPAAKPLPSKSVRKESKEETPEVTKVNHVEKPPKVESKEKVMVKKDKPVKTETKPSVTEKEVPSKEEPSPVKAEVAEKQATDVKPKAAKEKTVKKETKVKPEDKKEEKEKPKKEVAKKEDKTPIKKEEKPKKEEVKKEVKKEIKKEEKKEPKKEVKKETPPKEVKKEVKKEEKKEVKKEEKEPKKEIKKLPKDAKKSSTPLSEAKKPAALKPKVPKKEESVKKDSVAAGKPKEKGKIKVIKKEGKAAEAVAAAVGTGATTAAVMAAAGIAAIGPAKELEAERSLMSSPEDLTKDFEELKAEEVDVTKDIKPQLELIEDEEKLKETEPVEAYVIQKEREVTKGPAESPDEGITTTEGEGECEQTPEELEPVEKQGVDDIEKFEDEGAGFEESSETGDYEEKAETEEAEEPEEDGEEHVCVSASKHSPTEDEESAKAEADAYIREKRESVASGDDRAEEDMDEAIEKGEAEQSEEEADEEDKAEDAREEEYEPEKMEAEDYVMAVVDKAAEAGGAEEQYGFLTTPTKQLGAQSPGREPASSIHDETLPGGSESEATASDEENREDQPEEFTATSGYTQSTIEISSEPTPMDEMSTPRDVMSDETNNEETESPSQEFVNITKYESSLYSQEYSKPADVTPLNGFSEGSKTDATDGKDYNASASTISPPSSMEEDKFSRSALRDAYCSEVKASTTLDIKDSISAVSSEKVSPSKSPSLSPSPPSPLEKTPLGERSVNFSLTPNEIKVSAEAEVAPVSPEVTQEVVEEHCASPEDKTLEVVSPSQSVTGSAGHTPYYQSPTDEKSSHLPTEVIEKPPAVPVSFEFSDAKDENERASVSPMDEPVPDSESPIEKVLSPLRSPPLIGSESAYESFLSADDKASGRGAESPFEEKSGKQGSPDQVSPVSEMTSTSLYQDKQEGKSTDFAPIKEDFGQEKKTDDVEAMSSQPALALDERKLGDVSPTQIDVSQFGSFKEDTKMSISEGTVSDKSATPVDEGVAEDTYSHMEGVASVSTASVATSSFPEPTTDDVSPSLHAEVGSPHSTEVDDSLSVSVVQTPTTFQETEMSPSKEECPRPMSISPPDFSPKTAKSRTPVQDHRSEQSSMSIEFGQESPEQSLAMDFSRQSPDHPTVGAGVLHITENGPTEVDYSPSDMQDSSLSHKIPPMEEPSYTQDNDLSELISVSQVEASPSTSSAHTPSQIASPLQEDTLSDVAPPRDMSLYASLTSEKVQSLEGEKLSPKSDISPLTPRESSPLYSPTFSDSTSAVKEKTATCHSSSSPPIDAASAEPYGFRASVLFDTMQHHLALNRDLSTPGLEKDSGGKTPGDFSYAYQKPEETTRSPDEEDYDYESYEKTTRTSDVGGYYYEKIERTTKSPSDSGYSYETIGKTTKTPEDGDYSYEIIEKTTRTPEEGGYSYDISEKTTSPPEVSGYSYEKTERSRRLLDDISNGYDDSEDGGHTLGDPSYSYETTEKITSFPESEGYSYETSTKTTRTPDTSTYCYETAEKITRTPQASTYSYETSDLCYTAEKKSPSEARQDVDLCLVSSCEYKHPKTELSPSFINPNPLEWFASEEPTEESEKPLTQSGGAPPPPGGKQQGRQCDETPPTSVSESAPSQTDSDVPPETEECPSITADANIDSEDESETIPTDKTVTYKTPIKKEEKPKKEEVKKEVKKEIKKEEKKEPKKEVKKETPPKEVKKEVKKEEKKEVKKEEKEP

SEQ ID NO: 757731 - protein, 1188 aa, Homo sapiens
MATVVVEATEPEPSGSIANPAASTSPSLSHRFLDSKFYLLVVVGEIVTEEHLRRAIGNIELGIRSWDTNLIECNLDQELKLFVSRHSARFSPEVPGQKILHHRSDVLETVVLINPSDEAVSTEVRLMITDAARHKLLVLTGQCFENTGELILQSGSFSFQNFIEIFTDQEIGELLSTTHPANKASLTLFCPEEGDWKNSNLDRHNLQDFINIKLNSASILPEMEGLSEFTEYLSESVEVPSPFDILEPPTSGGFLKLSKPCCYIFPGGRGDSALFAVNGFNMLINGGSERKSCFWKLIRHLDRVDSILLTHIGDDNLPGINSMLQRKIAELEEEQSQGSTTNSDWMKNLISPDLGVVFLNVPENLKNPEPNIKMKRSIEEACFTLQYLNKLSMKPEPLFRSVGNTIDPVILFQKMGVGKLEMYVLNPVKSSKEMQYFMQQWTGTNKDKAEFILPNGQEVDLPISYLTSVSSLIVWHPANPAEKIIRVLFPGNSTQYNILEGLEKLKHLDFLKQPLATQKDLTGQVPTPVVKQTKLKQRADSRESLKPAAKPLPSKSVRKESKEETPEVTKVNHVEKPPKVESKEKVMVKKDKPVKTETKPSVTEKEVPSKEEPSPVKAEVAEKQATDVKPKAAKEKTVKKETKVKPEDKKEEKEKPKKEVAKKEDKTPIKKEEKPKKEEVKKEVKKEIKKEEKKEPKKEVKKETPPKEVKKEVKKEEKKEVKKEEKEPKKEIKKLPKDAKKSSTPLSEAKKPAALKPKVPKKEESVKKDSVAAGKPKEKGKIKVIKKEGKAAEAVAAAVGTGATTAAVMAAAGIAAIGPAKELEAERSLMSSPEDLTKDFEELKAEEVDVTKDIKPQLELIEDEEKLKETEPVEAYVIQKEREVTKGPAESPDEGITTTEGEGECEQTPEELEPVEKQGVDDIEKFEDEGAGFEESSETGDYEEKAETEEAEEPEEDGEEHVCVSASKHSPTEDEESAKAEADAYIREKRESVASGDDRAEEDMDEAIEKGEAEQSEEEADEEDKAEDAREEEYEPEKMEAEDYVMAVVDKAAEAGGAEEQYGFLTTPTKQLGAQSPGREPASSIHDETLPGGSESEATASDEENREDQPEEFTATSGYTQSTIEISSEPTPMDEMSTPRDVMSDETNNEETESPSQEFVNITKYESSLYSQEYSKPADVTHPYWPGY

SEQ ID NO: 757732 - protein, 752 aa, Homo sapiens
MATVVVEATEPEPSGSIANPAASTSPSLSHRFLDSKFYLLVVVGEIVTEEHLRRAIGNIELGIRSWDTNLIECNLDQELKLFVSRHSARFSPEVPGQKILHHRSDVLETVVLINPSDEAVSTEVRLMITDAARHKLLVLTGQCFENTGELILQSGSFSFQNFIEIFTDQEIGELLSTTHPANKASLTLFCPEEGDWKNSNLDRHNLQDFINIKLNSASILPEMEGLSEFTEYLSESVEVPSPFDILEPPTSGGFLKLSKPCCYIFPGGRGDSALFAVNGFNMLINGGSERKSCFWKLIRHLDRVDSILLTHIGDDNLPGINSMLQRKIAELEEEQSQGSTTNSDWMKNLISPDLGVVFLNVPENLKNPEPNIKMKRSIEEACFTLQYLNKLSMKPEPLFRSVGNTIDPVILFQKMGVGKLEMYVLNPVKSSKEMQYFMQQWTGTNKDKAEFILPNGQEVDLPISYLTSVSSLIVWHPANPAEKIIRVLFPGNSTQYNILEGLEKLKHLDFLKQPLATQKDLTGQVPTPVVKQTKLKQRADSRESLKPAAKPLPSKSVRKESKEETPEVTKVNHVEKPPKVESKEKVMVKKDKPVKTETKPSVTEKEVPSKEEPSPVKAEVAEKQATDVKPKAAKEKTVKKETKVKPEDKKEEKEKPKKEVAKKEDKTPIKKEEKPKKEEVKKEVKKEIKKEEKKEPKKEVKKETPPKEVKKEVKKEEKKEVKKEEKEPKTKKKKKKKKKKKKNKKKKNKKKK

SEQ ID NO: 757733 - protein, 459 aa, Homo sapiens
MATVVVEATEPEPSGSIANPAASTSPSLSHRFLDSKFYLLVVVGEIVTEEHLRRAIGNIELGIRSWDTNLIECNLDQELKLFVSRHSARFSPEVPGQKILHHRSDVLETVVLINPSDEAVSTEVRLMITDAARHKLLVLTGQCFENTGELILQSGSFSFQNFIEIFTDQEIGELLSTTHPANKASLTLFCPEEGDWKNSNLDRHNLQDFINIKLNSASILPEMEGLSEFTEYLSESVEVPSPFDILEPPTSGGFLKLSKPCCYIFPGGRGDSALFAVNGFNMLINGGSERKSCFWKLIRHLDRVDSILLTHIGDDNLPGINSMLQRKIAELEEEQSQGSTTNSDWMKNLISPDLGVVFLNVPENLKNPEPNIKMKRSIEEACFTLQYLNKLSMKPEPLFRSVGNTIDPVILFQKMGVGKLEMYVLNPVKSSKEMQYFMQQTNMAHAYLRIKPARCAHVP

SEQ ID NO: 757734 - protein, 181 aa, Homo sapiens
RIELGTSRGGVVVEATEPEPSGSIANPAASTSPSLSHRFLDSKFYLLVVVGEIVTEEHLRRAIGNIELGIRSWDTNLIECNLDQELKLFVSRHSARFSPEVPGQKILHHRSDVLETVVLINPSDEAVSTEVRLMITDAARHKLLVLTGQCFENTGELILQSGSFSFQNFIEIFTDQEIGEY

SEQ ID NO: 757735 - protein, 2468 aa, Homo sapiens; identical to SEQ ID NO: 757720

SEQ ID NO: 757736 - protein, 2468 aa, Homo sapiens; identical to SEQ ID NO: 757720

SEQ ID NO: 757737 - protein, 2387 aa, Homo sapiens
MATVVVEATEPEPSGSIANPAASTSPSLSHRFLDSKFYLLVVVGEIVTEEHLRRAIGNIELGIRSWDTNLIECNLDQELKLFVSRHSARFSPEVPGQKILHHRSDVLETVVLINPSDEAVSTEVRLMITDAARHKLLVLTGQCFENTGELILQSGSFSFQNFIEIFTDQEIGELLSTTHPANKASLTLFCPEEGDWKNSNLDRHNLQDFINIKLNSASILPEMEGLSEFTEYLSESVEVPSPFDILEPPTSGGFLKLSKPCCYIFPGGRGDSALFAVNGFNMLINGGSERKSCFWKLIRHLDRVDSILLTHIGDDNLPGINSMLQRKIAELEEEQSQGSTTNSDWMKNLISPDLGVVFLNVPENLKNPEPNIKMKRSIEEACFTLQYLNKLSMKPEPLFRSVGNTIDPVILFQKMGVGKLEMYVLNPVKSSKEMQYFMQQWTGTNKDKAEFILPNGQEVDLPISYLTSVSSLIVWHPANPAEKIIRVLFPGNSTQYNILEGLEKLKHLDFLKQPLATQKDLTGQVPTPVVKQTKLKQRADSRESLKPAAKPLPSKSVRKESKEETPEVTKVNHVEKPPKVESKEKVMVKKDKPVKTETKPSVTEKEVPSKEEPSPVKAEVAEKQATDVKPKAAKEKTVKKETKVKPEDKKEEKEKPKKEVAKKEDKTPIKKEEKPKKEEVKKEVKKEIKKEEKKEPKKEVKKETPPKEVKKEVKKEEKKEVKKEEKEPKKEIKKLPKDAKKSSTPLSEAKKPAALKPKVPKKEESVKKDSVAAGKPKEKGKIKVIKKEGKAAEAVAAAVGTGATTAAVMAAAGIAAIGPAKELEAERSLMSSPEDLTKDFEELKAEEVDVTKDIKPQLELIEDEEKLKETEPVEAYVIQKEREVTKGPAESPDEGITTTEGEGECEQTPEELEPVEKQGVDDIEKFEDEGAGFEESSETGDYEEKAETEEAEEPEEDGEEHVCVSASKHSPTEDEESAKAEADAYIREKRESVASGDDRAEEDMDEAIEKGEAEQSEEEADEENREDQPEEFTATSGYTQSTIEISSEPTPMDEMSTPRDVMSDETNNEETESPSQEFVNITKYESSLYSQEYSKPADVTPLNGFSEGSKTDATDGKDYNASASTISPPSSMEEDKFSRSALRDAYCSEVKASTTLDIKDSISAVSSEKVSPSKSPSLSPSPPSPLEKTPLGERSVNFSLTPNEIKVSAEAEVAPVSPEVTQEVVEEHCASPEDKTLEVVSPSQSVTGSAGHTPYYQSPTDEKSSHLPTEVIEKPPAVPVSFEFSDAKDENERASVSPMDEPVPDSESPIEKVLSPLRSPPLIGSESAYESFLSADDKASGRGAESPFEEKSGKQGSPDQVSPVSEMTSTSLYQDKQEGKSTDFAPIKEDFGQEKKTDDVEAMSSQPALALDERKLGDVSPTQIDVSQFGSFKEDTKMSISEGTVSDKSATPVDEGVAEDTYSHMEGVASVSTASVATSSFPEPTTDDVSPSLHAEVGSPHSTEVDDSLSVSVVQTPTTFQETEMSPSKEECPRPMSISPPDFSPKTAKSRTPVQDHRSEQSSMSIEFGQESPEQSLAMDFSRQSPDHPTVGAGVLHITENGPTEVDYSPSDMQDSSLSHKIPPMEEPSYTQDNDLSELISVSQVEASPSTSSAHTPSQIASPLQEDTLSDVAPPRDMSLYASLTSEKVQSLEGEKLSPKSDISPLTPRESSPLYSPTFSDSTSAVKEKTATCHSSSSPPIDAASAEPYGFRASVLFDTMQHHLALNRDLSTPGLEKDSGGKTPGDFSYAYQKPEETTRSPDEEDYDYESYEKTTRTSDVGGYYYEKIERTTKSPSDSGYSYETIGKTTKTPEDGDYSYEIIEKTTRTPEEGGYSYDISEKTTSPPEVSGYSYEKTERSRRLLDDISNGYDDSEDGGHTLGDPSYSYETTEKITSFPESEGYSYETSTKTTRTPDTSTYCYETAEKITRTPQASTYSYETSDLCYTAEKKSPSEARQDVDLCLVSSCEYKHPKTELSPSFINPNPLEWFASEEPTEESEKPLTQSGGAPPPPGGKQQGRQCDETPPTSVSESAPSQTDSDVPPETEECPSITADANIDSEDESETIPTDKTVTYKHMDPPPAPVQDRSPSPRHPDVSMVDPEALAIEQNLGKALKKDLKEKTKTKKPGTKTKSSSPVKKSDGKSKPLAASPKPAGLKESSDKVSRVASPKKKESVEKAAKPTTTPEVKAARGEEKDKETKNAANASASKSAKTATAGPGTTKTTKSSAVPPGLPVYLDLCYIPNHSNSKNVDVEFFKRVRSSYYVVSGNDPAAEEPSRAVLDALLEGKAQWGSNMQVTLIPTHDSEVMREWYQETHEKQQDLNIMVLASSSTVVMQDESFPACKIEL

SEQ ID NO: 757738 - protein, 2468 aa, Homo sapiens; identical to SEQ ID NO: 757720

SEQ ID NO: 757739 - protein, 1866 aa, Homo sapiens
PSLLAENLHLQFMMRLYLEAQRARPPLLMRRIEKTVKKETKVKPEDKKEEKEKPKKEVAKKEDKTPIKKEEKPKKEEVKKEVKKEIKKEEKKEPKKEVKKETPPKEVKKEVKKEEKKEVKKEEKEPKKEIKKLPKDAKKSSTPLSEAKKPAALKPKVPKKEESVKKDSVAAGKPKEKGKIKVIKKEGKAAEAVAAAVGTGATTAAVMAAAGIAAIGPAKELEAERSLMSSPEDLTKDFEELKAEEVDVTKDIKPQLELIEDEEKLKETEPVEAYVIQKEREVTKGPAESPDEGITTTEGEGECEQTPEELEPVEKQGVDDIEKFEDEGAGFEESSETGDYEEKAETEEAEEPEEDGEEHVCVSASKHSPTEDEESAKAEADAYIREKRESVASGDDRAEEDMDEAIEKGEAEQSEEEADEEDKAEDAREEEYEPEKMEAEDYVMAVVDKAAEAGGAEEQYGFLTTPTKQLGAQSPGREPASSIHDETLPGGSESEATASDEENREDQPEEFTATSGYTQSTIEISSEPTPMDEMSTPRDVMSDETNNEETESPSQEFVNITKYESSLYSQEYSKPADVTPLNGFSEGSKTDATDGKDYNASASTISPPSSMEEDKFSRSALRDAYCSEVKASTTLDIKDSISAVSSEKVSPSKSPSLSPSPPSPLEKTPLGERSVNFSLTPNEIKVSAEAEVAPVSPEVTQEVVEEHCASPEDKTLEVVSPSQSVTGSAGHTPYYQSPTDEKSSHLPTEVIEKPPAVPVSFEFSDAKDENERASVSPMDEPVPDSESPIEKVLSPLRSPPLIGSESAYESFLSADDKASGRGAESPFEEKSGKQGSPDQVSPVSEMTSTSLYQDKQEGKSTDFAPIKEDFGQEKKTDDVEAMSSQPALALDERKLGDVSPTQIDVSQFGSFKEDTKMSISEGTVSDKSATPVDEGVAEDTYSHMEGVASVSTASVATSSFPEPTTDDVSPSLHAEVGSPHSTEVDDSLSVSVVQTPTTFQETEMSPSKEECPRPMSISPPDFSPKTAKSRTPVQDHRSEQSSMSIEFGQESPEQSLAMDFSRQSPDHPTVGAGVLHITENGPTEVDYSPSDMQDSSLSHKIPPMEEPSYTQDNDLSELISVSQVEASPSTSSAHTPSQIASPLQEDTLSDVAPPRDMSLYASLTSEKVQSLEGEKLSPKSDISPLTPRESSPLYSPTFSDSTSAVKEKTATCHSSSSPPIDAASAEPYGFRASVLFDTMQHHLALNRDLSTPGLEKDSGGKTPGDFSYAYQKPEETTRSPDEEDYDYESYEKTTRTSDVGGYYYEKIERTTKSPSDSGYSYETIGKTTKTPEDGDYSYEIIEKTTRTPEEGGYSYDISEKTTSPPEVSGYSYEKTERSRRLLDDISNGYDDSEDGGHTLGDPSYSYETTEKITSFPESEGYSYETSTKTTRTPDTSTYCYETAEKITRTPQASTYSYETSDLCYTAEKKSPSEARQDVDLCLVSSCEYKHPKTELSPSFINPNPLEWFASEEPTEESEKPLTQSGGAPPPPGGKQQGRQCDETPPTSVSESAPSQTDSDVPPETEECPSITADANIDSEDESETIPTDKTVTYKHMDPPPAPVQDRSPSPRHPDVSMVDPEALAIEQNLGKALKKDLKEKTKTKKPGTKTKSSSPVKKSDGKSKPLAASPKPAGLKESSDKVSRVASPKKKESVEKAAKPTTTPEVKAARGEEKDKETKNAANASASKSAKTATAGPGTTKTTKSSAVPPGLPVYLDLCYIPNHSNSKNVDVEFFKRVRSSYYVVSGNDPAAEEPSRAVLDALLEGKAQWGSNMQVTLIPTHDSEVMREWYQETHEKQQDLNIMVLASSSTVVMQDESFPACKIEL

SEQ ID NO: 757740 - protein, 2468 aa, Homo sapiens; identical to SEQ ID NO: 757720

SEQ ID NO: 757741 - protein, 2340 aa, Homo sapiens
MATVVVEATEPEPSGSIANPAASTSPSLSHRFLDSKFYLLVVVGEIVTEEHLRRAIGNIELGIRSWDTNLIECNLDQELKLFVSRHSARFSPEVPGQKILHHRSDVLETVVLINPSDEAVSTEVRLMITDAARHKLLVLTGQCFENTGELILQSGSFSFQNFIEIFTDQEIGELLSTTHPANKASLTLFCPEEGDWKNSNLDRHNLQDFINIKLNSASILPEMEGLSEFTEYLSESVEVPSPFDILEPPTSGGFLKLSKPCCYIFPGGRGDSALFAVNGFNMLINGGSERKSCFWKLIRHLDRVDSILLTHIGDDNLPGINSMLQRKIAELEEEQSQGSTTNSDWMKNLISPDLGVVFLNVPENLKNPEPNIKMKRSIEEACFTLQYLNKLSMKPEPLFRSVGNTIDPVILFQKMGVGKLEMYVLNPVKSSKEMQYFMQQWTGTNKDKAEFILPNGQEVDLPISYLTSVSSLIVWHPANPAEKIIRVLFPGNSTQYNILEGLEKLKHLDFLKQPLATQKDLTGQVPTPVVKQTKLKQRADSRESLKPAAKPLPSKSVRKESKEETPEVTKVNHVEKPPKVESKEKVMVKKDKPVKTETKPSVTEKEVPSKEEPSPVKAEVAEKQATDVKPKAAKEKTVKKETKVKPEDKKEEKEKPKKEVAKKEDKTPIKKEEKPKKEEVKKEVKKEIKKEEKKEPKKEVKKETPPKEVKKEVKKEEKKEVKKEEKEPKKEIKKLPKDAKKSSTPLSEAKKPAALKPKVPKKEESVKKDSVAAGKPKEKGKIKVIKKEGKAAEAVAAAVGTGATTAAVMAAAGIAAIGPAKELEAERSLMSSPEDLTKDFEELKAEEVDVTKDIKPQLELIEDEEKLKETEPVEAYVIQKEREVTKGPAESPDEGITTTEGEGECEQTPEELEPVEKQGVDDIEKFEDEGAGFEESSETGDYEEKAETEEAEEPEEDGEEHVCVSASKHSPTEDEESAKAEADAYIREKRESVASGDDRAEEDMDEAIEKGEAEQSEEEADEEDKAEDAREEEYEPEKMEAEDYVMAVVDKAAEAGGAEEQYGFLTTPTKQLGAQSPGREPASSIHDETLPGGSESEATASDEENREDQPEEFTATSGYTQSTIEISSEPTPMDEMSTPRDVMSDETNNEETESPSQEFVNITKYESSLYSQEYSKPADVTPLNGFSEGSKTDATDGKDYNASASTISPPSSMEEDKFSRSALRDAYCSEVKASTTLDIKDSISAVSSEKVSPSKSPSLSPSPPSPLEKTPLGERSVNFSLTPNEIKVSAEAEVAPVSPEVTQEVVEEHCASPEDKTLEVVSPSQSVTGSAGHTPYYQSPTDEKSSHLPTEVIEKPPAVPVSFEFSDAKDENERASVSPMDEPVPDSESPIEKVLSPLRSPPLIGSESAYESFLSADDKASGRGAESPFEEKSGKQGSPDQVSPVSEMTSTSLYQDKQEGKSTDFAPIKEDFGQEKKTDDVEAMSSQPALALDERKLGDVSPTQIDVSQFGSFKEDTKMSISEGTVSDKSATPVDEGVAEDTYSHMEGVASVSTASVATSSFPEPTTDDVSPSLHAEVGSPHSTEVDDSLSVSVVQTPTTFQETEMSPSKEECPRPMSISPPDFSPKTAKSRTPVQDHRSEQSSMSIEFGQESPEQSLAMDFSRQSPDHPTVGAGVLHITENGPTEVDYSPSDMQDSSLSHKIPPMEEPSYTQDNDLSELISVSQVEASPSTSSAHTPSQIASPLQEDTLSDVAPPRDMSLYASLTSEKVQSLEGEKLSPKSDISPLTPRESSPLYSPTFSDSTSAVKEKTATCHSSSSPPIDAASAEPYGFRASVLFDTMQHHLALNRDLSTPGLEKDSGGKTPGDFSYAYQKPEETTRSPDEEDYDYESYEKTTRTSDVGGYYYEKIERTTKSPSDSGYSYETIGKTTKTPEDGDYSYEIIEKTTRTPEEGGYSYDISEKTTSPPEVSGYSYEKTERSRRLLDDISNGYDDSEDGGHTLGDPSYSYETTEKITSFPESEGYSYETSTKTTRTPDTSTYCYETAEKITRTPQASTYSYETSDLCYTAEKKSPSEARQDVDLCLVSSCEYKHPKTELSPSFINPNPLEWFASEEPTEESEKPLTQSGGAPPPPGGKQQGRQCDETPPTSVSESAPSQTDSDVPPETEECPSITADANIDSEDESETIPTDKTVTYKHMDPPPAPVQDRSPSPRHPDVSMVDPEALAIEQNLGKALKKDLKEKTKTKKPGTKTKSSSPVKKSDGKSKPLAASPKPAGLKESSDKVSRVASPKKKESVEKAAKPTTTPEVKAARGEEKDKETKNAANASARNSTSGISSGQD

SEQ ID NO: 757742 - protein, 955 aa, Homo sapiens
MATVVVEATEPEPSGSIANPAASTSPSLSHRFLDSKFYLLVVVGEIVTEEHLRRAIGNIELGIRSWDTNLIECNLDQELKLFVSRHSARFSPEVPGQKILHHRSDVLETVVLINPSDEAVSTEVRLMITDAARHKLLVLTGQCFENTGELILQSGSFSFQNFIEIFTDQEIGELLSTTHPANKASLTLFCPEEGDWKNSNLDRHNLQDFINIKLNSASILPEMEGLSEFTEYLSESVEVPSPFDILEPPTSGGFLKLSKPCCYIFPGGRGDSALFAVNGFNMLINGGSERKSCFWKLIRHLDRVDSILLTHIGDDNLPGINSMLQRKIAELEEEQSQGSTTNSDWMKNLISPDLGVVFLNVPENLKNPEPNIKMKRSIEEACFTLQYLNKLSMKPEPLFRSVGNTIDPVILFQKMGVGKLEMYVLNPVKSSKEMQYFMQQWTGTNKDKAEFILPNGQEVDLPISYLTSVSSLIVWHPANPAEKIIRVLFPGNSTQYNILEGLEKLKHLDFLKQPLATQKDLTGQVPTPVVKQTKLKQRADSRESLKPAAKPLPSKSVRKESKEETPEVTKVNHVEKPPKVESKEKVMVKKDKPVKTETKPSVTEKEVPSKEEPSPVKAEVAEKQATDVKPKAAKEKTVKKETKVKPEDKKEEKEKPKKEVAKKEDKTPIKKEEKPKKEEVKKEVKKEIKKEEKKEPKKEVKKETPPKEVKKEVKKEEKKEVKKEEKEPKKEIKKLPKDAKKSSTPLSEAKKPAALKPKVPKKEESVKKDSVAAGKPKEKGKIKVIKKEGKAAEAVAAAVGTGATTAAVMAAAGIAAIGPAKELEAERSLMSSPEDLTKDFEELKAEEVDVTKDIKPQLELIEDEEKLKETEPVEAYVIQKEVKKEEKEPKKEIKKLPKDAKKSSTPLSEAKKPAALKPKVPKKEESVKKETPPKEVKKEVKKEEKKEVKKEEKEP

SEQ ID NO: 757743 - protein, 567 aa, Homo sapiens
MATVVVEATEPEPSGSIANPAASTSPSLSHRFLDSKFYLLVVVGEIVTEEHLRRAIGNIELGIRSWDTNLIECNLDQELKLFVSRHSARFSPEVPGQKILHHRSDVLETVVLINPSDEAVSTEVRLMITDAARHKLLVLTGQCFENTGELILQSGSFSFQNFIEIFTDQEIGELLSTTHPANKASLTLFCPEEGDWKNSNLDRHNLQDFINIKLNSASILPEMEGLSEFTEYLSESVEVPSPFDILEPPTSGGFLKLSKPCCYIFPGGRGDSALFAVNGFNMLINGGSERKSCFWKLIRHLDRVDSILLTHIGDDNLPGINSMLQRKIAELEEEQSQGSTTNSDWMKNLISPDLGVVFLNVPENLKNPEPNIKMKRSIEEACFTLQYLNKLSMKPEPLFRSVGNTIDPVILFQKMGVGKLEMYVLNPVKSSKEMQYFMQQWTGTNKDKAEFILPNGQEVDLPISYLTSVSSLIVWHPANPAEKIIRVLFPGNSTQYNILEGLEKLKHLDFLKQPLATQKDLTGQVPTPVVKQTKLKQRADSRESLKPAAKPLPSKSVGRSRIRLSTS

SEQ ID NO: 757744 - protein, 187 aa, Homo sapiens
RIELGTSRGGVVVEATEPEPSGSIANPAASTSPSLSHRFLDSKFYLLVVVGEIVTEEHLRRAIGNIELGIRSWDTNLIECNLDQELKLFVSRHSARFSPEVPGQKILHHRSDVLETVVLINPSDEAVSTEVRLMITDAARHKLLVLTGQCFENTGELILQSGSFSFQNFIEIFTDQEIGELLTPRHP

SEQ ID NO: 757745 - protein, 113 aa, Homo sapiens
GRVEGPPLRPPATSRRWAGPTLWRMEVTGDAGVPESGEIRTLKPCLLRRNYSREQHGVAASCLEDLRSKACDILAIDKSLTPVTLVLAEDGTIVDDDDYFLCLPSNTKFVALA

SEQ ID NO: 757746 - protein, 292 aa, Homo sapiens
GRVEGPPLRPPATSRRWAGPTLWRMEVTGDAGVPESGEIRTLKPCLLRRNYSREQHGVAASCLEDLRSKACDILAIDKSLTPVTLVLAEDGTIVDDDDYFLCLPSNTKFVALASNEKWAYNNSDGGTAWISQESFDVDETDSGAGLKWKNVARQLKEDLSSIILLSEEDLQMLVDAPCSDLAQELRQSCATVQRLQHTLQQVLDQREEVRQSKQLLQLYLQALEKEGSLLSKQEESKAAFGEEVDAVDTGISRETSSDVALASHILTALREKQAPELSLSSQDLEVGGNQGH

SEQ ID NO: 757747 - protein, 292 aa, Homo sapiens; identical to SEQ ID NO: 757746

SEQ ID NO: 757748 - protein, 292 aa, Homo sapiens; identical to SEQ ID NO: 757746

SEQ ID NO: 757749 - protein, 183 aa, Homo sapiens
GRVEGPPLRPPATSRRWAGPTLWRMEVTGDAGVPESGEIRTLKPCLLRRNYSREQHGVAASCLEDLRSKACDILAIDKSLTPVTLVLAEDGTIVDDDDYFLCLPSNTKFVALASNEKWAYNNSDGGTAWISQESFDVDETDSGAGLKWKNVARQLKEDLSSIILLSEEDLQSPKLPLVRRWMQ

SEQ ID NO: 757750 - protein, 292 aa, Homo sapiens; identical to SEQ ID NO: 757746

SEQ ID NO: 757751 - protein, 292 aa, Homo sapiens; identical to SEQ ID NO: 757746

SEQ ID NO: 757752 - protein, 292 aa, Homo sapiens; identical to SEQ ID NO: 757746

SEQ ID NO: 757753 - protein, 292 aa, Homo sapiens; identical to SEQ ID NO: 757746

SEQ ID NO: 757754 - protein, 355 aa, Homo sapiens
GRVEGPPLRPPATSRRWAGPTLWRMEVTGDAGVPESGEIRTLKPCLLRRNYSREQHGVAASCLEDLRSKACDILAIDKSLTPVTLVLAEDGTIVDDDDYFLCLPSNTKFVALASNEKWAYNNSDGGTAWISQESFDVDETDSGAGLKWKNVARQLKEDLSSIILLSEEDLQMLVDAPCSDLAQELRQSCATVQRLQHTLQQVLDQREEVRQSKQLLQLYLQALEKEGSLLSKQEESKAAFGEEVDAVDTGISRETSSDVALASHILTALREKQAPELSLSSQDLELVTKEDPKALAVALNWDIKKTETVQEACERELALRLQQTQSLHSLRSISASKASPPGDLQNPKRARQDPT

SEQ ID NO: 757755 - protein, 292 aa, Homo sapiens; identical to SEQ ID NO: 757746

SEQ ID NO: 757756 - protein, 183 aa, Homo sapiens; identical to SEQ ID NO: 757749

SEQ ID NO: 757757 - protein, 355 aa, Homo sapiens; identical to SEQ ID NO: 757754

SEQ ID NO: 757758 - protein, 99 aa, Homo sapiens
NYISRQAAEGGRVEGPPLRPPATSRRWAGPTLWRMEVTGDAGVPESGEIRTLKPCLLRRNYSREQHGVAASCLEDLRSKGWLGTPGEGVGEPGPGEDVR

SEQ ID NO: 757759 - protein, 412 aa, Homo sapiens
MVVSTWRDPQDEVPGSQGSQASQAPPVPGPPPGAPHTPQTPGQGGPASTPAQTAAGGQGGPGGPGSDKQQQQQHIECVVCGDKSSGKHYGQFTCEGCKSFFKRSVRRNLSYTCRANRNCPIDQHHRNQCQYCRLKKCLKVGMRREAVQRGRMPPTQPTHGQFALTNGDPLNCHSYLSGYISLLLRAEPYPTSRFGSQCMQPNNIMGIENICELAARMLFSAVEWARNIPFFPDLQITDQVALLRLTWSELFVLNAAQCSMPLHVAPLLAAAGLHASPMSADRVVAFMDHIRIFQEQVEKLKALHVDSAEYSCLKAIVLFTSDACGLSDVAHVESLQEKSQCALEEYVRSQYPNQPTRFGKLLLRLPSLRTVSSSVIEQLFFVRLVGKTPIETLIRDMLLSGSSFNWPYMAIQ

SEQ ID NO: 757760 - protein, 412 aa, Homo sapiens; identical to SEQ ID NO: 757759

SEQ ID NO: 757761 - protein, 281 aa, Homo sapiens
MQAVWDLEQGKYGFAVQRGRMPPTQPTHGQFALTNGDPLNCHSYLSGYISLLLRAEPYPTSRFGSQCMQPNNIMGIENICELAARMLFSAVEWARNIPFFPDLQITDQVALLRLTWSELFVLNAAQCSMPLHVAPLLAAAGLHASPMSADRVVAFMDHIRIFQEQVEKLKALHVDSAEYSCLKAIVLFTSDACGLSDVAHVESLQEKSQCALEEYVRSQYPNQPTRFGKLLLRLPSLRTVSSSVIEQLFFVRLVGKTPIETLIRDMLLSGSSFNWPYMAIQ

SEQ ID NO: 757762 - protein, 275 aa, Homo sapiens
GVSPFLPAAVQRGRMPPTQPTHGQFALTNGDPLNCHSYLSGYISLLLRAEPYPTSRFGSQCMQPNNIMGIENICELAARMLFSAVEWARNIPFFPDLQITDQVALLRLTWSELFVLNAAQCSMPLHVAPLLAAAGLHASPMSADRVVAFMDHIRIFQEQVEKLKALHVDSAEYSCLKAIVLFTSDACGLSDVAHVESLQEKSQCALEEYVRSQYPNQPTRFGKLLLRLPSLRTVSSSVIEQLFFVRLVGKTPIETLIRDMLLSGSSFNWPYMAIQ

SEQ ID NO: 757763 - protein, 412 aa, Homo sapiens; identical to SEQ ID NO: 757759

SEQ ID NO: 757764 - protein, 412 aa, Homo sapiens; identical to SEQ ID NO: 757759

SEQ ID NO: 757765 - protein, 412 aa, Homo sapiens; identical to SEQ ID NO: 757759

SEQ ID NO: 757766 - protein, 622 aa, Homo sapiens
MVVSTWRDPQDEVPGSQGSQASQAPPVPGPPPGAPHTPQTPGQGGPASTPAQTAAGGQGGPGGPGSDKQQQQQHIECVVCGDKSSGKHYGQFTCEGCKSFFKRSVRRNLSYTCRANRNCPIDQHHRNQCQYCRLKKCLKVGMRREAVQRGRMPPTQPTHGQFALTNGDPLNCHSYLSGYISLLLRAEPYPTSRFGSQCMQPNNIMGIENICELAARMLFSAVEWARNIPFFPDLQITDQVALLRLTWSELFVLNAAQCSMPLHVAPLLAAAGLHASPMSADRVVAFMDHIRIFQEQVEKLKALHVDSAEYSCLKAIVLFTSDACGLSDVAHVESLQEKSQCALEEYVRSQYPNQPTRFGKLLLRLPSLRTVSSSVIEQLFFVRCGLVILTFEISLLVNKIYTATLFLAPCLDFSHILHYIRFTGEDSDKTNDTIPKVTRVKYSSIMTIVSYPLYRTKFSWILCTTRGNISTNSTGKFPAKTLKILVKPYDSANVSSHDSTDHASDLGTTHCGTLSNKAISAHTGPTAQKMDKRKHTTQHHRGHPTRSESPPRPTRWCHAHALKHASRPPNLTTATKRTTQKQHAHRSSSATQPHNQNSRTTTTTDNQNTRDRASQRQQHTQA

SEQ ID NO: 757767 - protein, 111 aa, Homo sapiens
MSWRGRSTYRPRPRRSLQPPELIGAMLEPTDEEPKEEKPPTKSRNPTPDQKREDDQGAAEIQVPDLEADLQELCQTKTGDGCEGGTDVKGKILPKAEHFKMPEAGEGKSQV

SEQ ID NO: 757768 - protein, 111 aa, Homo sapiens; identical to SEQ ID NO: 757767

SEQ ID NO: 757769 - protein, 111 aa, Homo sapiens; identical to SEQ ID NO: 757767

SEQ ID NO: 757770 - protein, 524 aa, Homo sapiens
MTAEDSTAAMSSDSAAGSSAKVPEGVAGAPNEAALLALMERTGYSMVQENGQRKYGGPPPGWEGPHPQRGCEVFVGKIPRDVYEDELVPVFEAVGRIYELRLMMDFDGKNRGYAFVMYCHKHEAKRAVRELNNYEIRPGRLLGVCCSVDNCRLFIGGIPKMKKREEILEEIAKVTEGVLDVIVYASAADKMKNRGFAFVEYESHRAAAMARRKLMPGRIQLWGHQIAVDWAEPEIDVDEDVMETVKILYVRNLMIETTEDTIKKSFGQFNPGCVERVKKIRDYAFVHFTSREDAVHAMNNLNGTELEGSCLEVTLAKPVDKEQYSRYQKAARGGGAAEAAQQPSYVYSCDPYTLAYYGYPYNALIGPNRDYFVKVAIPAIGAQYSMFPAAPAPKMIEDGKIHTVEHMISPIAVQPDPASAAAAAAAAAAAAAAVIPTVSTPPPFQGRPITPVYTVAPNVQRIPTAGIYGASYVPFAAPATATIATLQKNAAAAAAVYGGYAGYIPQAFPAAAIQVPIPDVYQTY

SEQ ID NO: 757771 - protein, 524 aa, Homo sapiens; identical to SEQ ID NO: 757770

SEQ ID NO: 757772 - protein, 524 aa, Homo sapiens; identical to SEQ ID NO: 757770

SEQ ID NO: 757773 - protein, 524 aa, Homo sapiens; identical to SEQ ID NO: 757770

SEQ ID NO: 757774 - protein, 593 aa, Homo sapiens
MTAEDSTAAMSSDSAAGSSAKVPEGVAGAPNEAALLALMERTGYSMVQENGQRKYGGPPPGWEGPHPQRGCEVFVGKIPRDVYEDELVPVFEAVGRIYELRLMMDFDGKNRGYAFVMYCHKHEAKRAVRELNNYEIRPGRLLGVCCSVDNCRLFIGGIPKMKKREEILEEIAKVTEGVLDVIVYASAADKMKNRGFAFVEYESHRAAAMARRKLMPGRIQLWGHQIAVDWAEPEIDVDEDVMETVKILYVRNLMIETTEDTIKKSFGQFNPGCVERVKKIRDYAFVHFTSREDAVHAMNNLNGTELEGSCLEVTLAKPVDKEQYSRYQKAARGGGAAEAAQQPSYVYSCDPYTLAYYGYPYNALIGPNRDYFVKAGSIRGRGRGAAGNRAPGPRGSYLGGYSAGRGIYSRYHEGKGKQQEKGYELVPNLEIPTVNPVAIKPGTVAIPAIGAQYSMFPAAPAPKMIEDGKIHTVEHMISPIAVQPDPASAAAAAAAAAAAAAAVIPTVSTPPPFQGRPITPVYTVAPNVQRIPTAGIYGASYVPFAAPATATIATLQKNAAAAAAVYGGYAGYIPQAFPAAAIQVPIPDVYQTY

SEQ ID NO: 757775 - protein, 593 aa, Homo sapiens; identical to SEQ ID NO: 757774

SEQ ID NO: 757776 - protein, 524 aa, Homo sapiens; identical to SEQ ID NO: 757770

SEQ ID NO: 757777 - protein, 593 aa, Homo sapiens; identical to SEQ ID NO: 757774

SEQ ID NO: 757778 - protein, 593 aa, Homo sapiens; identical to SEQ ID NO: 757774

SEQ ID NO: 757779 - protein, 644 aa, Homo sapiens
MTAEDSTAAMSSDSAAGSSAKVPEGVAGAPNEAALLALMERTGYSMVQENGQRKYGGPPPGWEGPHPQRGCEVFVGKIPRDVYEDELVPVFEAVGRIYELRLMMDFDGKNRGYAFVMYCHKHEAKRAVRELNNYEIRPGRLLGVCCSVDNCRLFIGGIPKMKKREEILEEIAKVTEGVLDVIVYASAADKMKNRGFAFVEYESHRAAAMARRKLMPGRIQLWGHQIAVDWAEPEIDVDEDVMETVKILYVRNLMIETTEDTIKKSFGQFNPGCVERVKKIRDYAFVHFTSREDAVHAMNNLNGTELEGSCLEVTLAKPVDKEQYSRYQKAARGGGAAEAAQQPSYVYSCDPYTLAYYGYPYNALIGPNRDYFVKAGSIRGRGRGAAGNRAPGPRGSYLGGYSAGRGIYSRYHEGKGKQQEKGYELVPNLEIPTVNPVAIKPGTVAIPAIGAQYSMFPAAPAPKMIEDGKIHTVEHMISPIAVQPDPASAAAAAAAAAAAAAAVIPTVSTPPPFQGRPITPVYTVAPNVQRIPTAGIYGASYVPFAAPATATIATLQKNAAAAAAVYGGYAGYIPQAFPAAAIQVPIPDVYQTTQTPLKERLTIYEEGTCWIHTCNLKVKNVSRFISELFYIHEVFTSFLRLFST

SEQ ID NO: 757780 - protein, 531 aa, Homo sapiens
MTAEDSTAAMSSDSAAGSSAKVPEGVAGAPNEAALLALMERTGYSMVQENGQRKYGGPPPGWEGPHPQRGCEVFVGKIPRDVYEDELVPVFEAVGRIYELRLMMDFDGKNRGYAFVMYCHKHEAKRAVRELNNYEIRPGRLLGVCCSVDNCRLFIGGIPKMKKREEILEEIAKVTEGVLDVIVYASAADKMKNRGFAFVEYESHRAAAMARRKLMPGRIQLWGHQIAVDWAEPEIDVDEDVMETVKILYVRNLMIETTEDTIKKSFGQFNPGCVERVKKIRDYAFVHFTSREDAVHAMNNLNGTELEGSCLEVTLAKPVDKEQYSRYQKAARGGGAAEAAQQPSYVYSCDPYTLAYYGYPYNALIGPNRDYFVKAGSIRGRGRGAAGNRAPGPRGSYLGGYSAGRGIYSRYHEGKGQPLSFPLCRRHHLSRPPNNSSIHGGSKRSENSYCRDLRGQLRAICCSSYSHDRHTTEERGSRGRRVWRIRRLHTSGLPCCCHSGPHPRRLPDILRLVTSTKTDHTNTTEGTLDYL

SEQ ID NO: 757781 - protein, 369 aa, Homo sapiens
MTAEDSTAAMSSDSAAGSSAKVPEGVAGAPNEAALLALMERTGYSMVQENGQRKYGGPPPGWEGPHPQRGCEVFVGKIPRDVYEDELVPVFEAVGRIYELRLMMDFDGKNRGYAFVMYCHKHEAKRAVRELNNYEIRPGRLLGVCCSVDNCRLFIGGIPKMKKREEILEEIAKVTEGVLDVIVYASAADKMKNRGFAFVEYESHRAAAMARRKLMPGRIQLWGHQIAVDWAEPEIDVDEDVMETVKILYVRNLMIETTEDTIKKSFGQFNPGCVERVKKIRDYAFVHFTSREDAVHAICCSSYSHDRHTTEERGSRGRRVWRIRRLHTSGLPCCCHSGPHPRRLPDILRLVTSTKTDHTNTTEGTLDYL

SEQ ID NO: 757782 - protein, 158 aa, Homo sapiens
MTAEDSTAAMSSDSAAGSSAKVPEGVAGAPNEAALLALMERTGYSMVQENGQRKYGGPPPGWEGPHPQRGCEVFVGKIPRDVYEDELVPVFEAVGRIYELRLMMDFDGKNRGYAFVMYCHKHEAKRAVRELNNYEIRPGRQPLSFPLCRRHHLSRAAQ

SEQ ID NO: 757783 - protein, 119 aa, Homo sapiens
MIGTYTCSGRLLFVSSPQGPPNNSSIHGGSKRSENSYCRDLRGQLRAICCSSYSHDRHTTEERGSRGRRVWRIRRLHTSGLPCCCHSGPHPRRLPDILRLVTSTKTDHTNTTEGTLDYL

SEQ ID NO: 757784 - protein, 211 aa, Homo sapiens
AFSQGRLSQQDKISGQIYGKLPVLGVKIWFGEFKKQQEKGYELVPNLEIPTVNPVAIKPGTVAIPAIGAQYSMFPAAPAPKMIEDGKIHTVEHMISPIAVQPDPASAAAAAAAAAAAAAAVIPTVSTPPPFQGRPITPVYTVAPNVQRIPTAGIYGASYVPFAAPATATIATLQKNAAAAAAVYGGYAGYIPQAFPAAAIQVPIPDVYQTY

SEQ ID NO: 757785 - protein, 139 aa, Homo sapiens [sequence omitted]

SEQ ID NO: 757786 - protein, 116 aa, Homo sapiens
MTAEDSTAAMSSDSAAGSSAKVPEGVAGAPNEAALLALMERTGYSMVQENVQRIPTAGIYGASYVPFAAPATATIATLQKNAAAAAAVYGGYAGYIPQAFPAAAIQVPIPDVYQTY

SEQ ID NO: 757787 - protein, 120 aa, Homo sapiens
MKGKDSRCHSHCVDATTFPGPPNNSSIHGGSKRSENSYCRDLRGQLRAICCSSYSHDRHTTEERGSRGRRVWRIRRLHTSGLPCCCHSGPHPRRLPDILRLVTSTKTDHTNTTEGTLDYL

SEQ ID NO: 757788 - protein, 126 aa, Homo sapiens
AEFGNPYLNPVAIKLGTVAILPGPRGSYLGGYSAGRGIYSRYHEGKGGRPITPVYTVAPNVQRIPTAGIYGASYVPFAAPATATIATLQKNAAAAAAVYGGYAGYIPQAFPAAAIQVPIPDVYQTY

SEQ ID NO: 757789 - protein, 593 aa, Homo sapiens; identical to SEQ ID NO: 757774

SEQ ID NO: 757790 - protein, 593 aa, Homo sapiens; identical to SEQ ID NO: 757774

SEQ ID NO: 757791 - protein, 593 aa, Homo sapiens; identical to SEQ ID NO: 757774

SEQ ID NO: 757792 - protein, 593 aa, Homo sapiens; identical to SEQ ID NO: 757774

SEQ ID NO: 757793 - protein, 593 aa, Homo sapiens; identical to SEQ ID NO: 757774

SEQ ID NO: 757794 - protein, 593 aa, Homo sapiens; identical to SEQ ID NO: 757774

SEQ ID NO: 757795 - protein, 582 aa, Homo sapiens
MTAEDSTAAMSSDSAAGSSAKVPEGVAGAPNEAALLALMERTGYSMVQENGQRKYGGPPPGWEGPHPQRGCEVFVGKIPRDVYEDELVPVFEAVGRIYELRLMMDFDGKNRGYAFVMYCHKHEAKRAVRELNNYEIRPGRLLGVCCSVDNCRLFIGGIPKMKKREEILEEIAKVTEGVLDVIVYASAADKMKNRGFAFVEYESHRAAAMARRKLMPGRIQLWGHQIAVDWAEPEIDVDEDVMETVKILYVRNLMIETTEDTIKKSFGQFNPGCVERVKKIRDYAFVHFTSREDAVHAMNNLNGTELEGSCLEVTLAKPVDKEQYSRYQKAARGGGAAEAAQQPSYVYSCDPYTLAYYGYPYNALIGPNRDYFVKAGSIRGRGRGAAGNRAPGPRGSYLGGYSAGRGIYSRYHEGKGKQQEKGYELVPNLEIPTVNPVAIKPGTVAIPAIGAQYSMFPAAPAPKMIEDGKIHTVEHMISPIAVQPDPASAAAAAAAAAAAAAAVIPTVSTPPPFQGRPITPVYTVAPNVQRIPTAGIYGASYVPFAAPATATIATLQKNAAAAAAVYGGYAGEFLEPRRRRLQ

SEQ ID NO: 757796 - protein, 376 aa, Homo sapiens
MTAEDSTAAMSSDSAAGSSAKVPEGVAGAPNEAALLALMERTGYSMVQENGQRKYGGPPPGWEGPHPQRGCEVFVGKIPRDVYEDELVPVFEAVGRIYELRLMMDFDGKNRGYAFVMYCHKHEAKRAVRELNNYEIRPGRLLGVCCSVDNCRLFIGGIPKMKKREEILEEIAKVTEGVLDVIVYASAADKMKNRGFAFVEYESHRAAAMARRKLMPGRIQLWGHQIAVDWAEPEIDVDEDVMETVKILYVRNLMIETTEDTIKKSFGQFNPGCVERVKKIRDYAFVHFTSREDAVHAMNNLNGTELEGSCLEVTLAKPVDKEQYSRYQKAARGGGAAEAAQQPSYVYSCDPYTLAYYGYPYNALIGPNRDYFVKAA

SEQ ID NO: 757797 - protein, 34 aa, Homo sapiens
MVGTILGTEAMPSPPDEPPKLWASLSSFIKLEKL

SEQ ID NO: 757798 - protein, 213 aa, Homo sapiens
MPRLLRLSLLWLGLLLVRFSRELSDISSARKLCGRYLVKEIEKLCGHANWSQFRFEEETPFSRLIAQASEKVEAYSPYQFESPQTASPARGRGTNPVSTSWEEAVNSWEMQSLPEYKDKKGYSPLGKTREFSSSHNINVYIHENAKFQKKRRNKIKTLSNLFWGHHPQRKRRGYSEKCCLTGCTKEELSIACLPYIDFKRLKEKRSSLVTKIY

SEQ ID NO: 757799 - protein, 177 aa, Homo sapiens
MPRLLRLSLLWLGLLLVRFSRELSDISSARKLCGRYLVKEIEKLCGHANWSQFRFEEETPFSRLIAQASEKVEAYSPYQFESPQTASPARGRGTNPVSTSWEEAVNSWEMQSLPEYKDKKGYSPLGLLEFAGGPLQMLFAWVSPAEAAEQQRLLPVPSSGSFIPEGHPLDASQSFPV

SEQ ID NO: 757800 - protein, 505 aa, Homo sapiens
MGLVSSKKPDKEKPIKEKDKGQWSPLKVSAQDKDAPPLPPLVVFNHLTPPPPDEHLDEDKHFVVALYDYTAMNDRDLQMLKGEKLQVLKGTGDWWLARSLVTGREGYVPSNFVARVESLEMERWFFRSQGRKEAERQLLAPINKAGSFLIRESETNKGAFSLSVKDVTTQGELIKHYKIRCLDEGGYYISPRITFPSLQALVQHYSKKGDGLCQRLTLPCVRPAPQNPWAQDEWEIPRQSLRLVRKLGSGQFGEVWMGYYKNNMKVAIKTLKEGTMSPEAFLGEANVMKALQHERLVRLYAVVTKEPIYIVTEYMARGCLLDFLKTDEGSRLSLPRLIDMSAQIAEGMAYIERMNSIHRDLRAANILVSEALCCKIADFGLARIIDSEYTAQEGAKFPIKWTAPEAIHFGVFTIKADVWSFGVLLMEVVTYGRVPYPGMSNPEVIRNLERGYRMPRPDTCPPELYRGVIAECWRSRPEERPTFEFLQSVLEDFYTATERQYELQP

SEQ ID NO: 757801 - protein, 102 aa, Homo sapiens
EGEVVLTEPCSQPRSSSDSISGVHLLCLALFDACWEGQSIAKSDEHQARHAGTVLDPGLLPPGHATIYNCVNILQGWPERLGLMASEVHGVAKFSCHFLTLL

SEQ ID NO: 757802 - protein, 454 aa, Homo sapiens
MGLVSSKKPDKEKPIKEKDKGQWSPLKVSAQDKDAPPLPPLVVFNHLTPPPPDEHLDEDKHFVVALYDYTAMNDRDLQMLKGEKLQVLKGTGDWWLARSLVTGREGYVPSNFVARVESLEMERWFFRSQGRKEAERQLLAPINKAGSFLIRESETNKGAFSLSVKDVTTQGELIKHYKIRCLDEGGYYISPRITFPSLQALVQHYSSYYKNNMKVAIKTLKEGTMSPEAFLGEANVMKALQHERLVRLYAVVTKEPIYIVTEYMARGCLLDFLKTDEGSRLSLPRLIDMSAQIAEGMAYIERMNSIHRDLRAANILVSEALCCKIADFGLARIIDSEYTAQEGAKFPIKWTAPEAIHFGVFTIKADVWSFGVLLMEVVTYGRVPYPGMSNPEVIRNLERGYRMPRPDTCPPELYRGVIAECWRSRPEERPTFEFLQSVLEDFYTATERQYELQP

SEQ ID NO: 757803 - protein, 434 aa, Homo sapiens
MNDRDLQMLKGEKLQVLKGTGDWWLARSLVTGREGYVPSNFVARVESLEMERWFFRSQGRKEAERQLLAPINKAGSFLIRESETNKGAFSLSVKDVTTQGELIKHYKIRCLDEGGYYISPRITFPSLQALVQHYSKKGDGLCQRLTLPCVRPAPQNPWAQDEWEIPRQSLRLVRKLGSGQFGEVWMGYYKNNMKVAIKTLKEGTMSPEAFLGEANVMKALQHERLVRLYAVVTKEPIYIVTEYMARGCLLDFLKTDEGSRLSLPRLIDMSAQIAEGMAYIERMNSIHRDLRAANILVSEALCCKIADFGLARIIDSEYTAQEGAKFPIKWTAPEAIHFGVFTIKADVWSFGVLLMEVVTYGRVPYPGMSNPEVIRNLERGYRMPRPDTCPPELYRGVIAECWRSRPEERPTFEFLQSVLEDFYTATERQYELQP

SEQ ID NO: 757804 - protein, 438 aa, Homo sapiens
GTDSITVLRSSSSGPTGTRNARFLFLGDRQCRREAVWEYSEEQGRSEFHLFLPFSRWFFRSQGRKEAERQLLAPINKAGSFLIRESETNKGAFSLSVKDVTTQGELIKHYKIRCLDEGGYYISPRITFPSLQALVQHYSKKGDGLCQRLTLPCVRPAPQNPWAQDEWEIPRQSLRLVRKLGSGQFGEVWMGYYKNNMKVAIKTLKEGTMSPEAFLGEANVMKALQHERLVRLYAVVTKEPIYIVTEYMARGCLLDFLKTDEGSRLSLPRLIDMSAQIAEGMAYIERMNSIHRDLRAANILVSEALCCKIADFGLARIIDSEYTAQEGAKFPIKWTAPEAIHFGVFTIKADVWSFGVLLMEVVTYGRVPYPGMSNPEVIRNLERGYRMPRPDTCPPELYRGVIAECWRSRPEERPTFEFLQSVLEDFYTATERQYELQP

SEQ ID NO: 757805 - protein, 131 aa, Homo sapiens [sequence omitted]

SEQ ID NO: 757806 - protein, 468 aa, Homo sapiens
MGLVSSKKPDKEKPIKEKDKGQWSPLKVSAQDKDAPPLPPLVVFNHLTPPPPDEHLDEDKHFVVALYDYTAMNDRDLQMLKGEKLQVLKGTGDWWLARSLVTGREGYVPSNFVARVESLEMERWFFRSQGRKEAERQLLAPINKAGSFLIRESETNKGAFSLSVKDVTTQGELIKHYKIRCLDEGGYYISPRITFPSLQALVQHYSKKGDGLCQRLTLPCVRPAPQNPWAQDEWEIPRQSLRLVRKLGSGQFGEVWMGYYKNNMKVAIKTLKEGTMSPEAFLGEANVMKALQHERLVRLYAVVTKEPIYIVTEYMARGCLLDFLKTDEGSRLSLPRLIDMSAQIAEGMAYIERMNSIHRDLRAANILVSEALCCKIADFGLARIIDSEYTAQEGPSSHQVGRPGSIHLGVFTIKRRVAVEAPEEVAYGGCLPGWDPRGSRWGGPLGPPARGLGFLGRPGPLFGGGTPE

SEQ ID NO: 757807 - protein, 398 aa, Homo sapiens
MGLVSSKKPDKEKPIKEKDKGQWSPLKVSAQDKDAPPLPPLVVFNHLTPPPPDEHLDEDKHFVVALYDYTAMNDRDLQMLKGEKLQVLKGTGDWWLARSLVTGREGYVPSNFVARVESLEMERWFFRSQGRKEAERQLLAPINKAGSFLIRESETNKGAFSLSVKDVTTQGELIKHYKIRCLDEGGYYISPRITFPSLQALVQHYSKKGDGLCQRLTLPCVRPAPQNPWAQDEWEIPRQSLRLVRKLGSGQFGEVWMGYYKNNMKVAIKTLKEGTMSPEAFLGEANVMKALQHERLVRLYAVVTKEPIYIVTEYMARGCLLDFLKTDEGSRLSLPRLIDMSAQIAEGMAYIERMNSIHRDLRAANILVSEALCCKIADFGLARIIDSEYTAQEGKHSP

SEQ ID NO: 757808 - protein, 117 aa, Homo sapiens
LLFWASRRGVYSAEEQHSHLSTPSKKQLLPQQPTGAVRGTQCGLGLGVEAPRLSFTMCLFPQIAEGMAYIERMNSIHRDLRAANILVSEALCCKIADFGLARIIDSEYTAQEGKHSP

SEQ ID NO: 757809 - protein, 125 aa, Homo sapiens
GCLETGQPGNARGWRSGLGLWALLSLAWAHCAPRDAQGPPPTEDPSPSPPLAVSSAAGMSNPEVIRNLERGYRMPRPDTCPPELYRGVIAECWRSRPEERPTFEFLQSVLEDFYTATERQYELQP

SEQ ID NO: 757810 - protein, 124 aa, Homo sapiens [sequence omitted]

SEQ ID NO: 757811 - protein, 819 aa, Homo sapiens
RALPEDAAAPAPAMGAPACALALCVAVAIVAGASSESLGTEQRVVGRAAEVPGPEPGQQEQLVFGSGDAVELSCPPPGGGPMGPTVWVKDGTGLVPSERVLVGPQRLQVLNASHEDSGAYSCRQRLTQRVLCHFSVRVTDAPSSGDDEDGEDEAEDTGVDTGAPYWTRPERMDKKLLAVPAANTVRFRCPAAGNPTPSISWLKNGREFRGEHRIGGIKLRHQQWSLVMESVVPSDRGNYTCVVENKFGSIRQTYTLDVLERSPHRPILQAGLPANQTAVLGSDVEFHCKVYSDAQPHIQWLKHVEVNGSKVGPDGTPYVTVLKTAGANTTDKELEVLSLHNVTFEDAGEYTCLAGNSIGFSHHSAWLVVLPAEEELVEADEAGSVYAGILSYGVGFFLFILVVAAVTLCRLRSPPKKGLGSPTVHKISRFPLKRQVSLESNASMSSNTPLVRIARLSSGEGPTLANVSELELPADPKWELSRARLTLGKPLGEGCFGQVVMAEAIGIDKDRAAKPVTVAVKMLKDDATDKDLSDLVSEMEMMKMIGKHKNIINLLGACTQGGPLYVLVEYAAKGNLREFLRARRPPGLDYSFDTCKPPEEQLTFKDLVSCAYQVARGMEYLASQKCIHRDLAARNVLVTEDNVMKIADFGLARDVHNLDYYKKTTNGRLPVKWMAPEALFDRVYTHQSDVWSFGVLLWEIFTLGGSPYPGIPVEELFKLLKEGHRMDKPANCTHDLYMIMRECWHAAPSQRPTFKQLVEDLDRVLTVTSTDEYLDLSAPFEQYSPGGQDTPSSSSSGDDSVFAHDLLPPAPPSSGGSRT

SEQ ID NO: 757812 - protein, 707 aa, Homo sapiens
RALPEDAAAPAPAMGAPACALALCVAVAIVAGASSESLGTEQRVVGRAAEVPGPEPGQQEQLVFGSGDAVELSCPPPGGGPMGPTVWVKDGTGLVPSERVLVGPQRLQVLNASHEDSGAYSCRQRLTQRVLCHFSVRVTDAPSSGDDEDGEDEAEDTGVDTGAPYWTRPERMDKKLLAVPAANTVRFRCPAAGNPTPSISWLKNGREFRGEHRIGGIKLRHQQWSLVMESVVPSDRGNYTCVVENKFGSIRQTYTLDVLERSPHRPILQAGLPANQTAVLGSDVEFHCKVYSDAQPHIQWLKHVEVNGSKVGPDGTPYVTVLKVSLESNASMSSNTPLVRIARLSSGEGPTLANVSELELPADPKWELSRARLTLGKPLGEGCFGQVVMAEAIGIDKDRAAKPVTVAVKMLKDDATDKDLSDLVSEMEMMKMIGKHKNIINLLGACTQGGPLYVLVEYAAKGNLREFLRARRPPGLDYSFDTCKPPEEQLTFKDLVSCAYQVARGMEYLASQKCIHRDLAARNVLVTEDNVMKIADFGLARDVHNLDYYKKTTNGRLPVKWMAPEALFDRVYTHQSDVWSFGVLLWEIFTLGGSPYPGIPVEELFKLLKEGHRMDKPANCTHDLYMIMRECWHAAPSQRPTFKQLVEDLDRVLTVTSTDEYLDLSAPFEQYSPGGQDTPSSSSSGDDSVFAHDLLPPAPPSSGGSRT

SEQ ID NO: 757813 - protein, 819 aa, Homo sapiens; identical to SEQ ID NO: 757811

SEQ ID NO: 757814 - protein, 649 aa, Homo sapiens
GTDRIELRYERVMRMDKKLLAVPAANTVRFRCPAAGNPTPSISWLKNGREFRGEHRIGGIKLRHQQWSLVMESVVPSDRGNYTCVVENKFGSIRQTYTLDVLERSPHRPILQAGLPANQTAVLGSDVEFHCKVYSDAQPHIQWLKHVEVNGSKTAGANTTDKELEVLSLHNVTFEDAGEYTCLAGNSIGFSHHSAWLVVLPAEEELVEADEAGSVYAGILSYGVGFFLFILVVAAVTLCRLRSPPKKGLGSPTVHKISRFPLKRQVSLESNASMSSNTPLVRIARLSSGEGPTLANVSELELPADPKWELSRARLTLGKPLGEGCFGQVVMAEAIGIDKDRAAKPVTVAVKMLKDDATDKDLSDLVSEMEMMKMIGKHKNIINLLGACTQGGPLYVLVEYAAKGNLREFLRARRPPGLDYSFDTCKPPEEQLTFKDLVSCAYQVARGMEYLASQKCIHRDLAARNVLVTEDNVMKIADFGLARDVHNLDYYKKTTNGRLPVKWMAPEALFDRVYTHQSDVWSFGVLLWEIFTLGGSPYPGIPVEELFKLLKEGHRMDKPANCTHDLYMIMRECWHAAPSQRPTFKQLVEDLDRVLTVTSTDEYLDLSAPFEQYSPGGQDTPSSSSSGDDSVFAHDLLPPAPPSSGGSRT

SEQ ID NO: 757815 - protein, 642 aa, Homo sapiens
GTDRIELRYERVMRMDKKLLAVPAANTVRFRCPAAGNPTPSISWLKNGREFRGEHRIGGIKLRHQQWSLVMESVVPSDRGNYTCVVENKFGSIRQTYTLDVLERSPHRPILQAGLPANQTAVLGSDVEFHCKVYSDAQPHIQWLKHTAGANTTDKELEVLSLHNVTFEDAGEYTCLAGNSIGFSHHSAWLVVLPAEEELVEADEAGSVYAGILSYGVGFFLFILVVAAVTLCRLRSPPKKGLGSPTVHKISRFPLKRQVSLESNASMSSNTPLVRIARLSSGEGPTLANVSELELPADPKWELSRARLTLGKPLGEGCFGQVVMAEAIGIDKDRAAKPVTVAVKMLKDDATDKDLSDLVSEMEMMKMIGKHKNIINLLGACTQGGPLYVLVEYAAKGNLREFLRARRPPGLDYSFDTCKPPEEQLTFKDLVSCAYQVARGMEYLASQKCIHRDLAARNVLVTEDNVMKIADFGLARDVHNLDYYKKTTNGRLPVKWMAPEALFDRVYTHQSDVWSFGVLLWEIFTLGGSPYPGIPVEELFKLLKEGHRMDKPANCTHDLYMIMRECWHAAPSQRPTFKQLVEDLDRVLTVTSTDEYLDLSAPFEQYSPGGQDTPSSSSSGDDSVFAHDLLPPAPPSSGGSRT

SEQ ID NO: 757816 - protein, 628 aa, Homo sapiens
GTDRIELRYERVMRMDKKLLAVPAANTVRFRCPAAGNPTPSISWLKNGREFRGEHRIGGIKLRHQQWSLVMESVVPSDRGNYTCVVENKFGSIRQTYTLDVLERSPHRPILQAGLPANQTAVLGSDVEFHCKTAGANTTDKELEVLSLHNVTFEDAGEYTCLAGNSIGFSHHSAWLVVLPAEEELVEADEAGSVYAGILSYGVGFFLFILVVAAVTLCRLRSPPKKGLGSPTVHKISRFPLKRQVSLESNASMSSNTPLVRIARLSSGEGPTLANVSELELPADPKWELSRARLTLGKPLGEGCFGQVVMAEAIGIDKDRAAKPVTVAVKMLKDDATDKDLSDLVSEMEMMKMIGKHKNIINLLGACTQGGPLYVLVEYAAKGNLREFLRARRPPGLDYSFDTCKPPEEQLTFKDLVSCAYQVARGMEYLASQKCIHRDLAARNVLVTEDNVMKIADFGLARDVHNLDYYKKTTNGRLPVKWMAPEALFDRVYTHQSDVWSFGVLLWEIFTLGGSPYPGIPVEELFKLLKEGHRMDKPANCTHDLYMIMRECWHAAPSQRPTFKQLVEDLDRVLTVTSTDEYLDLSAPFEQYSPGGQDTPSSSSSGDDSVFAHDLLPPAPPSSGGSRT

SEQ ID NO: 757817 - protein, 840 aa, Homo sapiens
GTDRIELRYERVMRMDKKLLAVPAANTVRFRCPAAGNPTPSISWLKNGREFRGEHRIGGIKLRHQQWSLVMESVVPSDRGNYTCVVENKFGSIRQTYTLDVLERSPHRPILQAGLPANQTAVLGSDVEFHCKVYSDAQPHIQWLKHVEVNGSKTAGANTTDKELEVLSLHNVTFEDAGEYTCLAGNSIGFSHHSAWLVVLPAEEELVEADEAGSVYAGILSYGVGFFLFILVVAAVTLCRLRSPPKKGLGSPTVHKISRFPLKRQVSLESNASMSSNTPLVRIARLSSGEGPTLANVSELELPADPKWELSRARLTLGKPLGEGCFGQVVMAEAIGIDKDRAAKPVTVAVKMLKDDATDKDLSDLVSEMEMMKMIGKHKNIINLLGACTQGGPLYVLVEYAAKGNLREFLRARRPPGLDYSFDTCKPPEEQLTFKDLVSCAYQVARGMEYLASQKCIHRDLAARNVLVTEDNVMKIADFGLARDVHNLDYYKKTTNGRLPVKWMAPEALFDRVYTHQSDVWSFGVLLWEIFTLGGSPYPGIPVEELFKLLKEGHRMDKPANCTHDLYMIMRECWHAAPSQRPTFKQLVEDLDRVLTVTSTDEYLDLSAPFEQYSPGGQDTPSSSSSGDDSVFAHDLLATGPQQCEGSLAAHPAAGAQPLPGMRLSADGETATQSFGLCVCVCVCVCVCTSACACVRAHLASRCRGTLGVPAAVQRSPDWCCSTEGPLFWGDPVQNVSGPTRWDPRGAGSWARHGSGLCLCTTGHHRVGLGPSQHPKLSLQGSPTCPAPCAWGVSGTASPPPGFPTSHPAPQRLKLRVPEDGSLYLLCKRFIPETSVHFYK

SEQ ID NO: 757818 - protein, 819 aa, Homo sapiens; identical to SEQ ID NO: 757811

SEQ ID NO: 757819 - protein, 403 aa, Homo sapiens
EQIESSSDERVMRMDKKLLAVPAANTVRFRCPAAGNPTPSISWLKNGREFRGEHRIGGIKLRHQQWSLVMESVVPSDRGNYTCVVENKFGSIRQTYTLDVLERSPHRPILQAGLPANQTAVLGSDVEFHCKVYSDAQPHIQWLKHVEVNGSKTAGANTTDKELEVLSLHNVTFEDAGEYTCLAGNSIGFSHHSAWLVVLPAEEELVEADEAGSVYAGILSYGVGFFLFILVVAAVTLCRLRSPPKKGLGSPTVHKISRFPLKRQVSLESNASMSSNTPLVRIARLSSGEGPTLANVSELELPADPKWELSRARLTLGKPLGEGCFGQVVMAEAIGIDKDRAAKPVTVAVKMLKDDATDKDLSDLVSEMEMMKMIGKHKNIINLVQVPMLLDVTSLYISIYIIY

SEQ ID NO: 757820 - protein, 217 aa, Homo sapiens
GTDRIELRYERVMRMDKKLLAVPAANTVRFRCPAAGNPTPSISWLKNGREFRGEHRIGGIKLRHQQWSLVMESVVPSDRGNYTCVVENKFGSIRQTYTLDVLERSPHRPILQAGLPANQTAVLGSDVEFHCKVYSDAQPHIQWLKHVEVNGSKVGPDGTPYVTVLKSWISESVEADVRLRLANVSERDGGEYLCRATNFIGVAREGLLAERSRAPSR

SEQ ID NO: 757821 - protein, 587 aa, Homo sapiens
LYKRAVVTTEAPKMLLRALEKLQQNRASPLAGRAGALRPPPPPSSAKGAFAERLAASTGAPLQRADPPAQRRHVALGRVPCRERSSLLALNAWRGRYFRKLQEQAGEGKSYSSIFTCFNYYFLLGMDNGMFSGFIMIKNLLLFCISMNLSSHFGFSQMPTSSVKDETNDNITIFTRILDGLLDGYDNRLRPGLGERITQVRTDIYVTSFGPVSDTEMEYTIDVFFRQSWKDERLRFKGPMQRLPLNNLLASKIWTPDTFFHNGKKSIAHNMTTPNKLLRLEDDGTLLYTMRLTISAECPMQLEDFPMDAHACPLKFGSYAYPNSEVVYVWTNGSTKSVVVAEDGSRLNQYHLMGQTVGTENISTSTGEYTIMTAHFHLKRKIGYFVIQTYLPCIMTVILSQVSFWLNRESVPARTVFGVTTVLTMTTLSISARNSLPKVAYATAMDWFIAVCYAFVFSALIEFATVNYFTKRGWAWDGKKALEAAKIKKKREVILNKSTNAFTTGKMSHPPNIPKEQTPAGTSNTTSVSVKPSEEKTSESKKTYNSISKIDKMSRIVFPVLFGTFNLVYWATYLNREPVIKGAASPK

SEQ ID NO: 757822 - protein, 352 aa, Homo sapiens
MWRSGECLPLNNLLASKIWTPDTFFHNGKKSIAHNMTTPNKLLRLEDDGTLLYTMRLTISAECPMQLEDFPMDAHACPLKFGSYAYPNSEVVYVWTNGSTKSVVVAEDGSRLNQYHLMGQTVGTENISTSTGEYTIMTAHFHLKRKIGYFVIQTYLPCIMTVILSQVSFWLNRESVPARTVFGVTTVLTMTTLSISARNSLPKVAYATAMDWFIAVCYAFVFSALIEFATVNYFTKRGWAWDGKKALEAAKIKKKREVILNKSTNAFTTGKMSHPPNIPKEQTPAGTSNTTSVSVKPSEEKTSESKKTYNSISKIDKMSRIVFPVLFGTFNLVYWATYLNREPVIKGAASPK

SEQ ID NO: 757823 - protein, 501 aa, Homo sapiens
MNRSRQVTCVAWVRCGVAKETPDKVELSKEEVKRLIAEAKEKLQEEGGGSDEEETGSPSEDGMQSARTQARPREPLEDGDPEDDRTLDDDELAEYDLDKYDEEGDPDAETLGESLLGLTVYGSNDQDPYVTLKDTEQYEREDFLIKPSDNLIVCGRAEQDQCNLEVHVYNQEEDSFYVHHDILLSAYPLSVEWLNFDPSPDDSTGNYIAVGNMTPVIEVWDLDIVDSLEPVFTLGSKLSKKKKKKGKKSSSAEGHTDAVLDLSWNKLIRNVLASASADNTVILWDMSLGKPAASLAVHTDKVQTLQFHPFEAQTLISGSYDKSVALYDCRSPDESHRMWRFSGQIERVTWNHFSPCHFLASTDDGFVYNLDARSDKPIFTLNAHNDEISGLDLSSQIKGCLVTASADKYVKIWDILGDRPSLVHSRDMKMGVLFCSSCCPDLPFIYAFGGQKEGLRVWDISTVSSVNEAFGRRERLVLGSARNSSISGPFGSRSSDTPMES

SEQ ID NO: 757824 - protein, 501 aa, Homo sapiens; identical to SEQ ID NO: 757823

SEQ ID NO: 757825 - protein, 501 aa, Homo sapiens; identical to SEQ ID NO: 757823

SEQ ID NO: 757826 - protein, 501 aa, Homo sapiens; identical to SEQ ID NO: 757823

SEQ ID NO: 757827 - protein, 501 aa, Homo sapiens; identical to SEQ ID NO: 757823

SEQ ID NO: 757828 - protein, 501 aa, Homo sapiens; identical to SEQ ID NO: 757823

SEQ ID NO: 757829 - protein, 439 aa, Homo sapiens
MKSARTQARPREPLEDGDPEDDRTLDDDELAEYDLDKYDEEGDPDAETLGESLLGLTVYGSNDQDPYVTLKDTEQYEREDFLIKPSDNLIVCGRAEQDQCNLEVHVYNQEEDSFYVHHDILLSAYPLSVEWLNFDPSPDDSTGNYIAVGNMTPVIEVWDLDIVDSLEPVFTLGSKLSKKKKKKGKKSSSAEGHTDAVLDLSWNKLIRNVLASASADNTVILWDMSLGKPAASLAVHTDKVQTLQFHPFEAQTLISGSYDKSVALYDCRSPDESHRMWRFSGQIERVTWNHFSPCHFLASTDDGFVYNLDARSDKPIFTLNAHNDEISGLDLSSQIKGCLVTASADKYVKIWDILGDRPSLVHSRDMKMGVLFCSSCCPDLPFIYAFGGQKEGLRVWDISTVSSVNEAFGRRERLVLGSARNSSISGPFGSRSSDTPMES

SEQ ID NO: 757830 - protein, 510 aa, Homo sapiens
MNRSRQVTCVAWVRCGVAKETPDKVELSKEEVKRLIAEAKEKLQEEGGGSDEEETGSPSEDGMQSARTQARPREPLEDGDPEDDRTLDDDELAEYDLDKYDEEGDPDAETLGESLLGLTVYGSNDQDPYVTLKDTSMTFFSSHLEQYEREDFLIKPSDNLIVCGRAEQDQCNLEVHVYNQEEDSFYVHHDILLSAYPLSVEWLNFDPSPDDSTGNYIAVGNMTPVIEVWDLDIVDSLEPVFTLGSKLSKKKKKKGKKSSSAEGHTDAVLDLSWNKLIRNVLASASADNTVILWDMSLGKPAASLAVHTDKVQTLQFHPFEAQTLISGSYDKSVALYDCRSPDESHRMWRFSGQIERVTWNHFSPCHFLASTDDGFVYNLDARSDKPIFTLNAHNDEISGLDLSSQIKGCLVTASADKYVKIWDILGDRPSLVHSRDMKMGVLFCSSCCPDLPFIYAFGGQKEGLRVWDISTVSSVNEAFGRRERLVLGSARNSSISGPFGSRSSDTPMES

SEQ ID NO: 757831 - protein, 289 aa, Homo sapiens
MTPVIEVWDLDIVDSLEPVFTLGSKLSKKKKKKGKKSSSAEGHTDAVLDLSWNKLIRNVLASASADNTVILWDMSLGKPAASLAVHTDKVQTLQFHPFEAQTLISGSYDKSVALYDCRSPDESHRMWRFSGQIERVTWNHFSPCHFLASTDDGFVYNLDARSDKPIFTLNAHNDEISGLDLSSQIKGCLVTASADKYVKIWDILGDRPSLVHSRDMKMGVLFCSSCCPDLPFIYAFGGQKEGLRVWDISTVSSVNEAFGRRERLVLGSARNSSISGPFGSRSSDTPMES

SEQ ID NO: 757832 - protein, 423 aa, Homo sapiens
MYTRGPGKGRGDGLGWFYLDKYDEEGDPDAETLGESLLGLTVYGSNDQDPYVTLKDTEQYEREDFLIKPSDNLIVCGRAEQDQCNLEVHVYNQEEDSFYVHHDILLSAYPLSVEWLNFDPSPDDSTGNYIAVGNMTPVIEVWDLDIVDSLEPVFTLGSKLSKKKKKKGKKSSSAEGHTDAVLDLSWNKLIRNVLASASADNTVILWDMSLGKPAASLAVHTDKVQTLQFHPFEAQTLISGSYDKSVALYDCRSPDESHRMWRFSGQIERVTWNHFSPCHFLASTDDGFVYNLDARSDKPIFTLNAHNDEISGLDLSSQIKGCLVTASADKYVKIWDILGDRPSLVHSRDMKMGVLFCSSCCPDLPFIYAFGGQKEGLRVWDISTVSSVNEAFGRRERLVLGSARNSSISGPFGSRSSDTPMES

SEQ ID NO: 757833 - protein, 413 aa, Homo sapiens
AAAYYYKIRGRVDEEGDPDAETLGESLLGLTVYGSNDQDPYVTLKDTEQYEREDFLIKPSDNLIVCGRAEQDQCNLEVHVYNQEEDSFYVHHDILLSAYPLSVEWLNFDPSPDDSTGNYIAVGNMTPVIEVWDLDIVDSLEPVFTLGSKLSKKKKKKGKKSSSAEGHTDAVLDLSWNKLIRNVLASASADNTVILWDMSLGKPAASLAVHTDKVQTLQFHPFEAQTLISGSYDKSVALYDCRSPDESHRMWRFSGQIERVTWNHFSPCHFLASTDDGFVYNLDARSDKPIFTLNAHNDEISGLDLSSQIKGCLVTASADKYVKIWDILGDRPSLVHSRDMKMGVLFCSSCCPDLPFIYAFGGQKEGLRVWDISTVSSVNEAFGRRERLVLGSARNSSISGPFGSRSSDTPMES

SEQ ID NO: 757834 - protein, 320 aa, Homo sapiens
MNRSRQVTCVAWVRCGVAKETPDKVELSKEEVKRLIAEAKEKLQEEGGGSDEEETGSPSEDGMQSARTQARPREPLEDGDPEDDRTLDDDELAEYDLDKYDEEGDPDAETLGESLLGLTVYGSNDQDPYVTLKDTEQYEREDFLIKPSDNLIVCGRAEQDQCNLEVHVYNQEEDSFYVHHDILLSAYPLSVEWLNFDPSPDDSTGNYIAVGNMTPVIEVWDLDIVDSLEPVFTLGSKLSKKKKKKGKKSSSAEGHTDAVLDLSWNKLIRNVLASASADNTVILWDMSLGKPAASLAVHTDKSQHCRFSPLEPESRSGAMV

SEQ ID NO: 757835 - protein, 264 aa, Homo sapiens
MNRSRQVTCVAWVRCGVAKETPDKVELSKEEVKRLIAEAKEKLQEEGGGSDEEETGSPSEDGMQSARTQARPREPLEDGDPEDDRTLDDDELAEYDLDKYDEEGDPDAETLGESLLGLTVYGSNDQDPYVTLKDTEQYEREDFLIKPSDNLIVCGRAEQDQCNLEVHVYNQEEDSFYVHHDILLSAYPLSVEWLNFDPSPDDSTGNYIAVGNMTPVIEVWDLDIVDSLEPVFTLGSKLFHKETRRTRVYGWVSSMPDLMSRSRS

SEQ ID NO: 757836 - protein, 116 aa, Homo sapiens
MKSPGLDLSSQIKGCLVTASADKYVKIWDILGDRPSLVHSRDMKMGVLFCSSCCPDLPFIYAFGGQKEGLRVWDISTVSSVNEAFGRRERLVLGSARNSSISGPFGSRSSDTPMES

SEQ ID NO: 757837 - protein, 218 aa, Homo sapiens
MNRSRQVTCVAWVRCGVAKETPDKVELSKEEVKRLIAEAKEKLQEEGGGSDEEETGSPSEDGMQSARTQARPREPLEDGDPEDDRTLDDDELAEYDLDKYDEEGDPDAETLGESLLGLTVYGSNDQDPYVTLKDTEQYEREDFLIKPSDNLIVCGRAEQDQCNLEVHVYNQENQPANSDPREGPQDTPCTTAILNVLMEAVPVLCPLLPALTVEDIAI

SEQ ID NO: 757838 - protein, 47 aa, Homo sapiens
  misc_feature (4)..(4): Xaa can be any naturally occurring amino acid
  misc_feature (9)..(9): Xaa can be any naturally occurring amino acid
  misc_feature (12)..(13): Xaa can be any naturally occurring amino acid
  misc_feature (16)..(16): Xaa can be any naturally occurring amino acid
  misc_feature (21)..(21): Xaa can be any naturally occurring amino acid
  misc_feature (24)..(24): Xaa can be any naturally occurring amino acid
  misc_feature (37)..(37): Xaa can be any naturally occurring amino acid
MAVXERSVXPRXXGGXTEGSXAHXETIRCNRNSVLQXYTHEVETGAY

SEQ ID NO: 757839 - protein, 771 aa, Homo sapiens
MVIEVKAIGGKKDRSLFLFTDLIVCTTLKRKSGSLRRSSMSLYTAASVIDTASKYKMLWKLPLEDADIIKGASQATNRENIQKAISRLDEDLTTLGQMSKLSESLGFPHQSLDDALRDLSAAMHRDLSEKQALCYALSFPPTKLELCATRPEGTDSYIFEFPHPDARLGFEQAFDEAKRKLASSKSCLDPEFLKAIPIMKTRSGMQFSCAAPTLNSCPEPSPEVWVCNSDGYVGQVCLLSLRAEPDVEACIAVCSARILCIGAVPGLQPRCHREPPPSLRSPPETAPEPAGPELDVEAAADEEAATLAEPGPQPCLHISIAGSGLEMTPGLGEGDPRPELVPFDSDSDDESSPSPSGTLQSQASRSTISSSFGNEETPSSKEATAETTSSEEEQEPGFLPLSGSFGPGGPCGTSPMDGRALRRSSHGSFTRGSLEDLLSVDPEAYQSSVWLGTEDGCVHVYQSSDSIRDRRNSMKLQHAASVTCILYLNNQVFVSLANGELVVYQREAGHFWDPQNFKSVTLGTQGSPITKMVSVGGRLWCGCQNRVLVLSPDTLQLEHMFYVGQDSSRCVACMVDSSLGVWVTLKGSAHVCLYHPDTFEQLAEVDVTPPVHRMLAGSDAIIRQHKAACLRITALLVCEELLWVGTSAGVVLTMPTSPGTVSCPRAPLSPTGLGQGHTGHVRFLAAVQLPDGFNLLCPTPPPPPDTGPEKLPSLEHRDSPWHRGPAPARPKMLVISGGDGYEDFRLSSGGGSSSETVGRDDSTNHLLLWRV

SEQ ID NO: 757840 - protein, 886 aa, Homo sapiens
HVIPHMMPIHGFQQSMRENKEKQALSDLMIKPVQRIPRYELLVKDLLKHTPEDHPDHPLLLEAQRNIKQVAERINKGVRSAEEAERHARVLQEIEAHIEGMEDLQAPLRRFLRQEMVIEVKAIGGKKDRSLFLFTDLIVCTTLKRKSGSLRRSSMSLYTAASVIDTASKYKMLWKLPLEDADIIKGASQATNRENIQKAISRLDEDLTTLGQMSKLSESLGFPHQSLDDALRDLSAAMHRDLSEKQALCYALSFPPTKLELCATRPEGTDSYIFEFPHPDARLGFEQAFDEAKRKLASSKSCLDPEFLKAIPIMKTRSGMQFSCAAPTLNSCPEPSPEVWVCNSDGYVGQVCLLSLRAEPDVEACIAVCSARILCIGAVPGLQPRCHREPPPSLRSPPETAPEPAGPELDVEAAADEEAATLAEPGPQPCLHISIAGSGLEMTPGLGEGDPRPELVPFDSDSDDESSPSPSGTLQSQASRSTISSSFGNEETPSSKEATAETTSSEEEQEPGFLPLSGSFGPGGPCGTSPMDGRALRRSSHGSFTRGSLEDLLSVDPEAYQSSVWLGTEDGCVHVYQSSDSIRDRRNSMKLQHAASVTCILYLNNQVFVSLANGELVVYQREAGHFWDPQNFKSVTLGTQGSPITKMVSVGGRLWCGCQNRVLVLSPDTLQLEHMFYVGQDSSRCVACMVDSSLGVWVTLKGSAHVCLYHPDTFEQLAEVDVTPPVHRMLAGSDAIIRQHKAACLRITALLVCEELLWVGTSAGVVLTMPTSPGTVSCPRAPLSPTGLGQGHTGHVRFLAAVQLPDGFNLLCPTPPPPPDTGPEKLPSLEHRDSPWHRGPAPARPKMLVISGGDGYEDFRLSSGGGSSSETVGRDDSTNHLLLWRV

SEQ ID NO: 757841 - protein, 228 aa, Homo sapiens
EAGLPMTHLLPRLPQHMFYVGQDSSRCVACMVDSSLGVWVTLKGSAHVCLYHPDTFEQLAEVDVTPPVHRMLAGSDAIIRQHKAACLRITALLVCEELLWVGTSAGVVLTMPTSPGTVSCPRAPLSPTGLGQGHTGHVRFLAAVQLPDGFNLLCPTPPPPPDTGPEKLPSLEHRDSPWHRGPAPARPKMLVISGGDGYEDFRLSSGGGSSSETVGRDDSTNHLLLWRV

SEQ ID NO: 757842 - protein, 2211 aa, Homo sapiens
SSLCSFTVCICSNGLPSSNLVFFALSPVQCTAPFWEPPPCFQVFHKGRTAQAAATKIETTGPQRSRSLSLQPAGLALGSSLAGGPPGETFGRATELEPGREPLLRLASSSHTPCAAFGVGPALLGMGGQGGLPRLPRGQAPPRVSYATMADGAPRPQLYRSVSFKLLERWSGGPGLREEDTDTPGLRRRASCRPTTAARGQPSRRVSKLASGPLAAPAQPRPLRSLSPSVRQLSRRFDAPRLDDGSAGTRDGGVLPAAAEEAAEGPARGAWPSVTEMRKLFGGPGSRRPSADSESPGTPSPDGAAWEPPARESRQPPTPPPRTCFPLAGLRSARPLTGPETEGRLRRPQQQQERAQRPADGLHSWHIFSQPQAGARASCSSSSIAASYPVSRSRAASSSEEEEEGPPQLPGAQSPAYHGGHSSGSDDDRDGEGGHRWGGRPGLRPGSSLLDQDCRPDSDGLNLSSMNSAGVSGSPEPPTSPRAPREEGLREWGSGSPPCVPGPQEGLRPMSDSVGGAFRVAKVSFPSYLASPAGSRGSSRYSSTETLKDDDLWSSRGSGGWGVYRSPSFGAGEGLLRSQARTRAKGPGGTSRALRDGGFEPEKSRQRKSLSNPDIASETLTLLSFLRSDLSELRVRKPGGSSGDRGSNPLDGRDSPSAGGPVGQLEPIPIPAPASPGTRPTLKDLTATLRRAKSFTCSEKPMARRLPRTSALKSSSSELLLTGPGAEEDPLPLIVQDQYVQEARQVFEKIQRMGAQQDDGSDAPPGSPDWAGDVTRGQRSQEELSGPESSLTDEGIGADPEPPVAAFCGLGTTGMWRPLSSSSAQTNHHGPGTEDSLGGWALVSPETPPTPGALRRRRKVPPSGSGGSELSNGEAGEAYRSLSDPIPQRHRAATSEEPTGFSVDSNLLGSLSPKTGLPATSAMDEGLTSGHSDWSVGSEESKGYQEVIQSIVQGPGTLGRVVDDRIAGKAPKKKSLSDPSRRGELAGPGFEGPGGEPIREVEPMLPPSSSEPILVEQRAEPEEPGATRSRAQSERALPEALPPPATAHRNFHLDPKLADILSPRLIRRGSKKRPARSSHQELRRDEGSQDQTGSLSRARPSSRHVRHASVPATFMPIVVPEPPTSVGPPVAVPEPIGFPTRAHPTLQAPSLEDVTKQYMLNLHSGEVPAPVPVDMPCLPLAAPPSAEAKPPEAARPADEPTPASKCCSKPQVDMRKHVAMTLLDTEQSYVESLRTLMQGYMQPLKQPENSVLCDPSLVDEIFDQIPELLEHHEQFLEQVRHCMQTWHAQQKVGALLVQSFSKDVLVNIYSAYIDNFLNAKDAVRVAKEARPAFLKFLEQSMRENKEKQALSDLMIKPVQRIPRYELLVKDLLKHTPEDHPDHPLLLEAQRNIKQVAERINKGVRSAEEAERHARVLQEIEAHIEGMEDLQAPLRRFLRQEMVIEVKAIGGKKDRSLFLFTDLIVCTTLKRKSGSLRRSSMSLYTAASVIDTASKYKMLWKLPLEDADIIKGASQATNRENIQKAISRLDEDLTTLGQMSKLSESLGFPHQSLDDALRDLSAAMHRDLSEKQALCYALSFPPTKLELCATRPEGTDSYIFEFPHPDARLGFEQAFDEAKRKLASSKSCLDPEFLKAIPIMKTRSGMQFSCAAPTLNSCPEPSPEVWVCNSDGYVGQVCLLSLRAEPDVEACIAVCSARILCIGAVPGLQPRCHREPPPSLRSPPETAPEPAGPELDVEAAADEEAATLAEPGPQPCLHISIAGSGLEMTPGLGEGDPRPELVPFDSDSDDESSPSPSGTLQSQASRSTISSSFGNEETPSSKEATAETTSSEEEQEPGFLPLSGSFGPGGPCGTSPMDGRALRRSSHGSFTRGSLEDLLSVDPEAYQSSVWLGTEDGCVHVYQSSDSIRDRRNSMKLQHAASVTCILYLNNQVFVSLANGELVVYQREAGHFWDPQNFKSVTLGTQGSPITKMVSVGGRLWCGCQNRVLVLSPDTLQLEHMFYVGQDSSRCVACMVDSSLGVWVTLKGSAHVCLYHPDTFEQLAEVDVTPPVHRMLAGSDAIIRQHKAACLRITALLVCEELLWVGTSAGVVLTMPTSPGTVSCPRAPLSPTGLGQGHTGHVRFLAAVQLPDGFNLLCPTPPPPPDTGPEKLPSLEHRDSPWHRGPAPARPKMLVISGGDGYEDFRLSSGGGSSSETVGRDDSTNHLLLWRV

SEQ ID NO: 757843 - protein, 2026 aa, Homo sapiens
SSLCSFTVCICSNGLPSSNLVFFALSPVQCTAPFWEPPPCFQVFHKGRTAQAAATKIETTGPQRSRSLSLQPAGLALGSSLAGGPPGETFGRATELEPGREPLLRLASSSHTPCAAFGVGPALLGMGGQGGLPRLPRGQAPPRVSYATMADGAPRPQLYRSVSFKLLERWSGGPGLREEDTDTPGLRRRASCRPTTAARGQPSRRVSKLASGPLAAPAQPRPLRSLSPSVRQLSRRFDAPRLDDGSAGTRDGGVLPAAAEEAAEGPARGAWPSVTEMRKLFGGPGSRRPSADSESPGTPSPDGAAWEPPARESRQPPTPPPRTCFPLAGLRSARPLTGPETEGRLRRPQQQQERAQRPADGLHSWHIFSQPQAGARASCSSSSIAASYPVSRSRAASSSEEEEEGPPQLPGAQSPAYHGGHSSGSDDDRDGEGGHRWGGRPGLRPGSSLLDQDCRPDSDGLNLSSMNSAGVSGSPEPPTSPRAPREEGLREWGSGSPPCVPGPQEGLRPMSDSVGGAFRVAKVSFPSYLASPAGSRGSSRYSSTETLKDDDLWSSRGSGGWGVYRSPSFGAGEGLLRSQARTRAKGPGGTSRALRDGGFEPEKSRQRKSLSNPDIASETLTLLSFLRSDLSELRVRKPGGSSGDRGSNPLDGRDSPSAGGPVGQLEPIPIPAPASPGTRPTLKDLTATLRRAKSFTCSEKPMARRLPRTSALKSSSSELLLTGPGAEEDPLPLIVQDQYVQEARQVFEKIQRMGAQQDDGSDAPPGSPDWAGDVTRGQRSQEELSGPESSLTDEGIGADPEPPVAAFCGLGTTGMWRPLSSSSAQTNHHGPGTEDSLGGWALVSPETPPTPGALRRRRKVPPSGSGGSELSNGEAGEAYRSLSDPIPQRHRAATSEEPTGFSVDSNLLGSLSPKTGLPATSAMDEGLTSGHSDWSVGSEESKGYQEVIQSIVQGPGTLGRVVDDRIAGKAPKKKSLSDPSRRGELAGPGFEGPGGEPIREVEPMLPPSSSEPILVEQRAEPEEPGATRSRAQSERALPEALPPPATAHRNFHLDPKLADILSPRLIRRGSKKRPARSSHQELRRDEGSQDQTGSLSRARPSSRHVRHASVPATFMPIVVPEPPTSVGPPVAVPEPIGFPTRAHPTLQAPSLEDVTKQYMLNLHSGEVPAPVPVDMPCLPLAAPPSAEAKPPEAARPADEPTPASKCCSKPQVDMRKHVAMTLLDTEQSYVESLRTLMQGYMQPLKQPENSVLCDPSLVDEIFDQIPELLEHHEQFLEQVRHCMQTWHAQQKVGALLVQSFSKDVLVNIYSAYIDNFLNAKDAVRVAKEARPAFLKFLEQSMRENKEKQALSDLMIKPVQRIPRYELLVKDLLKHTPEDHPDHPLLLEAQRNIKQVAERINKGVRSAEEAERHARVLQEIEAHIEGMEDLQAPLRRFLRQEMVIEVKAIGGKKDRSLFLFTDLIVCTTLKRKSGSLRRSSMSLYTAASVIDTASKYKMLWKLPLEDADIIKGASQATNRENIQKAISRLDEDLTTLGQMSKLSESLGFPHQSLDDALRDLSAAMHRDLSEKQALCYALSFPPTKLELCATRPEGTDSYIFEFPHPDARLGFEQAFDEAKRKLASSKSCLDPEFLKAIPIMKTRSGMQFSCAAPTLNSCPEPSPEVWVCNSDGYVGQVCLLSLRAEPDVEACIAVCSARILCIGAVPGLQPRCHREPPPSLRSPPETAPEPAGPELDVEAAADEEAATLAEPGPQPCLHISIAGSGLEMTPGLGEGDPRPELVPFDSDSDDESSPSPSGTLQSQASRSTISSSFGNEETPSSKEATAETTSSEEEQEPGFLPLSGSFGPGGPCGTSPMDGRALRRSSHGSFTRGSLEDLLSVDPEAYQSSVWLGTEDGCVHVYQSSDSIRDRRNSMKLQHAASVTCILYLNNQVFVSLANGELVVYQREAGHFWDPQNFKSVTLGTQGSPITKMVSVGGRLWCGCQNRVLVLSPDTLQLEVAGGGGMELVPWDELGPCDREMETMVGA

SEQ ID NO: 757844 - protein, 2211 aa, Homo sapiens; identical to SEQ ID NO: 757842

SEQ ID NO: 757845 - protein, 2211 aa, Homo sapiens; identical to SEQ ID NO: 757842

SEQ ID NO: 757846 - protein, 74 aa, Homo sapiens
TLFIRVVLAPHADFDQEYPARGTHVPAWALPCLRGSIPDGTPTGQPGHGFSRPSGCPGASSHDRVGDMWADQDL

SEQ ID NO: 757847 - protein, 2026 aa, Homo sapiens; identical to SEQ ID NO: 757843

SEQ ID NO: 757848 - protein, 134 aa, Homo sapiens
MATHPDGFRLEGPLAAAHSPGPCTVLYEGPVRGLCPFAPRNSNTMAAAALAAPSLGFDGVIGVLVADTSLTDMHVVDVELSGPRGPTGRSFAVHTRRENPAEPGAVTGSATVTAFWRSLLACCQLPSRPGIHLC

SEQ ID NO: 757849 - protein, 178 aa, Homo sapiens
MGDRVKGSKSRRPDLVVEVAHPKIIHESGAQILRHANLLSLRVTMATHPDGFRLEGPLAAAHSPGPCTVLYEGPVRGLCPFAPRNSNTMAAAALAAPSLGFDGVIGVLVADTSLTDMHVVDVELSGPRGPTGRSFAVHTRRENPAEPGAVTGSATVTAFWRSLLACCQLPSRPGIHLC

SEQ ID NO: 757850 - protein, 228 aa, Homo sapiens
MGDRVKGSKSRRPDLVVEVAHPKIIHESGAQILRHANLLVGSPSALSDQTTERQLLEASQHWDHAVFVARGALWGAEDIRRLDAAGGLRSLRVTMATHPDGFRLEGPLAAAHSPGPCTVLYEGPVRGLCPFAPRNSNTMAAAALAAPSLGFDGVIGVLVADTSLTDMHVVDVELSGPRGPTGRSFAVHTRRENPAEPGAVTGSATVTAFWRSLLACCQLPSRPGIHLC

SEQ ID NO: 757851 - protein, 297 aa, Homo sapiens
SSPGSQAPDTALRAMADRGPWRVGVVGYGRLGQSLVSRLLAQGPELGLELVFVWNRDPGRMAGSVPPSLQLQNLAALGERRPDLVVEVAHPKIIHESGAQILRHANLLVGSPSALSDQTTERQLLEASQHWDHAVFVARGALWGAEDIRRLDAAGGLRSLRVTMATHPDGFRLEGPLAAAHSPGPCTVLYEGPVRGLCPFAPRNSNTMAAAALAAPSLGFDGVIGVLVADTSLTDMHVVDVELSGPRGPTGRSFAVHTRRENPAEPGAVTGSATVTAFWRSLLACCQLPSRPGIHLC

SEQ ID NO: 757852 - protein, 215 aa, Homo sapiens
SSPGSQAPDTALRAMADRGPWRVGVVGYGRLGQSLVSRLLAQGPELGLELVFVWNLAHPKIIHESGAQILRHANLLSLRVTMATHPDGFRLEGPLAAAHSPGPCTVLYEGPVRGLCPFAPRNSNTMAAAALAAPSLGFDGVIGVLVADTSLTDMHVVDVELSGPRGPTGRSFAVHTRRENPAEPGAVTGSATVTAFWRSLLACCQLPSRPGIHLC

SEQ ID NO: 757853 - protein, 163 aa, Homo sapiens
MGDRVKGSKSRRPDLVVEVAHPKIIHESGAQILRHANLLVGSPSALSDQTTERQLLEASQHWDHAVFVARGALWGAEDIRRLDAAGGLRSLRVTMATHPDGFRLEGPLAAAHSPGPCTVLYEGPVRGLCPFAPRNSNTMAAAALAAPSLGFDGVIGVLVADTR

SEQ ID NO: 757854 - protein, 249 aa, Homo sapiens
SSSPPAASPGGRGPRWQRRSRAEPAARPQFPAPLAPVMAKQYDVLFRLLLIGDSGVGKTCLLCRFTDNEFHSSHISTIGVDFKMKTIEVDGIKVRIQIWDTAGQERYQTITKQYYRRAQGIFLVYDISSERSYQHIMKWVSDVDEYAPEGVQKILMGNKADEEQKRQVGREQGQQLAKEYGMDFYETSACTNLNIKESFTRLTELVLQAHRKELEGLRMRASNELALAELEEEEGKPEGPANSSKTCWC

SEQ ID NO: 757855 - protein, 160 aa, Homo sapiens
MSWHWQSWRRRRANPRAQRTLRKPAGAESCVGHPTRHPSSLRRPVGRQGSRGFALLLSSRVMTLLSISSHYSPCLALRAALLSSQAAPVPSPSTLEWSSSACFPSHRPATTPTMCRKHCLTIPHPPDNSQGWSPGHFQLLLSPCIVSLLCFFSLPPLLFL

SEQ ID NO: 757856 - protein, 249 aa, Homo sapiens; identical to SEQ ID NO: 757854

SEQ ID NO: 757857 - protein, 249 aa, Homo sapiens; identical to SEQ ID NO: 757854

SEQ ID NO: 757858 - protein, 293 aa, Homo sapiens
SSSPPAASPGGRGPRWQRRSRAEPAARPQFPAPLAPVMAKQYDVLFRLLLIGDSGVGKTCLLCRFTDNEFHSSHISTIGVDFKMKTIEVDGIKVRIQIWDTAGQERYQTITKQYYRRAQGIFLVYDISSERSYQHIMKWVSDVDEVGDATSLPGCGEGASPGKARRGPDGKANAFQEALPSTALDEDLWYAPEGVQKILMGNKADEEQKRQVGREQGQQLAKEYGMDFYETSACTNLNIKESFTRLTELVLQAHRKELEGLRMRASNELALAELEEEEGKPEGPANSSKTCWC

SEQ ID NO: 757859 - protein, 249 aa, Homo sapiens; identical to SEQ ID NO: 757854

SEQ ID NO: 757860 - protein, 249 aa, Homo sapiens; identical to SEQ ID NO: 757854

SEQ ID NO: 757861 - protein, 49 aa, Homo sapiens
MPELQGHWLLFLVPGSFPWVGWWEGPRLAGLPSCSKCGHRGDLAPGRQQ

SEQ ID NO: 757862 - protein, 1403 aa, Homo sapiens [sequence omitted]

SEQ ID NO: 757863 - protein, 313 aa, Homo sapiens
FFFVGKSEPYRLSPEPTPLAEPILEVEVTLSKPVPESEFSSSPLQAPTPLASHTVEIHEPNGMVPSEDLEPEVESSPELAPPPACPSESPVPIAPTAQPEELLNGAPSPPAVDLSPVSEPEEQAKEVTASVAPPTIPSATPATAPSATSPAQEEEMEEEEEEEEGEAGEAGEAESEKGGEELLPPESTPIPANLSQNLEAAAATQVAVSVPKRRRKIKELNKKEAVGDLLDAFKEANPAVPEVENQPPAGSNPGPESEADVASLNRRIQLVEEELDRAQERLATALQKLEEAEKAADESERGMKVIENRAMKD

SEQ ID NO: 757864 - protein, 162 aa, Homo sapiens
MTEDIKLNKAEKAWKPSSKRTAADKDRGEEDADGSKTQDLFRRVRSILNKLTPQMFQQLMKQVTQLAIDTEERLKGVIDLIFEKAISEPNFSVAYANMCRCLMALKVPTTEKPTVTVNFRKLLLNRCQKEFEKDKDDDEVFEKKQKEMDEAATAERKPTIDS

SEQ ID NO: 757865 - protein, 184 aa, Homo sapiens
YRQIPNQKKSKAIIEEYLHLNDMKEAVQCVQELASPSLLFIFVRHGVESTLERSAIAREHMGQLLHQLLCAGHLSTAQYYQGLYEILELAEDMEIDIPHVWLYLAELVTPILQEGGVPMGELFREITKPLRPLGKAASLLLEILGLLCKSMGPKKVGTLWREINMVVVQGDKHQMMSEGKIHRL

SEQ ID NO: 757866 - protein, 140 aa, Homo sapiens
SSVPPGRPNLGLLCKSMGPKKVGTLWREAGLSWKEFLPEGQDIGAFVAEQKVEYTLGEESEAPGQRALPSEELNRQLEKLLKEGSSNQRVFDWIEANLSEQQIVSNTLVRALMTAVCYSAIICKRNQGDGGARVGLTRQV

SEQ ID NO: 757867 - protein, 1599 aa, Homo sapiens [sequence omitted]

SEQ ID NO: 757868 - protein, 1599 aa, Homo sapiens [sequence omitted]

SEQ ID NO: 757869 - protein, 1512 aa, Homo sapiens [sequence omitted]

SEQ ID NO: 757870 - protein, 1630 aa, Homo sapiens
PVCPWARPEPGVPGWGVGTPRPKQLAPFVIREPGASETWNFRSGWSGAPRSQVDTLTSQPQALGCPEPVGRTVDLFLIEGHFYPSRAQPPSSAASRVQSAAPARPGPAAHVYPAGSQVMMIPSQISYPASQGAYYIPGQGRSTYVVPTQQYPVQPGAPGFYPGASPTEFGTYAGAYYPAQGVQQFPTGVAPAPVLMNQPPQIAPKRERKTIRIRDPNQGGKDITEEIMSGARTASTPTPPQTGGGLEPQANGETPQVAVIVRPDDRSQGAIIADRPGLPGPEHSPSESQPSSPSPTPSPSPVLEPGSEPNLAVLSIPGDTMTTIQMSVEESTPISRETGEPYRLSPEPTPLAEPILEVEVTLSKPVPESEFSSSPLQAPTPLASHTVEIHEPNGMVPSEDLEPEVESSPELAPPPACPSESPVPIAPTAQPEELLNGAPSPPAVDLSPVSEPEEQAKEVTASVAPPTIPSATPATAPSATSPAQEEEMEEEEEEEEGEAGEAGEAESEKGGEELLPPESTPIPANLSQNLEAAAATQVAVSVPKRRRKIKELNKKEAVGDLLDAFKEANPAVPEVENQPPAGSNPGPESEGSGVPPRPEEADETWDSKEDKIHNAENIQPGEQKYEYKSDQWKPLNLEEKKRYDREFLLGFQFIFASMQKPEGLPHISDVVLDKANKTPLRPLDPTRLQGINCGPDFTPSFANLGRTTLSTRGPPRGGPGGELPRGPAGLGPRRSQQGPRKEPRKIIATVLMTEDIKLNKAEKAWKPSSKRTAADKDRGEEDADGSKTQDLFRRVRSILNKLTPQMFQQLMKQVTQLAIDTEERLKGVIDLIFEKAISEPNFSVAYANMCRCLMALKVPTTEKPTVTVNFRKLLLNRCQKEFEKDKDDDEVFEKKQKEMDEAATAEERGRLKEELEEARDIARRRSLGNIKFIGELFKLKMLTEAIMHDCVVKLLKNHDEESLECLCRLLTTIGKDLDFEKAKPRMDQYFNQMEKIIKEKKTSSRIRFMLQDVLDLRGSNWVPRRGDQGPKTIDQIHKEAEMEEHREHIKVQQLMAKGSDKRRGGPPGPPISRGLPLVDDGGWNTVPISKGSRPIDTSRLTKITKPGSIDSNNQLFAPGGRLSWGKGSSGGSGAKPSDAASEAARPATSTLNRFSALQQAVPTESTDNRRVVQRSSLSRERGEKAGDRGDRLERSERGGDRGDRLDRARTPATKRSFSKEVEERSRERPSQPEGLRKAASLTEDRDRGRDAVKREAALPPVSPLKAALSEEELEKKSKAIIEEYLHLNDMKEAVQCVQELASPSLLFIFVRHGVESTLERSAIAREHMGQLLHQLLCAGHLSTAQYYQGLYEILELAEDMEIDIPHVWLYLAELVTPILQEGGVPMGELFREITKPLRPLGKAASLLLEILGLLCKSMGPKKVGTLWREAGLSWKEFLPEGQDIGAFVAEQKVEYTLGEESEAPGQRALPSEELNRQLEKLLKEGSSNQRVFDWIEANLSEQQIVSNTLVRALMTAVCYSAIIFETPLRVDVAVLKARAKLLQKYLCDEQKELQALYALQALVVTLEQPPNLLRMFFDALYDEDVVKEDAFYSWESSKDPAEQQGKGVALKSVTAFFKWLREAEEESDHN

SEQ ID NO: 757871 - protein, 1403 aa, Homo sapiens [sequence omitted]

SEQ ID NO: 757872 - protein, 1511 aa, Homo sapiens
MNKAPQSTGPPPAPSPGLPQGRSTYVVPTQQYPVQPGAPGFYPGASPTEFGTYAGAYYPAQGVQQFPTGVAPAPVLMNQPPQIAPKRERKTIRIRDPNQGGKDITEEIMSGARTASTPTPPQTGGGLEPQANGETPQVAVIVRPDDRSQGAIIADRPGLPGPEHSPSESQPSSPSPTPSPSPVLEPGSEPNLAVLSIPGDTMTTIQMSVEESTPISRETGEPYRLSPEPTPLAEPILEVEVTLSKPVPESEFSSSPLQAPTPLASHTVEIHEPNGMVPSEDLEPEVESSPELAPPPACPSESPVPIAPTAQPEELLNGAPSPPAVDLSPVSEPEEQAKEVTASVAPPTIPSATPATAPSATSPAQEEEMEEEEEEEEGEAGEAGEAESEKGGEELLPPESTPIPANLSQNLEAAAATQVAVSVPKRRRKIKELNKKEAVGDLLDAFKEANPAVPEVENQPPAGSNPGPESEGSGVPPRPEEADETWDSKEDKIHNAENIQPGEQKYEYKSDQWKPLNLEEKKRYDREFLLGFQFIFASMQKPEGLPHISDVVLDKANKTPLRPLDPTRLQGINCGPDFTPSFANLGRTTLSTRGPPRGGPGGELPRGPAGLGPRRSQQGPRKEPRKIIATVLMTEDIKLNKAEKAWKPSSKRTAADKDRGEEDADGSKTQDLFRRVRSILNKLTPQMFQQLMKQVTQLAIDTEERLKGVIDLIFEKAISEPNFSVAYANMCRCLMALKVPTTEKPTVTVNFRKLLLNRCQKEFEKDKDDDEVFEKKQKEMDEAATAEERGRLKEELEEARDIARRRSLGNIKFIGELFKLKMLTEAIMHDCVVKLLKNHDEESLECLCRLLTTIGKDLDFEKAKPRMDQYFNQMEKIIKEKKTSSRIRFMLQDVLDLRGSNWVPRRGDQGPKTIDQIHKEAEMEEHREHIKVQQLMAKGSDKRRGGPPGPPISRGLPLVDDGGWNTVPISKGSRPIDTSRLTKITKPGSIDSNNQLFAPGGRLSWGKGSSGGSGAKPSDAASEAARPATSTLNRFSALQQAVPTESTDNRRVVQRSSLSRERGEKAGDRGDRLERSERGGDRGDRLDRARTPATKRSFSKEVEERSRERPSQPEGLRKAASLTEDRDRGRDAVKREAALPPVSPLKAALSEEELEKKSKAIIEEYLHLNDMKEAVQCVQELASPSLLFIFVRHGVESTLERSAIAREHMGQLLHQLLCAGHLSTAQYYQGLYEILELAEDMEIDIPHVWLYLAELVTPILQEGGVPMGELFREITKPLRPLGKAASLLLEILGLLCKSMGPKKVGTLWREAGLSWKEFLPEGQDIGAFVAEQKVEYTLGEESEAPGQRALPSEELNRQLEKLLKEGSSNQRVFDWIEANLSEQQIVSNTLVRALMTAVCYSAIIFETPLRVDVAVLKARAKLLQKYLCDEQKELQALYALQALVVTLEQPPNLLRMFFDALYDEDVVKEDAFYSWESSKDPAEQQGKGVALKSVTAFFKWLREAEEESDHN

SEQ ID NO: 757873 - protein, 1418 aa, Homo sapiens
VGTSRIRIVLRSLWEQSGARTASTPTPPQTGGGLEPQANGETPQVAVIVRPDDRSQGAIIADRPGLPGPEHSPSESQPSSPSPTPSPSPVLEPGSEPNLAVLSIPGDTMTTIQMSVEESTPISRETGEPYRLSPEPTPLAEPILEVEVTLSKPVPESEFSSSPLQAPTPLASHTVEIHEPNGMVPSEDLEPEVESSPELAPPPACPSESPVPIAPTAQPEELLNGAPSPPAVDLSPVSEPEEQAKEVTASVAPPTIPSATPATAPSATSPAQEEEMEEEEEEEEGEAGEAGEAESEKGGEELLPPESTPIPANLSQNLEAAAATQVAVSVPKRRRKIKELNKKEAVGDLLDAFKEANPAVPEVENQPPAGSNPGPESEGSGVPPRPEEADETWDSKEDKIHNAENIQPGEQKYEYKSDQWKPLNLEEKKRYDREFLLGFQFIFASMQKPEGLPHISDVVLDKANKTPLRPLDPTRLQGINCGPDFTPSFANLGRTTLSTRGPPRGGPGGELPRGPAGLGPRRSQQGPRKEPRKIIATVLMTEDIKLNKAEKAWKPSSKRTAADKDRGEEDADGSKTQDLFRRVRSILNKLTPQMFQQLMKQVTQLAIDTEERLKGVIDLIFEKAISEPNFSVAYANMCRCLMALKVPTTEKPTVTVNFRKLLLNRCQKEFEKDKDDDEVFEKKQKEMDEAATAEERGRLKEELEEARDIARRRSLGNIKFIGELFKLKMLTEAIMHDCVVKLLKNHDEESLECLCRLLTTIGKDLDFEKAKPRMDQYFNQMEKIIKEKKTSSRIRFMLQDVLDLRGSNWVPRRGDQGPKTIDQIHKEAEMEEHREHIKVQQLMAKGSDKRRGGPPGPPISRGLPLVDDGGWNTVPISKGSRPIDTSRLTKITKPGSIDSNNQLFAPGGRLSWGKGSSGGSGAKPSDAASEAARPATSTLNRFSALQQAVPTESTDNRRVVQRSSLSRERGEKAGDRGDRLERSERGGDRGDRLDRARTPATKRSFSKEVEERSRERPSQPEGLRKAASLTEDRDRGRDAVKREAALPPVSPLKAALSEEELEKKSKAIIEEYLHLNDMKEAVQCVQELASPSLLFIFVRHGVESTLERSAIAREHMGQLLHQLLCAGHLSTAQYYQGLYEILELAEDMEIDIPHVWLYLAELVTPILQEGGVPMGELFREITKPLRPLGKAASLLLEILGLLCKSMGPKKVGTLWREAGLSWKEFLPEGQDIGAFVAEQKVEYTLGEESEAPGQRALPSEELNRQLEKLLKEGSSNQRVFDWIEANLSEQQIVSNTLVRALMTAVCYSAIIFETPLRVDVAVLKARAKLLQKYLCDEQKELQALYALQALVVTLEQPPNLLRMFFDALYDEDVVKEDAFYSWESSKDPAEQQGKGVALKSVTAFFKWLREAEEESDHN

SEQ ID NO: 757874 - protein, 1298 aa, Homo sapiens
FFFVGKSEPYRLSPEPTPLAEPILEVEVTLSKPVPESEFSSSPLQAPTPLASHTVEIHEPNGMVPSEDLEPEVESSPELAPPPACPSESPVPIAPTAQPEELLNGAPSPPAVDLSPVSEPEEQAKEVTASVAPPTIPSATPATAPSATSPAQEEEMEEEEEEEEGEAGEAGEAESEKGGEELLPPESTPIPANLSQNLEAAAATQVAVSVPKRRRKIKELNKKEAVGDLLDAFKEANPAVPEVENQPPAGSNPGPESEGSGVPPRPEEADETWDSKEDKIHNAENIQPGEQKYEYKSDQWKPLNLEEKKRYDREFLLGFQFIFASMQKPEGLPHISDVVLDKANKTPLRPLDPTRLQGINCGPDFTPSFANLGRTTLSTRGPPRGGPGGELPRGPAGLGPRRSQQGPRKEPRKIIATVLMTEDIKLNKAEKAWKPSSKRTAADKDRGEEDADGSKTQDLFRRVRSILNKLTPQMFQQLMKQVTQLAIDTEERLKGVIDLIFEKAISEPNFSVAYANMCRCLMALKVPTTEKPTVTVNFRKLLLNRCQKEFEKDKDDDEVFEKKQKEMDEAATAEERGRLKEELEEARDIARRRSLGNIKFIGELFKLKMLTEAIMHDCVVKLLKNHDEESLECLCRLLTTIGKDLDFEKAKPRMDQYFNQMEKIIKEKKTSSRIRFMLQDVLDLRGSNWVPRRGDQGPKTIDQIHKEAEMEEHREHIKVQQLMAKGSDKRRGGPPGPPISRGLPLVDDGGWNTVPISKGSRPIDTSRLTKITKPGSIDSNNQLFAPGGRLSWGKGSSGGSGAKPSDAASEAARPATSTLNRFSALQQAVPTESTDNRRVVQRSSLSRERGEKAGDRGDRLERSERGGDRGDRLDRARTPATKRSFSKEVEERSRERPSQPEGLRKAASLTEDRDRGRDAVKREAALPPVSPLKAALSEEELEKKSKAIIEEYLHLNDMKEAVQCVQELASPSLLFIFVRHGVESTLERSAIAREHMGQLLHQLLCAGHLSTAQYYQGLYEILELAEDMEIDIPHVWLYLAELVTPILQEGGVPMGELFREITKPLRPLGKAASLLLEILGLLCKSMGPKKVGTLWREAGLSWKEFLPEGQDIGAFVAEQKVEYTLGEESEAPGQRALPSEELNRQLEKLLKEGSSNQRVFDWIEANLSEQQIVSNTLVRALMTAVCYSAIIFETPLRVDVAVLKARAKLLQKYLCDEQKELQALYALQALVVTLEQPPNLLRMFFDALYDEDVVKEDAFYSWESSKDPAEQQGKGVALKSVTAFFKWLREAEEESDHN

SEQ ID NO: 757875 - protein, 1107 aa, Homo sapiens
MSFETRFKAAAATQVAVSVPKRRRKIKELNKKEAVGDLLDAFKEANPAVPEVENQPPAGSNPGPESEGSGVPPRPEEADETWDSKEDKIHNAENIQPGEQKYEYKSDQWKPLNLEEKKRYDREFLLGFQFIFASMQKPEGLPHISDVVLDKANKTPLRPLDPTRLQGINCGPDFTPSFANLGRTTLSTRGPPRGGPGGELPRGPAGLGPRRSQQGPRKEPRKIIATVLMTEDIKLNKAEKAWKPSSKRTAADKDRGEEDADGSKTQDLFRRVRSILNKLTPQMFQQLMKQVTQLAIDTEERLKGVIDLIFEKAISEPNFSVAYANMCRCLMALKVPTTEKPTVTVNFRKLLLNRCQKEFEKDKDDDEVFEKKQKEMDEAATAEERGRLKEELEEARDIARRRSLGNIKFIGELFKLKMLTEAIMHDCVVKLLKNHDEESLECLCRLLTTIGKDLDFEKAKPRMDQYFNQMEKIIKEKKTSSRIRFMLQDVLDLRGSNWVPRRGDQGPKTIDQIHKEAEMEEHREHIKVQQLMAKGSDKRRGGPPGPPISRGLPLVDDGGWNTVPISKGSRPIDTSRLTKITKPGSIDSNNQLFAPGGRLSWGKGSSGGSGAKPSDAASEAARPATSTLNRFSALQQAVPTESTDNRRVVQRSSLSRERGEKAGDRGDRLERSERGGDRGDRLDRARTPATKRSFSKEVEERSRERPSQPEGLRKAASLTEDRDRGRDAVKREAALPPVSPLKAALSEEELEKKSKAIIEEYLHLNDMKEAVQCVQELASPSLLFIFVRHGVESTLERSAIAREHMGQLLHQLLCAGHLSTAQYYQGLYEILELAEDMEIDIPHVWLYLAELVTPILQEGGVPMGELFREITKPLRPLGKAASLLLEILGLLCKSMGPKKVGTLWREAGLSWKEFLPEGQDIGAFVAEQKVEYTLGEESEAPGQRALPSEELNRQLEKLLKEGSSNQRVFDWIEANLSEQQIVSNTLVRALMTAVCYSAIIFETPLRVDVAVLKARAKLLQKYLCDEQKELQALYALQALVVTLEQPPNLLRMFFDALYDEDVVKEDAFYSWESSKDPAEQQGKGVALKSVTAFFKWLREAEEESDHN

SEQ ID NO: 757876 - protein, 1086 aa, Homo sapiens
RSKDPIRLNKKEAVGDLLDAFKEANPAVPEVENQPPAGSNPGPESEGSGVPPRPEEADETWDSKEDKIHNAENIQPGEQKYEYKSDQWKPLNLEEKKRYDREFLLGFQFIFASMQKPEGLPHISDVVLDKANKTPLRPLDPTRLQGINCGPDFTPSFANLGRTTLSTRGPPRGGPGGELPRGPAGLGPRRSQQGPRKEPRKIIATVLMTEDIKLNKAEKAWKPSSKRTAADKDRGEEDADGSKTQDLFRRVRSILNKLTPQMFQQLMKQVTQLAIDTEERLKGVIDLIFEKAISEPNFSVAYANMCRCLMALKVPTTEKPTVTVNFRKLLLNRCQKEFEKDKDDDEVFEKKQKEMDEAATAEERGRLKEELEEARDIARRRSLGNIKFIGELFKLKMLTEAIMHDCVVKLLKNHDEESLECLCRLLTTIGKDLDFEKAKPRMDQYFNQMEKIIKEKKTSSRIRFMLQDVLDLRGSNWVPRRGDQGPKTIDQIHKEAEMEEHREHIKVQQLMAKGSDKRRGGPPGPPISRGLPLVDDGGWNTVPISKGSRPIDTSRLTKITKPGSIDSNNQLFAPGGRLSWGKGSSGGSGAKPSDAASEAARPATSTLNRFSALQQAVPTESTDNRRVVQRSSLSRERGEKAGDRGDRLERSERGGDRGDRLDRARTPATKRSFSKEVEERSRERPSQPEGLRKAASLTEDRDRGRDAVKREAALPPVSPLKAALSEEELEKKSKAIIEEYLHLNDMKEAVQCVQELASPSLLFIFVRHGVESTLERSAIAREHMGQLLHQLLCAGHLSTAQYYQGLYEILELAEDMEIDIPHVWLYLAELVTPILQEGGVPMGELFREITKPLRPLGKAASLLLEILGLLCKSMGPKKVGTLWREAGLSWKEFLPEGQDIGAFVAEQKVEYTLGEESEAPGQRALPSEELNRQLEKLLKEGSSNQRVFDWIEANLSEQQIVSNTLVRALMTAVCYSAIIFETPLRVDVAVLKARAKLLQKYLCDEQKELQALYALQALVVTLEQPPNLLRMFFDALYDEDVVKEDAFYSWESSKDPAEQQGKGVALKSVTAFFKWLREAEEESDHN

SEQ ID NO: 757877 - protein, 1221 aa, Homo sapiens
MMIPSQISYPASQGAYYIPGQGRSTYVVPTQQYPVQPGAPGFYPGASPTEFGTYAGAYYPAQGVQQFPTGVAPAPVLMNQPPQIAPKRERKTIRIRDPNQGGKDITEEIMSGARTASTPTPPQTGGGLEPQANGETPQVAVIVRPDDRSQGAIIADRPGLPGPEHSPSESQPSSPSPTPSPSPVLEPGSEPNLAVLSIPGDTMTTIQMSVEESTPISRETGEPYRLSPEPTPLAEPILEVEVTLSKPVPESEFSSSPLQAPTPLASHTVEIHEPNGMVPSEDLEPEVESSPELAPPPACPSESPVPIAPTAQPEELLNGAPSPPAVDLSPVSEPEEQAKEVTASVAPPTIPSATPATAPSATSPAQEEEMEEEEEEEEGEAGEAGEAESEKGGEELLPPESTPIPANLSQNLEAAAATQVAVSVPKRRRKIKELNKKEAVGDLLDAFKEANPAVPEVENQPPAGSNPGPESEGSGVPPRPEEADETWDSKEDKIHNAENIQPGEQKYEYKSDQWKPLNLEEKKRYDREFLLGFQFIFASMQKPEGLPHISDVVLDKANKTPLRPLDPTRLQGINCGPDFTPSFANLGRTTLSTRGPPRGGPGGELPRGPAGLGPRRSQQGPRKEPRKIIATVLMTEDIKLNKAEKAWKPSSKRTAADKDRGEEDADGSKTQDLFRRVRSILNKLTPQMFQQLMKQVTQLAIDTEERLKGVIDLIFEKAISEPNFSVAYANMCRCLMALKVPTTEKPTVTVNFRKLLLNRCQKEFEKDKDDDEVFEKKQKEMDEAATAEERGRLKEELEEARDIARRRSLGNIKFIGELFKLKMLTEAIMHDCVVKLLKNHDEESLECLCRLLTTIGKDLDFEKAKPRMDQYFNQMEKIIKEKKTSSRIRFMLQDVLDLRGSNWVPRRGDQGPKTIDQIHKEAEMEEHREHIKVQQLMAKGSDKRRGGPPGPPISRGLPLVDDGGWNTVPISKGSRPIDTSRLTKITKPGSIDSNNQLFAPGGRLSWGKGSSGGSGAKPSDAASEAARPATSTLNRFSALQQAVPTESTDNRRVVQRSSLSRERGEKAGDRGDRLERSERGGDRGDRLDRARTPATKRSFSKEVEERSRERPSQPEGLRKAASLTEDRDRGRDAVKREAALPPVSPLKAALSEEELEKKSKAIIEEYLHLNDMKEAVQCVQELASPSLLFIFVRHGVESTLERSAIALCWASVYCSVLPRVV

SEQ ID NO: 757878 - protein, 832 aa, Homo sapiens
GQVGGWVVIQQLMKQVTQLAIDTEERLKGVIDLIFEKAISEPNFSVAYANMCRCLMALKVPTTEKPTVTVNFRKLLLNRCQKEFEKDKDDDEVFEKKQKEMDEAATAEERGRLKEELEEARDIARRRSLGNIKFIGELFKLKMLTEAIMHDCVVKLLKNHDEESLECLCRLLTTIGKDLDFEKAKPRMDQYFNQMEKIIKEKKTSSRIRFMLQDVLDLRGSNWVPRRGDQGPKTIDQIHKEAEMEEHREHIKVQQLMAKGSDKRRGGPPGPPISRGLPLVDDGGWNTVPISKGSRPIDTSRLTKITKPGSIDSNNQLFAPGGRLSWGKGSSGGSGAKPSDAASEAARPATSTLNRFSALQQAVPTESTDNRRVVQRSSLSRERGEKAGDRGDRLERSERGGDRGDRLDRARTPATKRSFSKEVEERSRERPSQPEGLRKAASLTEDRDRGRDAVKREAALPPVSPLKAALSEEELEKKSKAIIEEYLHLNDMKEAVQCVQELASPSLLFIFVRHGVESTLERSAIAREHMGQLLHQLLCAGHLSTAQYYQGLYEILELAEDMEIDIPHVWLYLAELVTPILQEGGVPMGELFREITKPLRPLGKAASLLLEILGLLCKSMGPKKVGTLWREAGLSWKEFLPEGQDIGAFVAEQKVEYTLGEESEAPGQRALPSEELNRQLEKLLKEGSSNQRVFDWIEANLSEQQIVSNTLVRALMTAVCYSAIIFETPLRVDVAVLKARAKLLQKYLCDEQKELQALYALQALVVTLEQPPNLLRMFFDALYDEDVVKEDAFYSWESSKDPAEQQGKGVALKSVTAFFKWLREAEEESDHN

SEQ ID NO: 757879 - protein, 834 aa, Homo sapiens
SSVPYSERHPVQQLMKQVTQLAIDTEERLKGVIDLIFEKAISEPNFSVAYANMCRCLMALKVPTTEKPTVTVNFRKLLLNRCQKEFEKDKDDDEVFEKKQKEMDEAATAEERGRLKEELEEARDIARRRSLGNIKFIGELFKLKMLTEAIMHDCVVKLLKNHDEESLECLCRLLTTIGKDLDFEKAKPRMDQYFNQMEKIIKEKKTSSRIRFMLQDVLDLRGSNWVPRRGDQGPKTIDQIHKEAEMEEHREHIKVQQLMAKGSDKRRGGPPGPPISRGLPLVDDGGWNTVPISKGSRPIDTSRLTKITKPGSIDSNNQLFAPGGRLSWGKGSSGGSGAKPSDAASEAARPATSTLNRFSALQQAVPTESTDNRRVVQRSSLSRERGEKAGDRGDRLERSERGGDRGDRLDRARTPATKRSFSKEVEERSRERPSQPEGLRKAASLTEDRDRGRDAVKREAALPPVSPLKAALSEEELEKKSKAIIEEYLHLNDMKEAVQCVQELASPSLLFIFVRHGVESTLERSAIAREHMGQLLHQLLCAGHLSTAQYYQGLYEILELAEDMEIDIPHVWLYLAELVTPILQEGGVPMGELFREITKPLRPLGKAASLLLEILGLLCKSMGPKKVGTLWREAGLSWKEFLPEGQDIGAFVAEQKVEYTLGEESEAPGQRALPSEELNRQLEKLLKEGSSNQRVFDWIEANLSEQQIVSNTLVRALMTAVCYSAIIFETPLRVDVAVLKARAKLLQKYLCDEQKELQALYALQALVVTLEQPPNLLRMFFDALYDEDVVKEDAFYSWESSKDPAEQQGKGVALKSVTAFFKWLREAEEESDHN

SEQ ID NO: 757880 - protein, 1512 aa, Homo sapiens [sequence omitted]

SEQ ID NO: 757881 - protein, 1512 aa, Homo sapiens [sequence omitted]

SEQ ID NO: 757882 - protein, 739 aa, Homo sapiens
MDQYFNQMDEAATAEERGRLKEELEEARDIARRRSLGNIKFIGELFKLKMLTEAIMHDCVVKLLKNHDEESLECLCRLLTTIGKDLDFEKAKPRMDQYFNQMEKIIKEKKTSSRIRFMLQDVLDLRGSNWVPRRGDQGPKTIDQIHKEAEMEEHREHIKVQQLMAKGSDKRRGGPPGPPISRGLPLVDDGGWNTVPISKGSRPIDTSRLTKITKPGSIDSNNQLFAPGGRLSWGKGSSGGSGAKPSDAASEAARPATSTLNRFSALQQAVPTESTDNRRVVQRSSLSRERGEKAGDRGDRLERSERGGDRGDRLDRARTPATKRSFSKEVEERSRERPSQPEGLRKAASLTEDRDRGRDAVKREAALPPVSPLKAALSEEELEKKSKAIIEEYLHLNDMKEAVQCVQELASPSLLFIFVRHGVESTLERSAIAREHMGQLLHQLLCAGHLSTAQYYQGLYEILELAEDMEIDIPHVWLYLAELVTPILQEGGVPMGELFREITKPLRPLGKAASLLLEILGLLCKSMGPKKVGTLWREAGLSWKEFLPEGQDIGAFVAEQKVEYTLGEESEAPGQRALPSEELNRQLEKLLKEGSSNQRVFDWIEANLSEQQIVSNTLVRALMTAVCYSAIIFETPLRVDVAVLKARAKLLQKYLCDEQKELQALYALQALVVTLEQPPNLLRMFFDALYDEDVVKEDAFYSWESSKDPAEQQGKGVALKSVTAFFKWLREAEEESDHN

SEQ ID NO: 757883 - protein, 679 aa, Homo sapiens
MAWLKNHDEESLECLCRLLTTIGKDLDFEKAKPRMDQYFNQMEKIIKEKKTSSRIRFMLQDVLDLRGSNWVPRRGDQGPKTIDQIHKEAEMEEHREHIKVQQLMAKGSDKRRGGPPGPPISRGLPLVDDGGWNTVPISKGSRPIDTSRLTKITKPGSIDSNNQLFAPGGRLSWGKGSSGGSGAKPSDAASEAARPATSTLNRFSALQQAVPTESTDNRRVVQRSSLSRERGEKAGDRGDRLERSERGGDRGDRLDRARTPATKRSFSKEVEERSRERPSQPEGLRKAASLTEDRDRGRDAVKREAALPPVSPLKAALSEEELEKKSKAIIEEYLHLNDMKEAVQCVQELASPSLLFIFVRHGVESTLERSAIAREHMGQLLHQLLCAGHLSTAQYYQGLYEILELAEDMEIDIPHVWLYLAELVTPILQEGGVPMGELFREITKPLRPLGKAASLLLEILGLLCKSMGPKKVGTLWREAGLSWKEFLPEGQDIGAFVAEQKVEYTLGEESEAPGQRALPSEELNRQLEKLLKEGSSNQRVFDWIEANLSEQQIVSNTLVRALMTAVCYSAIIFETPLRVDVAVLKARAKLLQKYLCDEQKELQALYALQALVVTLEQPPNLLRMFFDALYDEDVVKEDAFYSWESSKDPAEQQGKGVALKSVTAFFKWLREAEEESDHN

SEQ ID NO: 757884 - protein, 664 aa, Homo sapiens
RYQPVTSWQDLDFEETKPRMDQYFNQMEKIIKEKKTSSRIRFMLQDVLDLRGSNWVPRRGDQGPKTIDQIHKEAEMEEHREHIKVQQLMAKGSDKRRGGPPGPPISRGLPLVDDGGWNTVPISKGSRPIDTSRLTKITKPGSIDSNNQLFAPGGRLSWGKGSSGGSGAKPSDAASEAARPATSTLNRFSALQQAVPTESTDNRRVVQRSSLSRERGEKAGDRGDRLERSERGGDRGDRLDRARTPATKRSFSKEVEERSRERPSQPEGLRKAASLTEDRDRGRDAVKREAALPPVSPLKAALSEEELEKKSKAIIEEYLHLNDMKEAVQCVQELASPSLLFIFVRHGVESTLERSAIAREHMGQLLHQLLCAGHLSTAQYYQGLYEILELAEDMEIDIPHVWLYLAELVTPILQEGGVPMGELFREITKPLRPLGKAASLLLEILGLLCKSMGPKKVGTLWREAGLSWKEFLPEGQDIGAFVAEQKVEYTLGEESEAPGQRALPSEELNRQLEKLLKEGSSNQRVFDWIEANLSEQQIVSNTLVRALMTAVCYSAIIFETPLRVDVAVLKARAKLLQKYLCDEQKELQALYALQALVVTLEQPPNLLRMFFDALYDEDVVKEDAFYSWESSKDPAEQQGKGVALKSVTAFFKWLREAEEESDHN

SEQ ID NO: 757885 - protein, 656 aa, Homo sapiens
IRLGRGGGIGREKDQYYQMEKIIKEKKTSSRIRFMLQDVLDLRGSNWVPRRGDQGPKTIDQIHKEAEMEEHREHIKVQQLMAKGSDKRRGGPPGPPISRGLPLVDDGGWNTVPISKGSRPIDTSRLTKITKPGSIDSNNQLFAPGGRLSWGKGSSGGSGAKPSDAASEAARPATSTLNRFSALQQAVPTESTDNRRVVQRSSLSRERGEKAGDRGDRLERSERGGDRGDRLDRARTPATKRSFSKEVEERSRERPSQPEGLRKAASLTEDRDRGRDAVKREAALPPVSPLKAALSEEELEKKSKAIIEEYLHLNDMKEAVQCVQELASPSLLFIFVRHGVESTLERSAIAREHMGQLLHQLLCAGHLSTAQYYQGLYEILELAEDMEIDIPHVWLYLAELVTPILQEGGVPMGELFREITKPLRPLGKAASLLLEILGLLCKSMGPKKVGTLWREAGLSWKEFLPEGQDIGAFVAEQKVEYTLGEESEAPGQRALPSEELNRQLEKLLKEGSSNQRVFDWIEANLSEQQIVSNTLVRALMTAVCYSAIIFETPLRVDVAVLKARAKLLQKYLCDEQKELQALYALQALVVTLEQPPNLLRMFFDALYDEDVVKEDAFYSWESSKDPAEQQGKGVALKSVTAFFKWLREAEEESDHN

SEQ ID NO: 757886 - protein, 589 aa, Homo sapiens [sequence omitted]

SEQ ID NO: 757887 - protein, 1412 aa, Homo sapiens
MMIPSQISYPASQGAYYIPGQGRSTYVVPTQQYPVQPGAPGFYPGASPTEFGTYAGAYYPAQGVQQFPTGVAPAPVLMNQPPQIAPKRERKTIRIRDPNQGGKDITEEIMSGARTASTPTPPQTGGGLEPQANGETPQVAVIVRPDDRSQGAIIADRPGLPGPEHSPSESQPSSPSPTPSPSPVLEPGSEPNLAVLSIPGDTMTTIQMSVEESTPISRETGEPYRLSPEPTPLAEPILEVEVTLSKPVPESEFSSSPLQAPTPLASHTVEIHEPNGMVPSEDLEPEVESSPELAPPPACPSESPVPIAPTAQPEELLNGAPSPPAVDLSPVSEPEEQAKEVTASVAPPTIPSATPATAPSATSPAQEEEMEEEEEEEEGEAGEAGEAESEKGGEELLPPESTPIPANLSQNLEAAAATQVAVSVPKRRRKIKELNKKEAVGDLLDAFKEANPAVPEVENQPPAGSNPGPESEGSGVPPRPEEADETWDSKEDKIHNAENIQPGEQKYEYKSDQWKPLNLEEKKRYDREFLLGFQFIFASMQKPEGLPHISDVVLDKANKTPLRPLDPTRLQGINCGPDFTPSFANLGRTTLSTRGPPRGGPGGELPRGPAGLGPRRSQQGPRKEPRKIIATVLMTEDIKLNKAEKAWKPSSKRTAADKDRGEEDADGSKTQDLFRRVRSILNKLTPQMFQQLMKQVTQLAIDTEERLKGVIDLIFEKAISEPNFSVAYANMCRCLMALKVPTTEKPTVTVNFRKLLLNRCQKEFEKDKDDDEVFEKKQKEMDEAATAEERGRLKEELEEARDIARRRSLGNIKFIGELFKLKMLTEAIMHDCVVKLLKNHDEESLECLCRLLTTIGKDLDFEKAKPRMDQYFNQMEKIIKEKKTSSRIRFMLQDVLDLRGSNWVPRRGDQGPKTIDQIHKEAEMEEHREHIKVQQLMAKGSDKRRGGPPGPPISRGLPLVDDGGWNTVPISKGSRPIDTSRLTKITKPGSIDSNNQLFAPGGRLSWGKGSSGGSGAKPSDAASEAARPATSTLNRFSALQQAVPTESTDNRRVVQRSSLSRERGEKAGDRGDRLERSERGGDRGDRLDRARTPATKRSFSKEVEERSRERPSQPEGLRKAASLTEDRDRGRDAVKREAALPPVSPLKAALSEEELEKKSKAIIEEYLHLNDMKEAVQCVQELASPSLLFIFVRHGVESTLERSAIAREHMGQLLHQLLCAGHLSTAQYYQGLYEILELAEDMEIDIPHVWLYLAELVTPILQEGGVPMGELFREITKPLRPLGKAASLLLEILGLLCKSMGPKKVGTLWREAGLSWKEFLPEGQDIGAFVAEQKVEYTLGEESEAPGQRALPSEELNRQLEKLLKEGSSNQRVFDWIEANLSEQQIVSNTLVRALMIVRLPSQSKETLPETH

SEQ ID NO: 757888 - protein, 1489 aa, Homo sapiens
MMIPSQISYPASQGAYYIPGQGRSTYVVPTQQYPVQPGAPGFYPGASPTEFGTYAGAYYPAQGVQQFPTGVAPAPVLMNQPPQIAPKRERKTIRIRDPNQGGKDITEEIMSGARTASTPTPPQTGGGLEPQANGETPQVAVIVRPDDRSQGAIIADRPGLPGPEHSPSESQPSSPSPTPSPSPVLEPGSEPNLAVLSIPGDTMTTIQMSVEESTPISRETGEPYRLSPEPTPLAEPILEVEVTLSKPVPESEFSSSPLQAPTPLASHTVEIHEPNGMVPSEDLEPEVESSPELAPPPACPSESPVPIAPTAQPEELLNGAPSPPAVDLSPVSEPEEQAKEVTASVAPPTIPSATPATAPSATSPAQEEEMEEEEEEEEGEAGEAGEAESEKGGEELLPPESTPIPANLSQNLEAAAATQVAVSVPKRRRKIKELNKKEAVGDLLDAFKEANPAVPEVENQPPAGSNPGPESEGSGVPPRPEEADETWDSKEDKIHNAENIQPGEQKYEYKSDQWKPLNLEEKKRYDREFLLGFQFIFASMQKPEGLPHISDVVLDKANKTPLRPLDPTRLQGINCGPDFTPSFANLGRTTLSTRGPPRGGPGGELPRGPAGLGPRRSQQGPRKEPRKIIATVLMTEDIKLNKAEKAWKPSSKRTAADKDRGEEDADGSKTQDLFRRVRSILNKLTPQMFQQLMKQVTQLAIDTEERLKGVIDLIFEKAISEPNFSVAYANMCRCLMALKVPTTEKPTVTVNFRKLLLNRCQKEFEKDKDDDEVFEKKQKEMDEAATAEERGRLKEELEEARDIARRRSLGNIKFIGELFKLKMLTEAIMHDCVVKLLKNHDEESLECLCRLLTTIGKDLDFEKAKPRMDQYFNQMEKIIKEKKTSSRIRFMLQDVLDLRGSNWVPRRGDQGPKTIDQIHKEAEMEEHREHIKVQQLMAKGSDKRRGGPPGPPISRGLPLVDDGGWNTVPISKGSRPIDTSRLTKITKPGSIDSNNQLFAPGGRLSWGKGSSGGSGAKPSDAASEAARPATSTLNRFSALQQAVPTESTDNRRVVQRSSLSRERGEKAGDRGDRLERSERGGDRGDRLDRARTPATKRSFSKEVEERSRERPSQPEGLRKAASLTEDRDRGRDAVKREAALPPVSPLKAALSEEELEKKSKAIIEEYLHLNDMKEAVQCVQELASPSLLFIFVRHGVESTLERSAIAREHMGQLLHQLLCAGHLSTAQYYQGLYEILELAEDMEIDIPHVWLYLAELVTPILQEGGVPMGELFREITKPLRPLGKAASLLLEILGLLCKSMGPKKVGTLWREAGLSWKEFLPEGQDIGAFVAEQKVEYTLGEESEAPGQRALPSEELNRQLEKLLKEGSSNQRVFDWIENLGIICFSHTANLSEQQIVSNTLVRALMTAVCYSAIIFETPLRVDVAVLKARAKLLQKYLCDEQKELQALYALQALVVTLEQPPNLLRMFFDALYDEDVVKYSALSIPEIL

SEQ ID NO: 757889 - protein, 1406 aa, Homo sapiens
MMIPSQISYPASQGAYYIPGQGRSTYVVPTQQYPVQPGAPGFYPGASPTEFGTYAGAYYPAQGVQQFPTGVAPAPVLMNQPPQIAPKRERKTIRIRDPNQGGKDITEEIMSGARTASTPTPPQTGGGLEPQANGETPQVAVIVRPDDRSQGAIIADRPGLPGPEHSPSESQPSSPSPTPSPSPVLEPGSEPNLAVLSIPGDTMTTIQMSVEESTPISRETGEPYRLSPEPTPLAEPILEVEVTLSKPVPESEFSSSPLQAPTPLASHTVEIHEPNGMVPSEDLEPEVESSPELAPPPACPSESPVPIAPTAQPEELLNGAPSPPAVDLSPVSEPEEQAKEVTASVAPPTIPSATPATAPSATSPAQEEEMEEEEEEEEGEAGEAGEAESEKGGEELLPPESTPIPANLSQNLEAAAATQVAVSVPKRRRKIKELNKKEAVGDLLDAFKEANPAVPEVENQPPAGSNPGPESEGSGVPPRPEEADETWDSKEDKIHNAENIQPGEQKYEYKSDQWKPLNLEEKKRYDREFLLGFQFIFASMQKPEGLPHISDVVLDKANKTPLRPLDPTRLQGINCGPDFTPSFANLGRTTLSTRGPPRGGPGGELPRGPAGLGPRRSQQGPRKEPRKIIATVLMTEDIKLNKAEKAWKPSSKRTAADKDRGEEDADGSKTQDLFRRVRSILNKLTPQMFQQLMKQVTQLAIDTEERLKGVIDLIFEKAISEPNFSVAYANMCRCLMALKVPTTEKPTVTVNFRKLLLNRCQKEFEKDKDDDEVFEKKQKEMDEAATAEERGRLKEELEEARDIARRRSLGNIKFIGELFKLKMLTEAIMHDCVVKLLKNHDEESLECLCRLLTTIGKDLDFEKAKPRMDQYFNQMEKIIKEKKTSSRIRFMLQDVLDLRGSNWVPRRGDQGPKTIDQIHKEAEMEEHREHIKVQQLMAKGSDKRRGGPPGPPISRGLPLVDDGGWNTVPISKGSRPIDTSRLTKITKPGSIDSNNQLFAPGGRLSWGKGSSGGSGAKPSDAASEAARPATSTLNRFSALQQAVPTESTDNRRVVQRSSLSRERGEKAGDRGDRLERSERGGDRGDRLDRARTPATKRSFSKEVEERSRERPSQPEGLRKAASLTEDRDRGRDAVKREAALPPVSPLKAALSEEELEKKSKAIIEEYLHLNDMKEAVQCVQELASPSLLFIFVRHGVESTLERSAIAREHMGQLLHQLLCAGHLSTAQYYQGLYEILELAEDMEIDIPHVWLYLAELVTPILQEGGVPMGELFREITKPLRPLGKAASLLLEILGLLCKSMGPKKVGTLWREAGLSWKEFLPEGQDIGAFVAEQKVEYTLGEESEAPGQRALPSEELNRQLEKLLKEGSSNQRVFDWIEYPNLSDPARYYPHPMYQTSPTSIIDFRY

SEQ ID NO: 757890 - protein, 527 aa, Homo sapiens
EGLAPEASAAAPAPAQSPSRCKELVVRIDGARPSDAASEAARPATSTLNRFSALQQAVPTESTDNRRVVQRSSLSRERGEKAGDRGDRLERSERGGDRGDRLDRARTPATKRSFSKEVEERSRERPSQPEGLRKAASLTEDRDRGRDAVKREAALPPVSPLKAALSEEELEKKSKAIIEEYLHLNDMKEAVQCVQELASPSLLFIFVRHGVESTLERSAIAREHMGQLLHQLLCAGHLSTAQYYQGLYEILELAEDMEIDIPHVWLYLAELVTPILQEGGVPMGELFREITKPLRPLGKAASLLLEILGLLCKSMGPKKVGTLWREAGLSWKEFLPEGQDIGAFVAEQKVEYTLGEESEAPGQRALPSEELNRQLEKLLKEGSSNQRVFDWIEANLSEQQIVSNTLVRALMTAVCYSAIIFETPLRVDVAVLKARAKLLQKYLCDEQKELQALYALQALVVTLEQPPNLLRMFFDALYDEDVVKEDAFYSWESSKDPAEQQGKGVALKSVTAFFKWLREAEEESDHN

SEQ ID NO: 757891 - protein, 474 aa, Homo sapiens
PNSSQSMPGVIRPRQRQWSSLSRERGEKAGDRGDRLERSERGGDRGDRLDRARTPATKRSFSKEVEERSRERPSQPEGLRKAASLTEDRDRGRDAVKREAALPPVSPLKAALSEEELEKKSKAIIEEYLHLNDMKEAVQCVQELASPSLLFIFVRHGVESTLERSAIAREHMGQLLHQLLCAGHLSTAQYYQGLYEILELAEDMEIDIPHVWLYLAELVTPILQEGGVPMGELFREITKPLRPLGKAASLLLEILGLLCKSMGPKKVGTLWREAGLSWKEFLPEGQDIGAFVAEQKVEYTLGEESEAPGQRALPSEELNRQLEKLLKEGSSNQRVFDWIEANLSEQQIVSNTLVRALMTAVCYSAIIFETPLRVDVAVLKARAKLLQKYLCDEQKELQALYALQALVVTLEQPPNLLRMFFDALYDEDVVKEDAFYSWESSKDPAEQQGKGVALKSVTAFFKWLREAEEESDHN

SEQ ID NO: 757892 - protein, 473 aa, Homo sapiens
MSCTFHQQDRYRRVVQRSSLSRERGEKAGDRGDRLERSERGGDRGDRLDRARTPATKRSFSKEVEERSRERPSQPEGLRKAASLTEDRDRGRDAVKREAALPPVSPLKAALSEEELEKKSKAIIEEYLHLNDMKEAVQCVQELASPSLLFIFVRHGVESTLERSAIAREHMGQLLHQLLCAGHLSTAQYYQGLYEILELAEDMEIDIPHVWLYLAELVTPILQEGGVPMGELFREITKPLRPLGKAASLLLEILGLLCKSMGPKKVGTLWREAGLSWKEFLPEGQDIGAFVAEQKVEYTLGEESEAPGQRALPSEELNRQLEKLLKEGSSNQRVFDWIEANLSEQQIVSNTLVRALMTAVCYSAIIFETPLRVDVAVLKARAKLLQKYLCDEQKELQALYALQALVVTLEQPPNLLRMFFDALYDEDVVKEDAFYSWESSKDPAEQQGKGVALKSVTAFFKWLREAEEESDHN

SEQ ID NO: 757893 - protein, 458 aa, Homo sapiens
MASSLSRERGEKAGDRGDRLERSERGGDRGDRLDRARTPATKRSFSKEVEERSRERPSQPEGLRKAASLTEDRDRGRDAVKREAALPPVSPLKAALSEEELEKKSKAIIEEYLHLNDMKEAVQCVQELASPSLLFIFVRHGVESTLERSAIAREHMGQLLHQLLCAGHLSTAQYYQGLYEILELAEDMEIDIPHVWLYLAELVTPILQEGGVPMGELFREITKPLRPLGKAASLLLEILGLLCKSMGPKKVGTLWREAGLSWKEFLPEGQDIGAFVAEQKVEYTLGEESEAPGQRALPSEELNRQLEKLLKEGSSNQRVFDWIEANLSEQQIVSNTLVRALMTAVCYSAIIFETPLRVDVAVLKARAKLLQKYLCDEQKELQALYALQALVVTLEQPPNLLRMFFDALYDEDVVKEDAFYSWESSKDPAEQQGKGVALKSVTAFFKWLREAEEESDHN

SEQ ID NO: 757894 - protein, 1339 aa, Homo sapiens
MMIPSQISYPASQGAYYIPGQGRSTYVVPTQQYPVQPGAPGFYPGASPTEFGTYAGAYYPAQGVQQFPTGVAPAPVLMNQPPQIAPKRERKTIRIRDPNQGGKDITEEIMSGARTASTPTPPQTGGGLEPQANGETPQVAVIVRPDDRSQGAIIADRPGLPGPEHSPSESQPSSPSPTPSPSPVLEPGSEPNLAVLSIPGDTMTTIQMSVEESTPISRETGEPYRLSPEPTPLAEPILEVEVTLSKPVPESEFSSSPLQAPTPLASHTVEIHEPNGMVPSEDLEPEVESSPELAPPPACPSESPVPIAPTAQPEELLNGAPSPPAVDLSPVSEPEEQAKEVTASVAPPTIPSATPATAPSATSPAQEEEMEEEEEEEEGEAGEAGEAESEKGGEELLPPESTPIPANLSQNLEAAAATQVAVSVPKRRRKIKELNKKEAVGDLLDAFKEANPAVPEVENQPPAGSNPGPESEGSGVPPRPEEADETWDSKEDKIHNAENIQPGEQKYEYKSDQWKPLNLEEKKRYDREFLLGFQFIFASMQKPEGLPHISDVVLDKANKTPLRPLDPTRLQGINCGPDFTPSFANLGRTTLSTRGPPRGGPGGELPRGPAGLGPRRSQQGPRKEPRKIIATVLMTEDIKLNKAEKAWKPSSKRTAADKDRGEEDADGSKTQDLFRRVRSILNKLTPQMFQQLMKQVTQLAIDTEERLKGVIDLIFEKAISEPNFSVAYANMCRCLMALKVPTTEKPTVTVNFRKLLLNRCQKEFEKDKDDDEVFEKKQKEMDEAATAEERGRLKEELEEARDIARRRSLGNIKFIGELFKLKMLTEAIMHDCVVKLLKNHDEESLECLCRLLTTIGKDLDFEKAKPRMDQYFNQMEKIIKEKKTSSRIRFMLQDVLDLRGSNWVPRRGDQGPKTIDQIHKEAEMEEHREHIKVQQLMAKGSDKRRGGPPGPPISRGLPLVDDGGWNTVPISKGSRPIDTSRLTKITKPGSIDSNNQLFAPGGRLSWGKGSSGGSGAKPSDAASEAARPATSTLNRFSALQQAVPTESTDNRRVVQRSSLSRERGEKAGDRGDRLERSERGGDRGDRLDRARTPATKRSFSKEVEERSRERPSQPEGLRKAASLTEDRDRGRDAVKREAALPPVSPLKAALSEEELEKKSKAIIEEYLHLNDMKEAVQCVQELASPSLLFIFVRHGVESTLERSAIAREHMGQLLHQLLCAGHLSTAQYYQGLYEILELAEDMEIDIPHVWLYLAELVTPILQEGGVPMGELFREITKPLRPLGKAASLLLEILGLLCKSMGPKKVGTLWREAGLSWKEFLPEGQDIGAFVAEGLGMELG

SEQ ID NO: 757895 - protein, 1308 aa, Homo sapiens
MMIPSQISYPASQGAYYIPGQGRSTYVVPTQQYPVQPGAPGFYPGASPTEFGTYAGAYYPAQGVQQFPTGVAPAPVLMNQPPQIAPKRERKTIRIRDPNQGGKDITEEIMSGARTASTPTPPQTGGGLEPQANGETPQVAVIVRPDDRSQGAIIADRPGLPGPEHSPSESQPSSPSPTPSPSPVLEPGSEPNLAVLSIPGDTMTTIQMSVEESTPISRETGEPYRLSPEPTPLAEPILEVEVTLSKPVPESEFSSSPLQAPTPLASHTVEIHEPNGMVPSEDLEPEVESSPELAPPPACPSESPVPIAPTAQPEELLNGAPSPPAVDLSPVSEPEEQAKEVTASVAPPTIPSATPATAPSATSPAQEEEMEEEEEEEEGEAGEAGEAESEKGGEELLPPESTPIPANLSQNLEAAAATQVAVSVPKRRRKIKELNKKEAVGDLLDAFKEANPAVPEVENQPPAGSNPGPESEGSGVPPRPEEADETWDSKEDKIHNAENIQPGEQKYEYKSDQWKPLNLEEKKRYDREFLLGFQFIFASMQKPEGLPHISDVVLDKANKTPLRPLDPTRLQGINCGPDFTPSFANLGRTTLSTRGPPRGGPGGELPRGPAGLGPRRSQQGPRKEPRKIIATVLMTEDIKLNKAEKAWKPSSKRTAADKDRGEEDADGSKTQDLFRRVRSILNKLTPQMFQQLMKQVTQLAIDTEERLKGVIDLIFEKAISEPNFSVAYANMCRCLMALKVPTTEKPTVTVNFRKLLLNRCQKEFEKDKDDDEVFEKKQKEMDEAATAEERGRLKEELEEARDIARRRSLGNIKFIGELFKLKMLTEAIMHDCVVKLLKNHDEESLECLCRLLTTIGKDLDFEKAKPRMDQYFNQMEKIIKEKKTSSRIRFMLQDVLDLRGSNWVPRRGDQGPKTIDQIHKEAEMEEHREHIKVQQLMAKGSDKRRGGPPGPPISRGLPLVDDGGWNTVPISKGSRPIDTSRLTKITKPGSIDSNNQLFAPGGRLSWGKGSSGGSGAKPSDAASEAARPATSTLNRFSALQQAVPTESTDNRRVVQRSSLSRERGEKAGDRGDRLERSERGGDRGDRLDRARTPATKRSFSKEVEERSRERPSQPEGLRKAASLTEDRDRGRDAVKREAALPPVSPLKAALSEEELEKKSKAIIEEYLHLNDMKEAVQCVQELASPSLLFIFVRHGVESTLERSAIAREHMGQLLHQLLCAGHLSTAQYYQGLYEILELAEDMEIDIPHVWLYLAELVTPILQEGGVPMGELFREITKPLRPLGKAASLLLEILGLLCKSMGLAGGRYR

SEQ ID NO: 757896 - protein, 1333 aa, Homo sapiens
MMIPSQISYPASQGAYYIPGQGRSTYVVPTQQYPVQPGAPGFYPGASPTEFGTYAGAYYPAQGVQQFPTGVAPAPVLMNQPPQIAPKRERKTIRIRDPNQGGKDITEEIMSGARTASTPTPPQTGGGLEPQANGETPQVAVIVRPDDRSQGAIIADRPGLPGPEHSPSESQPSSPSPTPSPSPVLEPGSEPNLAVLSIPGDTMTTIQMSVEESTPISRETGEPYRLSPEPTPLAEPILEVEVTLSKPVPESEFSSSPLQAPTPLASHTVEIHEPNGMVPSEDLEPEVESSPELAPPPACPSESPVPIAPTAQPEELLNGAPSPPAVDLSPVSEPEEQAKEVTASVAPPTIPSATPATAPSATSPAQEEEMEEEEEEEEGEAGEAGEAESEKGGEELLPPESTPIPANLSQNLEAAAATQVAVSVPKRRRKIKELNKKEAVGDLLDAFKEANPAVPEVENQPPAGSNPGPESEGSGVPPRPEEADETWDSKEDKIHNAENIQPGEQKYEYKSDQWKPLNLEEKKRYDREFLLGFQFIFASMQKPEGLPHISDVVLDKANKTPLRPLDPTRLQGINCGPDFTPSFANLGRTTLSTRGPPRGGPGGELPRGPAGLGPRRSQQGPRKEPRKIIATVLMTEDIKLNKAEKAWKPSSKRTAADKDRGEEDADGSKTQDLFRRVRSILNKLTPQMFQQLMKQVTQLAIDTEERLKGVIDLIFEKAISEPNFSVAYANMCRCLMALKVPTTEKPTVTVNFRKLLLNRCQKEFEKDKDDDEVFEKKQKEMDEAATAEERGRLKEELEEARDIARRRSLGNIKFIGELFKLKMLTEAIMHDCVVKLLKNHDEESLECLCRLLTTIGKDLDFEKAKPRMDQYFNQMEKIIKEKKTSSRIRFMLQDVLDLRGSNWVPRRGDQGPKTIDQIHKEAEMEEHREHIKVQQLMAKGSDKRRGGPPGPPISRGLPLVDDGGWNTVPISKGSRPIDTSRLTKITKPGSIDSNNQLFAPGGRLSWGKGSSGGSGAKPSDAASEAARPATSTLNRFSALQQAVPTESTDNRRVVQRSSLSRERGEKAGDRGDRLERSERGGDRGDRLDRARTPATKRSFSKEVEERSRERPSQPEGLRKAASLTEDRDRGRDAVKREAALPPVSPLKAALSEEELEKKSKAIIEEYLHLNDMKEAVQCVQELASPSLLFIFVRHGVESTLERSAIAREHMGQLLHQLLCAGHLSTAQYYQGLYEILELAEDMEIDIPHVWLYLAELVTPILQEGGVPMGELFREITKPLRPLGKAASLLLEILGLLCKSMGPKKVGTLWREINMVVVQGDKHQMMSEGKIHRL

SEQ ID NO: 757897 - protein, 421 aa, Homo sapiens
MLFLLCTKVDLRAYTHRERPSQPEGLRKAASLTEDRDRGRDAVKREAALPPVSPLKAALSEEELEKKSKAIIEEYLHLNDMKEAVQCVQELASPSLLFIFVRHGVESTLERSAIAREHMGQLLHQLLCAGHLSTAQYYQGLYEILELAEDMEIDIPHVWLYLAELVTPILQEGGVPMGELFREITKPLRPLGKAASLLLEILGLLCKSMGPKKVGTLWREAGLSWKEFLPEGQDIGAFVAEQKVEYTLGEESEAPGQRALPSEELNRQLEKLLKEGSSNQRVFDWIEANLSEQQIVSNTLVRALMTAVCYSAIIFETPLRVDVAVLKARAKLLQKYLCDEQKELQALYALQALVVTLEQPPNLLRMFFDALYDEDVVKEDAFYSWESSKDPAEQQGKGVALKSVTAFFKWLREAEEESDHN

SEQ ID NO: 757898 - protein, 1214 aa, Homo sapiens
MMIPSQISYPASQGAYYIPGQGRSTYVVPTQQYPVQPGAPGFYPGASPTEFGTYAGAYYPAQGVQQFPTGVAPAPVLMNQPPQIAPKRERKTIRIRDPNQGGKDITEEIMSGARTASTPTPPQTGGGLEPQANGETPQVAVIVRPDDRSQGAIIADRPGLPGPEHSPSESQPSSPSPTPSPSPVLEPGSEPNLAVLSIPGDTMTTIQMSVEESTPISRETGEPYRLSPEPTPLAEPILEVEVTLSKPVPESEFSSSPLQAPTPLASHTVEIHEPNGMVPSEDLEPEVESSPELAPPPACPSESPVPIAPTAQPEELLNGAPSPPAVDLSPVSEPEEQAKEVTASVAPPTIPSATPATAPSATSPAQEEEMEEEEEEEEGEAGEAGEAESEKGGEELLPPESTPIPANLSQNLEAAAATQVAVSVPKRRRKIKELNKKEAVGDLLDAFKEANPAVPEVENQPPAGSNPGPESEGSGVPPRPEEADETWDSKEDKIHNAENIQPGEQKYEYKSDQWKPLNLEEKKRYDREFLLGFQFIFASMQKPEGLPHISDVVLDKANKTPLRPLDPTRLQGINCGPDFTPSFANLGRTTLSTRGPPRGGPGGELPRGPAGLGPRRSQQGPRKEPRKIIATVLMTEDIKLNKAEKAWKPSSKRTAADKDRGEEDADGSKTQDLFRRVRSILNKLTPQMFQQLMKQVTQLAIDTEERLKGVIDLIFEKAISEPNFSVAYANMCRCLMALKVPTTEKPTVTVNFRKLLLNRCQKEFEKDKDDDEVFEKKQKEMDEAATAEERGRLKEELEEARDIARRRSLGNIKFIGELFKLKMLTEAIMHDCVVKLLKNHDEESLECLCRLLTTIGKDLDFEKAKPRMDQYFNQMEKIIKEKKTSSRIRFMLQDVLDLRGSNWVPRRGDQGPKTIDQIHKEAEMEEHREHIKVQQLMAKGSDKRRGGPPGPPISRGLPLVDDGGWNTVPISKGSRPIDTSRLTKITKPGSIDSNNQLFAPGGRLSWGKGSSGGSGAKPSDAASEAARPATSTLNRFSALQQAVPTESTDNRRVVQRSSLSRERGEKAGDRGDRLERSERGGDRGDRLDRARTPATKRSFSKEVEERSRERPSQPEGLRKAASLTEDRDRGRDAVKREAALPPVSPLKAALSEEELEKKSKAIIEEYLHLNDMKEAVQRVQELASPSSPASGTDGASYSETHAMANISGRLHTAG

SEQ ID NO: 757899 - protein, 282 aa, Homo sapiens
IRLGTSLGDEDMEIDIPHVWLYLAELVTPILQEGGVPMGELFREITKPLRPLGKAASLLLEILGLLCKSMGPKKVGTLWREAGLSWKEFLPEGQDIGAFVAEQKVEYTLGEESEAPGQRALPSEELNRQLEKLLKEGSSNQRVFDWIEANLSEQQIVSNTLVRALMTAVCYSAIIFETPLRVDVAVLKARAKLLQKYLCDEQKELQALYALQALVVTLEQPPNLLRMFFDALYDEDVVKEDAFYSWESSKDPAEQQGKGVALKSVTAFFKWLREAEEESDHN

SEQ ID NO: 757900 - protein, 1106 aa, Homo sapiens
MMIPSQISYPASQGAYYIPGQGRSTYVVPTQQYPVQPGAPGFYPGASPTEFGTYAGAYYPAQGVQQFPTGVAPAPVLMNQPPQIAPKRERKTIRIRDPNQGGKDITEEIMSGARTASTPTPPQTGGGLEPQANGETPQVAVIVRPDDRSQGAIIADRPGLPGPEHSPSESQPSSPSPTPSPSPVLEPGSEPNLAVLSIPGDTMTTIQMSVEESTPISRETGEPYRLSPEPTPLAEPILEVEVTLSKPVPESEFSSSPLQAPTPLASHTVEIHEPNGMVPSEDLEPEVESSPELAPPPACPSESPVPIAPTAQPEELLNGAPSPPAVDLSPVSEPEEQAKEVTASVAPPTIPSATPATAPSATSPAQEEEMEEEEEEEEGEAGEAGEAESEKGGEELLPPESTPIPANLSQNLEAAAATQVAVSVPKRRRKIKELNKKEAVGDLLDAFKEANPAVPEVENQPPAGSNPGPESEGSGVPPRPEEADETWDSKEDKIHNAENIQPGEQKYEYKSDQWKPLNLEEKKRYDREFLLGFQFIFASMQKPEGLPHISDVVLDKANKTPLRPLDPTRLQGINCGPDFTPSFANLGRTTLSTRGPPRGGPGGELPRGPAGLGPRRSQQGPRKEPRKIIATVLMTEDIKLNKAEKAWKPSSKRTAADKDRGEEDADGSKTQDLFRRVRSILNKLTPQMFQQLMKQVTQLAIDTEERLKGVIDLIFEKAISEPNFSVAYANMCRCLMALKVPTTEKPTVTVNFRKLLLNRCQKEFEKDKDDDEVFEKKQKEMDEAATAEERGRLKEELEEARDIARRRSLGNIKFIGELFKLKMLTEAIMHDCVVKLLKNHDEESLECLCRLLTTIGKDLDFEKAKPRMDQYFNQMEKIIKEKKTSSRIRFMLQDVLDLRGSNWVPRRGDQGPKTIDQIHKEAEMEEHREHIKVQQLMAKGSDKRRGGPPGPPISRGLPLVDDGGWNTVPISKGSRPIDTSRLTKITKPGSIDSNNQLFAPGGRLSWGKGSSGGSGAKPSDAASEAARPATSTLNRFSALQQAVPTESTDNRRVVQRSSLSRERGEKAGDRGDRLERSERGGDRGDRLDRARTPATHELQAGGGGFA

SEQ ID NO: 757901 - protein, 272 aa, Homo sapiens
IELGPTLPVWLYLAELVTPILQEGGVPMGELFREITKPLRPLGKAASLLLEILGLLCKSMGPKKVGTLWREAGLSWKEFLPEGQDIGAFVAEQKVEYTLGEESEAPGQRALPSEELNRQLEKLLKEGSSNQRVFDWIEANLSEQQIVSNTLVRALMTAVCYSAIIFETPLRVDVAVLKARAKLLQKYLCDEQKELQALYALQALVVTLEQPPNLLRMFFDALYDEDVVKEDAFYSWESSKDPAEQQGKGVALKSVTAFFKWLREAEEESDHN

SEQ ID NO: 757902 - protein, 229 aa, Homo sapiens
SSVPPGRPNLGLLCKSMGPKKVGTLWREAGLSWKEFLPEGQDIGAFVAEQKVEYTLGEESEAPGQRALPSEELNRQLEKLLKEGSSNQRVFDWIEANLSEQQIVSNTLVRALMTAVCYSAIIFETPLRVDVAVLKARAKLLQKYLCDEQKELQALYALQALVVTLEQPPNLLRMFFDALYDEDVVKEDAFYSWESSKDPAEQQGKGVALKSVTAFFKWLREAEEESDHN

SEQ ID NO: 757903 - protein, 1000 aa, Homo sapiens
MMIPSQISYPASQGAYYIPGQGRSTYVVPTQQYPVQPGAPGFYPGASPTEFGTYAGAYYPAQGVQQFPTGVAPAPVLMNQPPQIAPKRERKTIRIRDPNQGGKDITEEIMSGARTASTPTPPQTGGGLEPQANGETPQVAVIVRPDDRSQGAIIADRPGLPGPEHSPSESQPSSPSPTPSPSPVLEPGSEPNLAVLSIPGDTMTTIQMSVEESTPISRETGEPYRLSPEPTPLAEPILEVEVTLSKPVPESEFSSSPLQAPTPLASHTVEIHEPNGMVPSEDLEPEVESSPELAPPPACPSESPVPIAPTAQPEELLNGAPSPPAVDLSPVSEPEEQAKEVTASVAPPTIPSATPATAPSATSPAQEEEMEEEEEEEEGEAGEAGEAESEKGGEELLPPESTPIPANLSQNLEAAAATQVAVSVPKRRRKIKELNKKEAVGDLLDAFKEANPAVPEVENQPPAGSNPGPESEGSGVPPRPEEADETWDSKEDKIHNAENIQPGEQKYEYKSDQWKPLNLEEKKRYDREFLLGFQFIFASMQKPEGLPHISDVVLDKANKTPLRPLDPTRLQGINCGPDFTPSFANLGRTTLSTRGPPRGGPGGELPRGPAGLGPRRSQQGPRKEPRKIIATVLMTEDIKLNKAEKAWKPSSKRTAADKDRGEEDADGSKTQDLFRRVRSILNKLTPQMFQQLMKQVTQLAIDTEERLKGVIDLIFEKAISEPNFSVAYANMCRCLMALKVPTTEKPTVTVNFRKLLLNRCQKEFEKDKDDDEVFEKKQKEMDEAATAEERGRLKEELEEARDIARRRSLGNIKFIGELFKLKMLTEAIMHDCVVKLLKNHDEESLECLCRLLTTIGKDLDFEKAKPRMDQYFNQMEKIIKEKKTSSRIRFMLQDVLDLRGSNWVPRRGDQGPKTIDQIHKEAEMEEHREHIKVQQLMAKGSDKRRGGPPGPPISRGLPLVDDGGWNTVPISKGSRPIDTSRLTKITKVGVCVGVGDSAQV

SEQ ID NO: 757904 - protein, 127 aa, Homo sapiens
PARIPAAPARIPAAPARIPAAPREFLLLFLLHPARFLLLQKYLCDEQKELQALYALQALVVTLEQPPNLLRMFFDALYDEDVVKEDAFYSWESSKDPAEQQGKGVALKSVTAFFKWLREAEEESDHN

SEQ ID NO: 757905 - protein, 915 aa, Homo sapiens
MMIPSQISYPASQGAYYIPGQGRSTYVVPTQQYPVQPGAPGFYPGASPTEFGTYAGAYYPAQGVQQFPTGVAPAPVLMNQPPQIAPKRERKTIRIRDPNQGGKDITEEIMSGARTASTPTPPQTGGGLEPQANGETPQVAVIVRPDDRSQGAIIADRPGLPGPEHSPSESQPSSPSPTPSPSPVLEPGSEPNLAVLSIPGDTMTTIQMSVEESTPISRETGEPYRLSPEPTPLAEPILEVEVTLSKPVPESEFSSSPLQAPTPLASHTVEIHEPNGMVPSEDLEPEVESSPELAPPPACPSESPVPIAPTAQPEELLNGAPSPPAVDLSPVSEPEEQAKEVTASVAPPTIPSATPATAPSATSPAQEEEMEEEEEEEEGEAGEAGEAESEKGGEELLPPESTPIPANLSQNLEAAAATQVAVSVPKRRRKIKELNKKEAVGDLLDAFKEANPAVPEVENQPPAGSNPGPESEGSGVPPRPEEADETWDSKEDKIHNAENIQPGEQKYEYKSDQWKPLNLEEKKRYDREFLLGFQFIFASMQKPEGLPHISDVVLDKANKTPLRPLDPTRLQGINCGPDFTPSFANLGRTTLSTRGPPRGGPGGELPRGPAGLGPRRSQQGPRKEPRKIIATVLMTEDIKLNKAEKAWKPSSKRTAADKDRGEEDADGSKTQDLFRRVRSILNKLTPQMFQQLMKQVTQLAIDTEERLKGVIDLIFEKAISEPNFSVAYANMCRCLMALKVPTTEKPTVTVNFRKLLLNRCQKEFEKDKDDDEVFEKKQKEMDEAATAEERGRLKEELEEARDIARRRSLGNIKFIGELFKLKMLTEAIMHDCVVKLLKNHDEESLECLCRLLTTIGKDLDFEKAKPRMDQYFNQMEKIIKEKKTSSRIRFMLQDVLDLRGSNWVPRRGAPSSGSR

SEQ ID NO: 757906 - protein, 123 aa, Homo sapiens
VGTGVGCVSGVIGHVAWEGYPAARGGGERGPEQVMLELSPEGTRHEEVSGKGYSIHKSVKAREDLLRMFFDALYDEDVVKEDAFYSWESSKDPAEQQGKGVALKSVTAFFKWLREAEEESDHN

SEQ ID NO: 757907 - protein, 913 aa, Homo sapiens
PVCPWARPEPGVPGWGVGTPRPKQLAPFVIREPGASETWNFRSGWSGAPRSQVDTLTSQPQALGCPEPVGRTVDLFLIEGHFYPSRAQPPSSAASRVQSAAPARPGPAAHVYPAGSQVMMIPSQISYPASQGAYYIPGQGRSTYVVPTQQYPVQPGAPGFYPGASPTEFGTYAGAYYPAQGVQQFPTGVAPAPVLMNQPPQIAPKRERKTIRIRDPNQGGKDITEEIMSGARTASTPTPPQTGGGLEPQANGETPQVAVIVRPDDRSQGAIIADRPGLPGPEHSPSESQPSSPSPTPSPSPVLEPGSEPNLAVLSIPGDTMTTIQMSVEESTPISRETGEPYRLSPEPTPLAEPILEVEVTLSKPVPESEFSSSPLQAPTPLASHTVEIHEPNGMVPSEDLEPEVESSPELAPPPACPSESPVPIAPTAQPEELLNGAPSPPAVDLSPVSEPEEQAKEVTASVAPPTIPSATPATAPSATSPAQEEEMEEEEEEEEGEAGEAGEAESEKGGEELLPPESTPIPANLSQNLEAAAATQVAVSVPKRRRKIKELNKKEAVGDLLDAFKEANPAVPEVENQPPAGSNPGPESEGSGVPPRPEEADETWDSKEDKIHNAENIQPGEQKYEYKSDQWKPLNLEEKKRYDREFLLGFQFIFASMQKPEGLPHISDVVLDKANKTPLRPLDPTRLQGINCGPDFTPSFANLGRTTLSTRGPPRGGPGGELPRGPAGLGPRRSQQGPRKEPRKIIATVLMTEDIKLNKAEKAWKPSSKRTAADKDRGEEDADGSKTQDLFRRVRSILNKLTPQMFQQLMKQVTQLAIDTEERLKGVIDLIFEKAISEPNFSVAYANMCRCLMALKVPTTEKPTVTVNFRKLLLNRCQKEFEKDKDDDEVFEKKQKEMDEAATAERKPTIDS

SEQ ID NO: 757908 - protein, 905 aa, Homo sapiens
PVCPWARPEPGVPGWGVGTPRPKQLAPFVIREPGASETWNFRSGWSGAPRSQVDTLTSQPQALGCPEPVGRTVDLFLIEGHFYPSRAQPPSSAASRVQSAAPARPGPAAHVYPAGSQVMMIPSQISYPASQGAYYIPGQGRSTYVVPTQQYPVQPGAPGFYPGASPTEFGTYAGAYYPAQGVQQFPTGVAPAPVLMNQPPQIAPKRERKTIRIRDPNQGGKDITEEIMSGARTASTPTPPQTGGGLEPQANGETPQVAVIVRPDDRSQGAIIADRPGLPGPEHSPSESQPSSPSPTPSPSPVLEPGSEPNLAVLSIPGDTMTTIQMSVEESTPISRETGEPYRLSPEPTPLAEPILEVEVTLSKPVPESEFSSSPLQAPTPLASHTVEIHEPNGMVPSEDLEPEVESSPELAPPPACPSESPVPIAPTAQPEELLNGAPSPPAVDLSPVSEPEEQAKEVTASVAPPTIPSATPATAPSATSPAQEEEMEEEEEEEEGEAGEAGEAESEKGGEELLPPESTPIPANLSQNLEAAAATQVAVSVPKRRRKIKELNKKEAVGDLLDAFKEANPAVPEVENQPPAGSNPGPESEGSGVPPRPEEADETWDSKEDKIHNAENIQPGEQKYEYKSDQWKPLNLEEKKRYDREFLLGFQFIFASMQKPEGLPHISDVVLDKANKTPLRPLDPTRLQGINCGPDFTPSFANLGRTTLSTRGPPRGGPGGELPRGPAGLGPRRSQQGPRKEPRKIIATVLMTEDIKLNKAEKAWKPSSKRTAADKDRGEEDADGSKTQDLFRRVRSILNKLTPQMFQQLMKQVTQLAIDTEERLKGVIDLIFEKAISEPNFSVAYANMCRCLMALKVPTTEKPTVTVNFRKLLLNRCQKEFEKDKDDDEVFEKKQNLIIHLCLS

SEQ ID NO: 757909 - protein, 760 aa, Homo sapiens
PVCPWARPEPGVPGWGVGTPRPKQLAPFVIREPGASETWNFRSGWSGAPRSQVDTLTSQPQALGCPEPVGRTVDLFLIEGHFYPSRAQPPSSAASRVQSAAPARPGPAAHVYPAGSQVMMIPSQISYPASQGAYYIPGQGRSTYVVPTQQYPVQPGAPGFYPGASPTEFGTYAGAYYPAQGVQQFPTGVAPAPVLMNQPPQIAPKRERKTIRIRDPNQGGKDITEEIMSGARTASTPTPPQTGGGLEPQANGETPQVAVIVRPDDRSQGAIIADRPGLPGPEHSPSESQPSSPSPTPSPSPVLEPGSEPNLAVLSIPGDTMTTIQMSVEESTPISRETGEPYRLSPEPTPLAEPILEVEVTLSKPVPESEFSSSPLQAPTPLASHTVEIHEPNGMVPSEDLEPEVESSPELAPPPACPSESPVPIAPTAQPEELLNGAPSPPAVDLSPVSEPEEQAKEVTASVAPPTIPSATPATAPSATSPAQEEEMEEEEEEEEGEAGEAGEAESEKGGEELLPPESTPIPANLSQNLEAAAATQVAVSVPKRRRKIKELNKKEAVGDLLDAFKEANPAVPEVENQPPAGSNPGPESEGSGVPPRPEEADETWDSKEDKIHNAENIQPGEQKYEYKSDQWKPLNLEEKKRYDREFLLGFQFIFASMQKPEGLPHISDVVLDKANKTPLRPLDPTRLQGINCGPDFTPSFANLGRTTLSTRGPPRGGPGGELPRGPAGLGPRRSQQGPRKEPRKIIATVLMTEDIKLTR

SEQ ID NO: 757910 - protein, 827 aa, Homo sapiens
PVCPWARPEPGVPGWGVGTPRPKQLAPFVIREPGASETWNFRSGWSGAPRSQVDTLTSQPQALGCPEPVGRTVDLFLIEGHFYPSRAQPPSSAASRVQSAAPARPGPAAHVYPAGSQVMMIPSQISYPASQGAYYIPGQGRSTYVVPTQQYPVQPGAPGFYPGASPTEFGTYAGAYYPAQGVQQFPTGVAPAPVLMNQPPQIAPKRERKTIRIRDPNQGGKDITEEIMSGARTASTPTPPQTGGGLEPQANGETPQVAVIVRPDDRSQGAIIADRPGLPGPEHSPSESQPSSPSPTPSPSPVLEPGSEPNLAVLSIPGDTMTTIQMSVEESTPISRETGEPYRLSPEPTPLAEPILEVEVTLSKPVPESEFSSSPLQAPTPLASHTVEIHEPNGMVPSEDLEPEVESSPELAPPPACPSESPVPIAPTAQPEELLNGAPSPPAVDLSPVSEPEEQAKEVTASVAPPTIPSATPATAPSATSPAQEEEMEEEEEEEEGEAGEAGEAESEKGGEELLPPESTPIPANLSQNLEAAAATQVAVSVPKRRRKIKELNKKEAVGDLLDAFKEANPAVPEVENQPPAGSNPGPESEGSGVPPRPEEADETWDSKEDKIHNAENIQPGEQKYEYKSDQWKPLNLEEKKRYDREFLLGFQFIFASMQKPEGLPHISDVVLDKANKTPLRPLDPTRLQGINCGPDFTPSFANLGRTASTPTPPQTGGGLEPQANGETPQVAVIVRPDDRSQGAIIADRPGLPGPEHSPSESQPSSPSPTPSPSPVLEPGSEPNLAVLSIPGDTMTTIQMSVEESTPISRETGGAISPLSRTHQPLG

SEQ ID NO: 757911 - protein, 645 aa, Homo sapiens
PVCPWARPEPGVPGWGVGTPRPKQLAPFVIREPGASETWNFRSGWSGAPRSQVDTLTSQPQALGCPEPVGRTVDLFLIEGHFYPSRAQPPSSAASRVQSAAPARPGPAAHVYPAGSQVMMIPSQISYPASQGAYYIPGQGRSTYVVPTQQYPVQPGAPGFYPGASPTEFGTYAGAYYPAQGVQQFPTGVAPAPVLMNQPPQIAPKRERKTIRIRDPNQGGKDITEEIMSGARTASTPTPPQTGGGLEPQANGETPQVAVIVRPDDRSQGAIIADRPGLPGPEHSPSESQPSSPSPTPSPSPVLEPGSEPNLAVLSIPGDTMTTIQMSVEESTPISRETGEPYRLSPEPTPLAEPILEVEVTLSKPVPESEFSSSPLQAPTPLASHTVEIHEPNGMVPSEDLEPEVESSPELAPPPACPSESPVPIAPTAQPEELLNGAPSPPAVDLSPVSEPEEQAKEVTASVAPPTIPSATPATAPSATSPAQEEEMEEEEEEEEGEAGEAGEAESEKGGEELLPPESTPIPANLSQNLEAAAATQVAVSVPKRRRKIKELNKKEAVGDLLDAFKEANPAVPEVENQPPAGSNPGPESEADVASLNRRIQLVEEELDRAQERLATALQKAEEAEKAADESERGMKVIENRAMKD

SEQ ID NO: 757912 - protein, 213 aa, Homo sapiens
MNKAPQSTGPPPAPSPGLPQPAFPPGQTAPVVFSTPQATQMNTPSQPRQHFYPSRAQPPSSAASRVQSAAPARPGPAAHVYPAGSQVMMIPSQISYPASQGAYYIPGQGRSTYVVPTQQYPVQPGAPGFYPGASPTEFGTYAGAYYPAQGVQQFPTGVAPAPVLMNQPPQIAPKRERKTIRIRDPELRKTRKLRGHVSHGHGRIGKHRKHPGG

SEQ ID NO: 757913 - protein, 114 aa, Homo sapiens
MNKAPQSTGPPPAPSPGLPQPAFPPGQTAPVVFSTPQATQMNTPSQPRQHFYPSRAQPPSSAASRVQSAAPARPGPAAHVYPAGSQVMMIPSQISYPASQGAYYIPGQGGARCL

SEQ ID NO: 757914 - protein, 71 aa, Homo sapiens
NPAVPEVENQPPAGSNPGPESEGSGVPPRPEEADETWDSKEDKIHNAENIQPGEQKYEYKSGMLKKGLRMA

SEQ ID NO: 757915 - protein, 1455 aa, Homo sapiens
ARFGSTYTKMERYREDYAWPLRKDDTQIREAVPYFIRIRDPNQGGKDITEEIMSGARTASTPTPPQTGGGLEPQANGETPQVAVIVRPDDRSQGAIIADRPGLPGPEHSPSESQPSSPSPTPSPSPVLEPGSEPNLAVLSIPGDTMTTIQMSVEESTPISRETGEPYRLSPEPTPLAEPILEVEVTLSKPVPESEFSSSPLQAPTPLASHTVEIHEPNGMVPSEDLEPEVESSPELAPPPACPSESPVPIAPTAQPEELLNGAPSPPAVDLSPVSEPEEQAKEVTASVAPPTIPSATPATAPSATSPAQEEEMEEEEEEEEGEAGEAGEAESEKGGEELLPPESTPIPANLSQNLEAAAATQVAVSVPKRRRKIKELNKKEAVGDLLDAFKEANPAVPEVENQPPAGSNPGPESEGSGVPPRPEEADETWDSKEDKIHNAENIQPGEQKYEYKSDQWKPLNLEEKKRYDREFLLGFQFIFASMQKPEGLPHISDVVLDKANKTPLRPLDPTRLQGINCGPDFTPSFANLGRTTLSTRGPPRGGPGGELPRGPAGLGPRRSQQGPRKEPRKIIATVLMTEDIKLNKAEKAWKPSSKRTAADKDRGEEDADGSKTQDLFRRVRSILNKLTPQMFQQLMKQVTQLAIDTEERLKGVIDLIFEKAISEPNFSVAYANMCRCLMALKVPTTEKPTVTVNFRKLLLNRCQKEFEKDKDDDEVFEKKQKEMDEAATAEERGRLKEELEEARDIARRRSLGNIKFIGELFKLKMLTEAIMHDCVVKLLKNHDEESLECLCRLLTTIGKDLDFEKAKPRMDQYFNQMEKIIKEKKTSSRIRFMLQDVLDLRGSNWVPRRGDQGPKTIDQIHKEAEMEEHREHIKVQQLMAKGSDKRRGGPPGPPISRGLPLVDDGGWNTVPISKGSRPIDTSRLTKITKPGSIDSNNQLFAPGGRLSWGKGSSGGSGAKPSDAASEAARPATSTLNRFSALQQAVPTESTDNRRVVQRSSLSRERGEKAGDRGDRLERSERGGDRGDRLDRARTPATKRSFSKEVEERSRERPSQPEGLRKAASLTEDRDRGRDAVKREAALPPVSPLKAALSEEELEKKSKAIIEEYLHLNDMKEAVQCVQELASPSLLFIFVRHGVESTLERSAIAREHMGQLLHQLLCAGHLSTAQYYQGLYEILELAEDMEIDIPHVWLYLAELVTPILQEGGVPMGELFREITKPLRPLGKAASLLLEILGLLCKSMGPKKVGTLWREAGLSWKEFLPEGQDIGAFVAEQKVEYTLGEESEAPGQRALPSEELNRQLEKLLKEGSSNQRVFDWIEANLSEQQIVSNTLVRALMTAVCYSAIIFETPLRVDVAVLKARAKLLQKYLCDEQKELQALYALQALVVTLEQPPNLLRMFFDALYDEDVVKEDAFYSWESSKDPAEQQGKGVALKSVTAFFKWLREAEEESDHN

SEQ ID NO: 757916 - protein, 1407 aa, Homo sapiens
RRVVGLFSANLVTLCVLQTGGGLEPQANGETPQVAVIVRPDDRSQGAIIADRPGLPGPEHSPSESQPSSPSPTPSPSPVLEPGSEPNLAVLSIPGDTMTTIQMSVEESTPISRETGEPYRLSPEPTPLAEPILEVEVTLSKPVPESEFSSSPLQAPTPLASHTVEIHEPNGMVPSEDLEPEVESSPELAPPPACPSESPVPIAPTAQPEELLNGAPSPPAVDLSPVSEPEEQAKEVTASVAPPTIPSATPATAPSATSPAQEEEMEEEEEEEEGEAGEAGEAESEKGGEELLPPESTPIPANLSQNLEAAAATQVAVSVPKRRRKIKELNKKEAVGDLLDAFKEANPAVPEVENQPPAGSNPGPESEGSGVPPRPEEADETWDSKEDKIHNAENIQPGEQKYEYKSDQWKPLNLEEKKRYDREFLLGFQFIFASMQKPEGLPHISDVVLDKANKTPLRPLDPTRLQGINCGPDFTPSFANLGRTTLSTRGPPRGGPGGELPRGPAGLGPRRSQQGPRKEPRKIIATVLMTEDIKLNKAEKAWKPSSKRTAADKDRGEEDADGSKTQDLFRRVRSILNKLTPQMFQQLMKQVTQLAIDTEERLKGVIDLIFEKAISEPNFSVAYANMCRCLMALKVPTTEKPTVTVNFRKLLLNRCQKEFEKDKDDDEVFEKKQKEMDEAATAEERGRLKEELEEARDIARRRSLGNIKFIGELFKLKMLTEAIMHDCVVKLLKNHDEESLECLCRLLTTIGKDLDFEKAKPRMDQYFNQMEKIIKEKKTSSRIRFMLQDVLDLRGSNWVPRRGDQGPKTIDQIHKEAEMEEHREHIKVQQLMAKGSDKRRGGPPGPPISRGLPLVDDGGWNTVPISKGSRPIDTSRLTKITKPGSIDSNNQLFAPGGRLSWGKGSSGGSGAKPSDAASEAARPATSTLNRFSALQQAVPTESTDNRRVVQRSSLSRERGEKAGDRGDRLERSERGGDRGDRLDRARTPATKRSFSKEVEERSRERPSQPEGLRKAASLTEDRDRGRDAVKREAALPPVSPLKAALSEEELEKKSKAIIEEYLHLNDMKEAVQCVQELASPSLLFIFVRHGVESTLERSAIAREHMGQLLHQLLCAGHLSTAQYYQGLYEILELAEDMEIDIPHVWLYLAELVTPILQEGGVPMGELFREITKPLRPLGKAASLLLEILGLLCKSMGPKKVGTLWREAGLSWKEFLPEGQDIGAFVAEQKVEYTLGEESEAPGQRALPSEELNRQLEKLLKEGSSNQRVFDWIEANLSEQQIVSNTLVRALMTAVCYSAIIFETPLRVDVAVLKARAKLLQKYLCDEQKELQALYALQALVVTLEQPPNLLRMFFDALYDEDVVKEDAFYSWESSKDPAEQQGKGVALKSVTAFFKWLREAEEESDHN

SEQ ID NO: 757917 - protein, 1236 aa, Homo sapiens
MVPSEDLEPEVESSPELAPPPACPSESPVPIAPTAQPEELLNGAPSPPAVDLSPVSEPEEQAKEVTASVAPPTIPSATPATAPSATSPAQEEEMEEEEEEEEGEAGEAGEAESEKGGEELLPPESTPIPANLSQNLEAAAATQVAVSVPKRRRKIKELNKKEAVGDLLDAFKEANPAVPEVENQPPAGSNPGPESEGSGVPPRPEEADETWDSKEDKIHNAENIQPGEQKYEYKSDQWKPLNLEEKKRYDREFLLGFQFIFASMQKPEGLPHISDVVLDKANKTPLRPLDPTRLQGINCGPDFTPSFANLGRTTLSTRGPPRGGPGGELPRGPAGLGPRRSQQGPRKEPRKIIATVLMTEDIKLNKAEKAWKPSSKRTAADKDRGEEDADGSKTQDLFRRVRSILNKLTPQMFQQLMKQVTQLAIDTEERLKGVIDLIFEKAISEPNFSVAYANMCRCLMALKVPTTEKPTVTVNFRKLLLNRCQKEFEKDKDDDEVFEKKQKEMDEAATAEERGRLKEELEEARDIARRRSLGNIKFIGELFKLKMLTEAIMHDCVVKLLKNHDEESLECLCRLLTTIGKDLDFEKAKPRMDQYFNQMEKIIKEKKTSSRIRFMLQDVLDLRGSNWVPRRGDQGPKTIDQIHKEAEMEEHREHIKVQQLMAKGSDKRRGGPPGPPISRGLPLVDDGGWNTVPISKGSRPIDTSRLTKITKPGSIDSNNQLFAPGGRLSWGKGSSGGSGAKPSDAASEAARPATSTLNRFSALQQAVPTESTDNRRVVQRSSLSRERGEKAGDRGDRLERSERGGDRGDRLDRARTPATKRSFSKEVEERSRERPSQPEGLRKAASLTEDRDRGRDAVKREAALPPVSPLKAALSEEELEKKSKAIIEEYLHLNDMKEAVQCVQELASPSLLFIFVRHGVESTLERSAIAREHMGQLLHQLLCAGHLSTAQYYQGLYEILELAEDMEIDIPHVWLYLAELVTPILQEGGVPMGELFREITKPLRPLGKAASLLLEILGLLCKSMGPKKVGTLWREAGLSWKEFLPEGQDIGAFVAEQKVEYTLGEESEAPGQRALPSEELNRQLEKLLKEGSSNQRVFDWIEANLSEQQIVSNTLVRALMTAVCYSAIIFETPLRVDVAVLKARAKLLQKYLCDEQKELQALYALQALVVTLEQPPNLLRMFFDALYDEDVVKEDAFYSWESSKDPAEQQGKGVALKSVTAFFKWLREAEEESDHN

SEQ ID NO: 757918 - protein, 1184 aa, Homo sapiens
MRARTNVLDTICCSLRLAPPTIPSATPATAPSATSPAQEEEMEEEEEEEEGEAGEAGEAESEKGGEELLPPESTPIPANLSQNLEAAAATQVAVSVPKRRRKIKELNKKEAVGDLLDAFKEANPAVPEVENQPPAGSNPGPESEGSGVPPRPEEADETWDSKEDKIHNAENIQPGEQKYEYKSDQWKPLNLEEKKRYDREFLLGFQFIFASMQKPEGLPHISDVVLDKANKTPLRPLDPTRLQGINCGPDFTPSFANLGRTTLSTRGPPRGGPGGELPRGPAGLGPRRSQQGPRKEPRKIIATVLMTEDIKLNKAEKAWKPSSKRTAADKDRGEEDADGSKTQDLFRRVRSILNKLTPQMFQQLMKQVTQLAIDTEERLKGVIDLIFEKAISEPNFSVAYANMCRCLMALKVPTTEKPTVTVNFRKLLLNRCQKEFEKDKDDDEVFEKKQKEMDEAATAEERGRLKEELEEARDIARRRSLGNIKFIGELFKLKMLTEAIMHDCVVKLLKNHDEESLECLCRLLTTIGKDLDFEKAKPRMDQYFNQMEKIIKEKKTSSRIRFMLQDVLDLRGSNWVPRRGDQGPKTIDQIHKEAEMEEHREHIKVQQLMAKGSDKRRGGPPGPPISRGLPLVDDGGWNTVPISKGSRPIDTSRLTKITKPGSIDSNNQLFAPGGRLSWGKGSSGGSGAKPSDAASEAARPATSTLNRFSALQQAVPTESTDNRRVVQRSSLSRERGEKAGDRGDRLERSERGGDRGDRLDRARTPATKRSFSKEVEERSRERPSQPEGLRKAASLTEDRDRGRDAVKREAALPPVSPLKAALSEEELEKKSKAIIEEYLHLNDMKEAVQCVQELASPSLLFIFVRHGVESTLERSAIAREHMGQLLHQLLCAGHLSTAQYYQGLYEILELAEDMEIDIPHVWLYLAELVTPILQEGGVPMGELFREITKPLRPLGKAASLLLEILGLLCKSMGPKKVGTLWREAGLSWKEFLPEGQDIGAFVAEQKVEYTLGEESEAPGQRALPSEELNRQLEKLLKEGSSNQRVFDWIEANLSEQQIVSNTLVRALMTAVCYSAIIFETPLRVDVAVLKARAKLLQKYLCDEQKELQALYALQALVVTLEQPPNLLRMFFDALYDEDVVKEDAFYSWESSKDPAEQQGKGVALKSVTAFFKWLREAEEESDHN

SEQ ID NO: 757919 - protein, 1068 aa, Homo sapiens
LTCRRLDFPPLVLPGSPPAGSNPGPESEGSGVPPRPEEADETWDSKEDKIHNAENIQPGEQKYEYKSDQWKPLNLEEKKRYDREFLLGFQFIFASMQKPEGLPHISDVVLDKANKTPLRPLDPTRLQGINCGPDFTPSFANLGRTTLSTRGPPRGGPGGELPRGPAGLGPRRSQQGPRKEPRKIIATVLMTEDIKLNKAEKAWKPSSKRTAADKDRGEEDADGSKTQDLFRRVRSILNKLTPQMFQQLMKQVTQLAIDTEERLKGVIDLIFEKAISEPNFSVAYANMCRCLMALKVPTTEKPTVTVNFRKLLLNRCQKEFEKDKDDDEVFEKKQKEMDEAATAEERGRLKEELEEARDIARRRSLGNIKFIGELFKLKMLTEAIMHDCVVKLLKNHDEESLECLCRLLTTIGKDLDFEKAKPRMDQYFNQMEKIIKEKKTSSRIRFMLQDVLDLRGSNWVPRRGDQGPKTIDQIHKEAEMEEHREHIKVQQLMAKGSDKRRGGPPGPPISRGLPLVDDGGWNTVPISKGSRPIDTSRLTKITKPGSIDSNNQLFAPGGRLSWGKGSSGGSGAKPSDAASEAARPATSTLNRFSALQQAVPTESTDNRRVVQRSSLSRERGEKAGDRGDRLERSERGGDRGDRLDRARTPATKRSFSKEVEERSRERPSQPEGLRKAASLTEDRDRGRDAVKREAALPPVSPLKAALSEEELEKKSKAIIEEYLHLNDMKEAVQCVQELASPSLLFIFVRHGVESTLERSAIAREHMGQLLHQLLCAGHLSTAQYYQGLYEILELAEDMEIDIPHVWLYLAELVTPILQEGGVPMGELFREITKPLRPLGKAASLLLEILGLLCKSMGPKKVGTLWREAGLSWKEFLPEGQDIGAFVAEQKVEYTLGEESEAPGQRALPSEELNRQLEKLLKEGSSNQRVFDWIEANLSEQQIVSNTLVRALMTAVCYSAIIFETPLRVDVAVLKARAKLLQKYLCDEQKELQALYALQALVVTLEQPPNLLRMFFDALYDEDVVKEDAFYSWESSKDPAEQQGKGVALKSVTAFFKWLREAEEESDHN

SEQ ID NO: 757920 - protein, 1522 aa, Homo sapiens
MMIPSQISYPASQGAYYIPGQGRSTYVVPTQQYPVQPGAPGFYPGASPTEFGTYAGAYYPAQGVQQFPTGVAPAPVLMNQPPQIAPKRERKTIRIRDPNQGGKDITEEIMSGARTASTPTPPQTGGGLEPQANGETPQVAVIVRPDDRSQGAIIADRPGLPGPEHSPSESQPSSPSPTPSPSPVLEPGSEPNLAVLSIPGDTMTTIQMSVEESTPISRETGEPYRLSPEPTPLAEPILEVEVTLSKPVPESEFSSSPLQAPTPLASHTVEIHEPNGMVPSEDLEPEVESSPELAPPPACPSESPVPIAPTAQPEELLNGAPSPPAVDLSPVSEPEEQAKEVTASVAPPTIPSATPATAPSATSPAQEEEMEEEEEEEEGEAGEAGEAESEKGGEELLPPESTPIPANLSQNLEAAAATQVAVSVPKRRRKIKELNKKEAVGDLLDAFKEANPAVPEVENQPPAGSNPGPESEGSGVPPRPEEADETWDSKEDKIHNAENIQPGEQKYEYKSDQWKPLNLEEKKRYDREFLLGFQFIFASMQKPEGLPHISDVVLDKANKTPLRPLDPTRLQGINCGPDFTPSFANLGRTTLSTRGPPRGGPGGELPRGPAGLGPRRSQQGPRKEPRKIIATVLMTEDIKLNKAEKAWKPSSKRTAADKDRGEEDADGSKTQDLFRRVRSILNKLTPQMFQQLMKQVTQLAIDTEERLKGVIDLIFEKAISEPNFSVAYANMCRCLMALKVPTTEKPTVTVNFRKLLLNRCQKEFEKDKDDDEVFEKKQKEMDEAATAEERGRLKEELEEARDIARRRSLGNIKFIGELFKLKMLTEAIMHDCVVKLLKNHDEESLECLCRLLTTIGKDLDFEKAKPRMDQYFNQMEKIIKEKKTSSRIRFMLQDVLDLRGSNWVPRRGDQGPKTIDQIHKEAEMEEHREHIKVQQLMAKGSDKRRGGPPGPPISRGLPLVDDGGWNTVPISKGSRPIDTSRLTKITKPGSIDSNNQLFAPGGRLSWGKGSSGGSGAKPSDAASEAARPATSTLNRFSALQQAVPTESTDNRRVVQRSSLSRERGEKAGDRGDRLERSERGGDRGDRLDRARTPATKRSFSKEVEERSRERPSQPEGLRKAASLTEDRDRGRDAVKREAALPPVSPLKAALSEEELEKKSKAIIEEYLHLNDMKEAVQCVQELASPSLLFIFVRHGVESTLERSAIAREHMGQLLHQLLCAGHLSTAQYYQGLYEILELAEDMEIDIPHVWLYLAELVTPILQEGGVPMGELFREITKPLRPLGKAASLLLEILGLLCKSMGPKKVGTLWREAGLSWKEFLPEGQDIGAFVAEQKVEYTLGEESEAPGQRALPSEELNRQLEKLLKEGSSNQRVFDWIENLGIICFSHTANLSEQQIVSNTLVRALMTAVCYSAIIFETPLRVDVAVLKARAKLLQKYLCDEQKELQALYALQALVVTLEQPPNLLRMFFDALYDEDVVKEDAFYSWESSKDPAEQQGKGVALKSVTAFFKWLREAEEESDHN

SEQ ID NO: 757921 - protein, 842 aa, Homo sapiens
FFPFNGLFSILNKLTPQMFQQLMKQVTQLAIDTEERLKGVIDLIFEKAISEPNFSVAYANMCRCLMALKVPTTEKPTVTVNFRKLLLNRCQKEFEKDKDDDEVFEKKQKEMDEAATAEERGRLKEELEEARDIARRRSLGNIKFIGELFKLKMLTEAIMHDCVVKLLKNHDEESLECLCRLLTTIGKDLDFEKAKPRMDQYFNQMEKIIKEKKTSSRIRFMLQDVLDLRGSNWVPRRGDQGPKTIDQIHKEAEMEEHREHIKVQQLMAKGSDKRRGGPPGPPISRGLPLVDDGGWNTVPISKGSRPIDTSRLTKITKPGSIDSNNQLFAPGGRLSWGKGSSGGSGAKPSDAASEAARPATSTLNRFSALQQAVPTESTDNRRVVQRSSLSRERGEKAGDRGDRLERSERGGDRGDRLDRARTPATKRSFSKEVEERSRERPSQPEGLRKAASLTEDRDRGRDAVKREAALPPVSPLKAALSEEELEKKSKAIIEEYLHLNDMKEAVQCVQELASPSLLFIFVRHGVESTLERSAIAREHMGQLLHQLLCAGHLSTAQYYQGLYEILELAEDMEIDIPHVWLYLAELVTPILQEGGVPMGELFREITKPLRPLGKAASLLLEILGLLCKSMGPKKVGTLWREAGLSWKEFLPEGQDIGAFVAEQKVEYTLGEESEAPGQRALPSEELNRQLEKLLKEGSSNQRVFDWIEANLSEQQIVSNTLVRALMTAVCYSAIIFETPLRVDVAVLKARAKLLQKYLCDEQKELQALYALQALVVTLEQPPNLLRMFFDALYDEDVVKEDAFYSWESSKDPAEQQGKGVALKSVTAFFKWLREAEEESDHN

SEQ ID NO: 757922 - protein, 816 aa, Homo sapiens
RPLQHQKWPSQKWVIDLIFEKAISEPNFSVAYANMCRCLMALKVPTTEKPTVTVNFRKLLLNRCQKEFEKDKDDDEVFEKKQKEMDEAATAEERGRLKEELEEARDIARRRSLGNIKFIGELFKLKMLTEAIMHDCVVKLLKNHDEESLECLCRLLTTIGKDLDFEKAKPRMDQYFNQMEKIIKEKKTSSRIRFMLQDVLDLRGSNWVPRRGDQGPKTIDQIHKEAEMEEHREHIKVQQLMAKGSDKRRGGPPGPPISRGLPLVDDGGWNTVPISKGSRPIDTSRLTKITKPGSIDSNNQLFAPGGRLSWGKGSSGGSGAKPSDAASEAARPATSTLNRFSALQQAVPTESTDNRRVVQRSSLSRERGEKAGDRGDRLERSERGGDRGDRLDRARTPATKRSFSKEVEERSRERPSQPEGLRKAASLTEDRDRGRDAVKREAALPPVSPLKAALSEEELEKKSKAIIEEYLHLNDMKEAVQCVQELASPSLLFIFVRHGVESTLERSAIAREHMGQLLHQLLCAGHLSTAQYYQGLYEILELAEDMEIDIPHVWLYLAELVTPILQEGGVPMGELFREITKPLRPLGKAASLLLEILGLLCKSMGPKKVGTLWREAGLSWKEFLPEGQDIGAFVAEQKVEYTLGEESEAPGQRALPSEELNRQLEKLLKEGSSNQRVFDWIEANLSEQQIVSNTLVRALMTAVCYSAIIFETPLRVDVAVLKARAKLLQKYLCDEQKELQALYALQALVVTLEQPPNLLRMFFDALYDEDVVKEDAFYSWESSKDPAEQQGKGVALKSVTAFFKWLREAEEESDHN

SEQ ID NO: 757923 - protein, 1426 aa, Homo sapiens
MMIPSQISYPASQGAYYIPGQGRSTYVVPTQQYPVQPGAPGFYPGASPTEFGTYAGAYYPAQGVQQFPTGVAPAPVLMNQPPQIAPKRERKTIRIRDPNQGGKDITEEIMSGARTASTPTPPQTGGGLEPQANGETPQVAVIVRPDDRSQGAIIADRPGLPGPEHSPSESQPSSPSPTPSPSPVLEPGSEPNLAVLSIPGDTMTTIQMSVEESTPISRETGEPYRLSPEPTPLAEPILEVEVTLSKPVPESEFSSSPLQAPTPLASHTVEIHEPNGMVPSEDLEPEVESSPELAPPPACPSESPVPIAPTAQPEELLNGAPSPPAVDLSPVSEPEEQAKEVTASVAPPTIPSATPATAPSATSPAQEEEMEEEEEEEEGEAGEAGEAESEKGGEELLPPESTPIPANLSQNLEAAAATQVAVSVPKRRRKIKELNKKEAVGDLLDAFKEANPAVPEVENQPPAGSNPGPESEGSGVPPRPEEADETWDSKEDKIHNAENIQPGEQKYEYKSDQWKPLNLEEKKRYDREFLLGFQFIFASMQKPEGLPHISDVVLDKANKTPLRPLDPTRLQGINCGPDFTPSFANLGRTTLSTRGPPRGGPGGELPRGPAGLGPRRSQQGPRKEPRKIIATVLMTEDIKLNKAEKAWKPSSKRTAADKDRGEEDADGSKTQDLFRRVRSILNKLTPQMFQQLMKQVTQLAIDTEERLKGVIDLIFEKAISEPNFSVAYANMCRCLMALKVPTTEKPTVTVNFRKLLLNRCQKEFEKDKDDDEVFEKKQKEMDEAATAEERGRLKEELEEARDIARRRSLGNIKFIGELFKLKMLTEAIMHDCVVKLLKNHDEESLECLCRLLTTIGKDLDFEKAKPRMDQYFNQMEKIIKEKKTSSRIRFMLQDVLDLRGSNWVPRRGDQGPKTIDQIHKEAEMEEHREHIKVQQLMAKGSDKRRGGPPGPPISRGLPLVDDGGWNTVPISKGSRPIDTSRLTKITKPGSIDSNNQLFAPGGRLSWGKGSSGGSGAKPSDAASEAARPATSTLNRFSALQQAVPTESTDNRRVVQRSSLSRERGEKAGDRGDRLERSERGGDRGDRLDRARTPATKRSFSKEVEERSRERPSQPEGLRKAASLTEDRDRGRDAVKREAALPPVSPLKAALSEEELEKKSKAIIEEYLHLNDMKEAVQCVQELASPSLLFIFVRHGVESTLERSAIAREHMGQLLHQLLCAGHLSTAQYYQGLYEILELAEDMEIDIPHVWLYLAELVTPILQEGGVPMGELFREITKPLRPLGKAASLLLEIANLSEQQIVSNTLVRALMTAVCYSAIIFETPLRVDVAVLKARAKLLQKYLCDEQKELQALYALQALVVTLEQPPNLLRMFFDALYDEDVVKEDAFYSWESSKDPAEQQGKGVALKSVTAFFKWLREAEEESDHN

SEQ ID NO: 757924 - protein, 1512 aa, Homo sapiens [sequence omitted]

SEQ ID NO: 757925 - protein, 772 aa, Homo sapiens
VRYSRGPVTVNFRKLLLNRCQKEFEKDKDDDEVFEKKQKEMDEAATAEERGRLKEELEEARDIARRRSLGNIKFIGELFKLKMLTEAIMHDCVVKLLKNHDEESLECLCRLLTTIGKDLDFEKAKPRMDQYFNQMEKIIKEKKTSSRIRFMLQDVLDLRGSNWVPRRGDQGPKTIDQIHKEAEMEEHREHIKVQQLMAKGSDKRRGGPPGPPISRGLPLVDDGGWNTVPISKGSRPIDTSRLTKITKPGSIDSNNQLFAPGGRLSWGKGSSGGSGAKPSDAASEAARPATSTLNRFSALQQAVPTESTDNRRVVQRSSLSRERGEKAGDRGDRLERSERGGDRGDRLDRARTPATKRSFSKEVEERSRERPSQPEGLRKAASLTEDRDRGRDAVKREAALPPVSPLKAALSEEELEKKSKAIIEEYLHLNDMKEAVQCVQELASPSLLFIFVRHGVESTLERSAIAREHMGQLLHQLLCAGHLSTAQYYQGLYEILELAEDMEIDIPHVWLYLAELVTPILQEGGVPMGELFREITKPLRPLGKAASLLLEILGLLCKSMGPKKVGTLWREAGLSWKEFLPEGQDIGAFVAEQKVEYTLGEESEAPGQRALPSEELNRQLEKLLKEGSSNQRVFDWIEANLSEQQIVSNTLVRALMTAVCYSAIIFETPLRVDVAVLKARAKLLQKYLCDEQKELQALYALQALVVTLEQPPNLLRMFFDALYDEDVVKEDAFYSWESSKDPAEQQGKGVALKSVTAFFKWLREAEEESDHN

SEQ ID NO: 757926 - protein, 1512 aa, Homo sapiens [sequence omitted]

SEQ ID NO: 757927 - protein, 645 aa, Homo sapiens
MDQYFNQMEKIIKEKKTSSRIRFMLQDVLDLRGSNWVPRRGDQGPKTIDQIHKEAEMEEHREHIKVQQLMAKGSDKRRGGPPGPPISRGLPLVDDGGWNTVPISKGSRPIDTSRLTKITKPGSIDSNNQLFAPGGRLSWGKGSSGGSGAKPSDAASEAARPATSTLNRFSALQQAVPTESTDNRRVVQRSSLSRERGEKAGDRGDRLERSERGGDRGDRLDRARTPATKRSFSKEVEERSRERPSQPEGLRKAASLTEDRDRGRDAVKREAALPPVSPLKAALSEEELEKKSKAIIEEYLHLNDMKEAVQCVQELASPSLLFIFVRHGVESTLERSAIAREHMGQLLHQLLCAGHLSTAQYYQGLYEILELAEDMEIDIPHVWLYLAELVTPILQEGGVPMGELFREITKPLRPLGKAASLLLEILGLLCKSMGPKKVGTLWREAGLSWKEFLPEGQDIGAFVAEQKVEYTLGEESEAPGQRALPSEELNRQLEKLLKEGSSNQRVFDWIEANLSEQQIVSNTLVRALMTAVCYSAIIFETPLRVDVAVLKARAKLLQKYLCDEQKELQALYALQALVVTLEQPPNLLRMFFDALYDEDVVKEDAFYSWESSKDPAEQQGKGVALKSVTAFFKWLREAEEESDHN

SEQ ID NO: 757928 - protein, 80 aa, Homo sapiens
RLQSAQLKSWLCCGLSGGPGPSPAPVSSFCPMRKLGSGVPEAPVHSACLDGEALLVWQRGGCSGICISPANLEDEESSQE

SEQ ID NO: 757929 - protein, 90 aa, Homo sapiens
ASASQSAGITAVIHRARLSQKLLTGIPEAPTWAHIGWASISSPTTSCWWPQPSPFPSRSGLLWGAGPFTALAQETDPKSEASLGTPFCTQ

SEQ ID NO: 757930 - protein, 105 aa, Homo sapiens
EVLIAAVMVSLLNCVVTVSPQNMGIGKNEDLPWPPLRNEFRYFQRVTTTSSVEGKQNLVIMGRKIWFSIPEKNRPLKNRINLVLRRDHKNLHKEINFLQEVWMMP

SEQ ID NO: 757931 - protein, 841 aa, Homo sapiens
MSAQSLPAATPPTQKPPRIIRPRPPSRSRAAQSPGPPHNGSSPQELPRNSNDAPTPMCTPIFWEPPAASLKPPALLPPSASRASLDSQTSPDSPSSTPTPSPVSRRSASPEPAPRSPVPPPKPSGSPCTPLLPMAGVLAQNGSASAPGTVRRLAGRFEGGAEGRAQDADAPEPGLQARADVNGEREAPLTGSGSQENGAPDAGLACPPCCPCVCHTTRPGLELRWVPVGGYEEVPRVPRRASPLRTSRSRPHPPSIGHPAVVLTSYRSTAERKLLPLLKPPKPTRVRQDATIFGDPPQPDLDLLSEDGIQTGDSPDEAPQNTPPATVEGREEEGLEVLKEQNWELPLQDEPLYQTYRAAVLSEELWGVGEDGSPSPANAGDAPTFPRPPGPRNTLWQELPAVQASGLLDTLSPQERRMQESLFEVVTSEASYLRSLRLLTDTFVLSQALRDTLTPRDHHTLFSNVQRVQGVSERFLATLLSRVRSSPHISDLCDVVHAHAVGPFSVYVDYVRNQQYQEETYSRLMDTNVRFSAELRRLQSLPKCERLPLPSFLLLPFQRITRLRMLLQNILRQTEEGSSRQENAQKALGAVSKIIERCSAEVGRMKQTEELIRLTQRLRFHKVKALPLVSWSRRLEFQGELTELGCRRGGVLFASRPRFTPLCLLLFSDLLLITQPKSGQRLQVLDYAHRSLVQAQQVPDPSGPPTFRLSLLSNHQGRPTHRLLQASSLSDMQRWLGAFPTPGPLPCSPDTIYEDCDCSQELCSESSAPAKTEGRSLESRAAPKHLHKTPEGWLKGLPGAFPAQLVCEVTGEHERRRHLRQNQRLLEAVGPSSGTPNAPPP

SEQ ID NO: 757932 - protein, 234 aa, Homo sapiens
MSAQSLPAATPPTQKPPRIIRPRPPSRSRAAQSPGPPHNGSSPQELPRNSNDAPTPMCTPIFWEPPAASLKPPALLPPSASRASLDSQTSPDSPSSTPTPSPVSRRSASPEPAPRSPVPPPKPSGSPCTPLLPMAGVLAQNGSASAPGTVRRLAGRFEGGAEGRAQDADAPEPGLQARADVNGEREAPLTGSGSQENGAPGECGGWGALGDLNPPIFSVFSANNFQGLPFQKWS

SEQ ID NO: 757933 - protein, 98 aa, Homo sapiens
QKKIKICASPLRTSRSRPHPPSIGHPAVVLTSYRSTAERKLLPLLKPPKPTRVRQDATIFGDPPQPDLDLLSEDGIQTGDSPDEAPQNTPPATVEGRY

SEQ ID NO: 757934 - protein, 127 aa, Homo sapiens
VQRDPCCPSERPHPWAVGSGYRFWTMPIAPWSRPSRFRIHLDPLPSASPFSATTRAAPPTDYSKLLPCELCFPQKTTLGHLSDLSDLPHFPSLSLLWLLPQPQRIFWANCDTSYIYANILLLKFVFQ

SEQ ID NO: 757935 - protein, 981 aa, Homo sapiens
MSAQSLPAATPPTQKPPRIIRPRPPSRSRAAQSPGPPHNGSSPQELPRNSNDAPTPMCTPIFWEPPAASLKPPALLPPSASRASLDSQTSPDSPSSTPTPSPVSRRSASPEPAPRSPVPPPKPSGSPCTPLLPMAGVLAQNGSASAPGTVRRLAGRFEGGAEGRAQDADAPEPGLQARADVNGEREAPLTGSGSQENGAPGECGGWGALGDLNPPIFSVFSANNFQGLPFQKWSQCLGYLVSVCRDLKGVRVEEIYRCLDLDIAVAGQVKDGDGLGGGGAGPQGLSPYGYLSPTDAGLACPPCCPCVCHTTRPGLELRWVPVGGYEEVPRVPRRASPLRTSRSRPHPPSIGHPAVVLTSYRSTAERKLLPLLKPPKPTRVRQDATIFGDPPQPDLDLLSEDGIQTGDSPDEAPQNTPPATVEGREEEGLEVLKEQNWELPLQDEPLYQTYRAAVLSEELWGVGEDGSPSPANAGDAPTFPRPPGPRNTLWQELPAVQASGLLDTLSPQERRMQESLFEVVTSEASYLRSLRLLTDTFVLSQALRDTLTPRDHHTLFSNVQRVQGVSERFLATLLSRVRSSPHISDLCDVVHAHAVGPFSVYVDYVRNQQYQEETYSRLMDTNVRFSAELRRLQSLPKCERLPLPSFLLLPFQRITRLRMLLQNILRQTEEGSSRQENAQKALGAVSKIIERCSAEVGRMKQTEELIRLTQRLRFHKVKALPLVSWSRRLEFQGELTELGCRRGGVLFASRPRFTPLCLLLFSDLLLITQPKSGQRLQVLDYAHRSLVQAQQVPDPSGPPTFRLSLLSNHQGRPTHRLLQASSRELCFPQKTTLGHLSDLSDLPHFPSLSLLWLLPQPQRIFWANCDTSLSDMQRWLGAFPTPGPLPCSPDTIYEDCDCSQELCSESSAPAKTEGRSLESRAAPKHLHKTPEGWLKGLPGAFPAQLVCEVTGEHERRRHLRQNQRLLEAVGPSSGTPNAPPP

SEQ ID NO: 757936 - protein, 981 aa, Homo sapiens; identical to SEQ ID NO: 757935

SEQ ID NO: 757937 - protein, 331 aa, Homo sapiens
METRGTERAGGGDRTRDHDPMQEGDDTPCRQQQTSGPRPHRDGTTASAAAAEEGQRNVTRALTTCSAAPARQARQPPQRNDPGRRYRRARRPHPTQRGSTGAPHLEPNPRQATYTNDHRARRPRDRHADPDHPDQPSPTATDLNRHVADPPDTTPARQTPHHTSTTERMSTKPCHTKTRHTSKTKTTGVSCTRQQISDNAYDKHDGQEPETAARKLVTIGPEHEAERRTHRHKQQKALRRRRAEVTRHRASDNAAHNDHQRTTEPDTHKPTNRQNERQTQTDDDSSAHAKRQDGDNTRHRDAPETREADRGSKSDKPTQHRATGDKRPKQR

SEQ ID NO: 757938 - protein, 163 aa, Homo sapiens
VALGTSFPFFLHREEEGLEVLKEQNWELPLQDEPLYQTYRAAVLSEELWGVGEDGSPSPANAGDAPTFPRPPGPRNTLWQELPAVQASGLLDTLSPQERRMQESLFEVVTSEASYLRSLRLLTDTFVLSQALRDTLTPRDHHTLFSNVQRVQGVSERSVAFRP

SEQ ID NO: 757939 - protein, 981 aa, Homo sapiens; identical to SEQ ID NO: 757935

SEQ ID NO: 757940 - protein, 981 aa, Homo sapiens; identical to SEQ ID NO: 757935

SEQ ID NO: 757941 - protein, 1268 aa, Homo sapiens
MSAPAGSSHPAASARIPPKFGGSAVSGAAAPAGPGAGPAPHQQNGPAQNQMQVPSGYGLHHQNYIAPSGHYSQGPGKMTSLPLDTQCGDYYSALYTVPTQNVTPNTVNQQPGAQQLYSRGPPAPHIVGSTLGSFQGAASSASHLHTSASQPYSSFVNHYNSPAMYSASSSVASQGFPSTCGHYAMSTVSNAAYPSVSYPSLPAGDTYGQMFTSQNAPTVRPVKDNSFSGQNTAISHPSPLPPLPSQQHHQQQSLSGYSTLTWSSPGLPSTQDNLIRNHTGSLAVANNNPTITVADSLSCPVMQNVQPPKSSPVVSTVLSGSSGSSSTRTPPTANHPVEPVTSVTQPSELLQQKGVQYGEYVNNQASSAPTPLSSTSDDEEEEEEDEEAGVDSSSTTSSASPMPNSYDALEGGSYPDMLSSSASSPAPDPAPEPDPASAPAPASAPAPVVPQPSKMAKPFGYGYPTLQPGYQNATAPLISGVQPSNPVYSGFQQYPQQYPGVNQLSSSIGGLSLQSSPQPESLRPVNLTQERNILPMTPVWAPVPNLNADLKKLNCSPDSFRCTLTNIPQTQALLNKAKLPLGLLLHPFRDLTQLPVITSNTIVRCRSCRTYINPFVSFIDQRRWKCNLCYRVNDVPEEFMYNPLTRSYGEPHKRPEVQNSTVEFIASSDYMLRPPQPAVYLFVLDVSHNAVEAGYLTILCQSLLENLDKLPGDSRTRIGFMTFDSTIHFYNLQEGLSQPQMLIVSDIDDVFLPTPDSLLVNLYESKELIKDLLNALPNMFTNTRETHSALGPALQAAFKLMSPTGGRVSVFQTQLPSLGAGLLQSREDPNQRSSTKVVQHLGPATDFYKKLALDCSGQQTAVDLFLLSSQYSDLASLACMSKYSAGCIYYYPSFHYTHNPSQAEKLQKDLKRYLTRKIGFEAVMRIRCTKGLSMHTFHGNFFVRSTDLLSLANINPDAGFAVQLSIEESLTDTSLVCFQTALLYTSSKGERRIRVHTLCLPVVSSLADVYAGVDVQAAICLLANMAVDRSVSSSLSDARDALVNAVVDSLSAYGSTVSNLQHSALMAPSSLKLFPLYVLALLKQKAFRTGTSTRLDDRVYAMCQIKSQPLVHLMKMIHPNLYRIDRLTDEGAVHVNDRIVPQPPLQKLSAEKLTREGAFLMDCGSVFYIWVGKGCDNNFIEDVLGYTNFASIPQKMTHLPELDTLSSERARSFITWLRDSRPLSPILHIVKDESPAKAEFFQHLIEDRTEAAFSYYEFLLHVQQQICK

SEQ ID NO: 757942 - protein, 930 aa, Homo sapiens
HRYLFEPAEQSYYNKSVQYGEYVNNQASSAPTPLSSTSDDEEEEEEDEEAGVDSSSTTSSASPMPNSYDALEGGSYPDMLSSSASSPAPDPAPEPDPASAPAPASAPAPVVPQPSKMAKPFGYGYPTLQPGYQNATAPLISGVQPSNPVYSGFQQYPQQYPGVNQLSSSIGGLSLQSSPQPESLRPVNLTQERNILPMTPVWAPVPNLNADLKKLNCSPDSFRCTLTNIPQTQALLNKAKLPLGLLLHPFRDLTQLPVITSNTIVRCRSCRTYINPFVSFIDQRRWKCNLCYRVNDVPEEFMYNPLTRSYGEPHKRPEVQNSTVEFIASSDYMLRPPQPAVYLFVLDVSHNAVEAGYLTILCQSLLENLDKLPGDSRTRIGFMTFDSTIHFYNLQEGLSQPQMLIVSDIDDVFLPTPDSLLVNLYESKELIKDLLNALPNMFTNTRETHSALGPALQAAFKLMSPTGGRVSVFQTQLPSLGAGLLQSREDPNQRSSTKVVQHLGPATDFYKKLALDCSGQQTAVDLFLLSSQYSDLASLACMSKYSAGCIYYYPSFHYTHNPSQAEKLQKDLKRYLTRKIGFEAVMRIRCTKGLSMHTFHGNFFVRSTDLLSLANINPDAGFAVQLSIEESLTDTSLVCFQTALLYTSSKGERRIRVHTLCLPVVSSLADVYAGVDVQAAICLLANMAVDRSVSSSLSDARDALVNAVVDSLSAYGSTVSNLQHSALMAPSSLKLFPLYVLALLKQKAFRTGTSTRLDDRVYAMCQIKSQPLVHLMKMIHPNLYRIDRLTDEGAVHVNDRIVPQPPLQKLSAEKLTREGAFLMDCGSVFYIWVGKGCDNNFIEDVLGYTNFASIPQKMTHLPELDTLSSERARSFITWLRDSRPLSPILHIVKDESPAKAEFFQHLIEDRTEAAFSYYEFLLHVQQQICK

SEQ ID NO: 757943 - protein, 490 aa, Homo sapiens [sequence omitted]

SEQ ID NO: 757944 - protein, 992 aa, Homo sapiens
MSAPAGSSHPAASARIPPKFGGSAVSGAAAPAGPGAGPAPHQQNGPAQNQMQVPSGYGLHHQNYIAPSGHYSQGPGKMTSLPLDTQCGDYYSALYTVPTQNVTPNTVNQQPGAQQLYSRGPPAPHIVGSTLGSFQGAASSASHLHTSASQPYSSFVNHYNSPAMYSASSSVASQGFPSTCGHYAMSTVSNAAYPSVSYPSLPAGDTYGQMFTSQNAPTVRPVKDNSFSGQNTAISHPSPLPPLPSQQHHQQQSLSGYSTLTWSSPGLPSTQDNLIRNHTGSLAVANNNPTITVADSLSCPVMQNVQPPKSSPVVSTVLSGSSGSSSTRTPPTANHPVEPVTSVTQPSELLQQKGVDSSSTTSSASPMPNSYDALEGGSYPDMLSSSASSPAPDPAPEPDPASAPAPASAPAPVVPQPSKMAKPFGYGYPTLQPGYQNATAPLISGVQPSNPVYSGFQQYPQQYPGVNQLSSSIGGLSLQSSPQPESLRPVNLTQERNILPMTPVWAPVPNLNADLKKLNCSPDSFRCTLTNIPQTQALLNKAKLPLGLLLHPFRDLTQLPVITSNTIVRCRSCRTYINPFVSFIDQRRWKCNLCYRVNDVPEEFMYNPLTRSYGEPHKRPEVQNSTVEFIASSDYMLRPPQPAVYLFVLDVSHNAVEAGYLTILCQSLLENLDKLPGDSRTRIGFMTFDSTIHFYNLQEGLSQPQMLIVSDIDDVFLPTPDSLLVNLYESKELIKDLLNALPNMFTNTRETHSALGPALQAAFKLMSPTGGRVSVFQTQLPSLGAGLLQSREDPNQRSSTKVVQHLGPATDFYKKLALDCSGQQTAVDLFLLSSQYSDLASLACMSKYSAGCIYYYPSFHYTHNPSQAEKLQKDLKRYLTRKIGFEAVMRIRCTKGLSMHTFHGNFFVRSTDLLSLANINPDAGFAVQLSIEESLTDTSLVCFQTALLYTSSKGERRIRVHTLCLPVVSSLADVYAGVDVQAAICLLANMGE

SEQ ID NO: 757945 - protein, 236 aa, Homo sapiens
MSAPAGSSHPAASARIPPKFGGSAVSGAAAPAGPGAGPAPHQQNGPAQNQMQVPSGYGLHHQNYIAPSGHYSQGPGKMTSLPLDTQCGDYYSALYTVPTQNVTPNTVNQQPGAQQLYSRGPPAPHIVGSTLGSFQGAASSASHLHTSASQPYSSFVNHYNSPAMYSASSSVASQGFPSTCGHYAMSTVSNAAYPSVSYPSLPAGDTYGQMFTSQNAPTVRPVKDNSFSGQNTAVNR

SEQ ID NO: 757946 - protein, 1233 aa, Homo sapiens
MSAPAGSSHPAASARIPPKFGGSAVSGAAAPAGPGAGPAPHQQNGPAQNQMQVPSGYGLHHQNYIAPSGHYSQGPGKMTSLPLDTQCGDYYSALYTVPTQNVTPNTVNQQPGAQQLYSRGPPAPHIVGSTLGSFQGAASSASHLHTSASQPYSSFVNHYNSPAMYSASSSVASQGFPSTCGHYAMSTVSNAAYPSVSYPSLPAGDTYGQMFTSQNAPTVRPVKDNSFSGQNTAISHPSPLPPLPSQQHHQQQSLSGYSTLTWSSPGLPSTQDNLIRNHTGSLAVANNNPTITVADSLSCPVMQNVQPPKSSPVVSTVLSGSSGSSSTRTPPTANHPVEPVTSVTQPSELLQQKGVDSSSTTSSASPMPNSYDALEGGSYPDMLSSSASSPAPDPAPEPDPASAPAPASAPAPVVPQPSKMAKPFGYGYPTLQPGYQNATAPLISGVQPSNPVYSGFQQYPQQYPGVNQLSSSIGGLSLQSSPQPESLRPVNLTQERNILPMTPVWAPVPNLNADLKKLNCSPDSFRCTLTNIPQTQALLNKAKLPLGLLLHPFRDLTQLPVITSNTIVRCRSCRTYINPFVSFIDQRRWKCNLCYRVNDVPEEFMYNPLTRSYGEPHKRPEVQNSTVEFIASSDYMLRPPQPAVYLFVLDVSHNAVEAGYLTILCQSLLENLDKLPGDSRTRIGFMTFDSTIHFYNLQEGLSQPQMLIVSDIDDVFLPTPDSLLVNLYESKELIKDLLNALPNMFTNTRETHSALGPALQAAFKLMSPTGGRVSVFQTQLPSLGAGLLQSREDPNQRSSTKVVQHLGPATDFYKKLALDCSGQQTAVDLFLLSSQYSDLASLACMSKYSAGCIYYYPSFHYTHNPSQAEKLQKDLKRYLTRKIGFEAVMRIRCTKGLSMHTFHGNFFVRSTDLLSLANINPDAGFAVQLSIEESLTDTSLVCFQTALLYTSSKGERRIRVHTLCLPVVSSLADVYAGVDVQAAICLLANMAVDRSVSSSLSDARDALVNAVVDSLSAYGSTVSNLQHSALMAPSSLKLFPLYVLALLKQKAFRTGTSTRLDDRVYAMCQIKSQPLVHLMKMIHPNLYRIDRLTDEGAVHVNDRIVPQPPLQKLSAEKLTREGAFLMDCGSVFYIWVGKGCDNNFIEDVLGYTNFASIPQKMTHLPELDTLSSERARSFITWLRDSRPLSPILHIVKDESPAKAEFFQHLIEDRTEAAFSYYEFLLHVQQQICK

SEQ ID NO: 757947 - protein, 1233 aa, Homo sapiens; identical to SEQ ID NO: 757946

SEQ ID NO: 757948 - protein, 394 aa, Homo sapiens
MSAPAGSSHPAASARIPPKFGGSAVSGAAAPAGPGAGPAPHQQNGPAQNQMQVPSGYGLHHQNYIAPSGHYSQGPGKMTSLPLDTQCGDYYSALYTVPTQNVTPNTVNQQPGAQQLYSRGPPAPHIVGSTLGSFQGAASSASHLHTSASQPYSSFVNHYNSPAMYSASSSVASQGFPSTCGHYAMSTVSNAAYPSVSYPSLPAGDTYGQMFTSQNAPTVRPVKDNSFSGQNTAISHPSPLPPLPSQQHHQQQSLSGYSTLTWSSPGLPSTQDNLIRNHTGSLAVANNNPTITVADSLSCPVMQNVQPPKSSPVVSTVLSGSSGSSSTRTPPTANHPVEPVTSVTQPSELLQQKGVDSSSTTSSASPMPNSYDALEGGSYPDMLSSSASSPAPDP

SEQ ID NO: 757949 - protein, 236 aa, Homo sapiens; identical to SEQ ID NO: 757945

SEQ ID NO: 757950 - protein, 149 aa, Homo sapiens
IGVNTFKKIEIISSTLSDHSGIKLEINSKRNLLYHANTWKLNNLLLNEHWVKNEINMKIKKFFKLNNNNDTTYQNLWDPAKVVLRGKFIALNAYIKKSERAQTDGLRSHLKEEEKQKQTKPKPSRKKEIAKIGAELNEIETTTTTKTKR

SEQ ID NO: 757951 - protein, 273 aa, Homo sapiens
MFGLKQRPTPSRDAVVPPYMLDLYRRHSGQPGSPAPDHRLERAASRANTVRSFHHEESLEELPETSGKTTRRFFFNLSSIPTEEFITSAELQVFREQMQDALGNNSSFHHRINIYEIIKPATANSKFPVTRLLDTRLVNQNASRWESFDVTPAVMRWTAQGHANHGFVVEVAHLEEKQGVSKRHVRISRSLHQDEHSWSQIRPLLVTFPLADHLNSTNHAIVQTLVNSVNSKIPKACCVPTELSAISMLYLDENEKVVLKNYQDMVVEGCGCR

SEQ ID NO: 757952 - protein, 396 aa, Homo sapiens
MVAGTRCLLALLLPQVLLGGAAGLVPELGRRKFAAASSGRPSSQPSDEVLSEFELRLLSMFGLKQRPTPSRDAVVPPYMLDLYRRHSGQPGSPAPDHRLERAASRANTVRSFHHEESLEELPETSGKTTRRFFFNLSSIPTEEFITSAELQVFREQMQDALGNNSSFHHRINIYEIIKPATANSKFPVTRLLDTRLVNQNASRWESFDVTPAVMRWTAQGHANHGFVVEVAHLEEKQGVSKRHVRISRSLHQDEHSWSQIRPLLVTFGHDGKGHPLHKREKRQAKHKQRKRLKSSCKRHPLYVDFSDVGWNDWIVAPPGYHAFYCHGECPFPLADHLNSTNHAIVQTLVNSVNSKIPKACCVPTELSAISMLYLDENEKVVLKNYQDMVVEGCGCR

SEQ ID NO: 757953 - protein, 337 aa, Homo sapiens
MFGLKQRPTPSRDAVVPPYMLDLYRRHSGQPGSPAPDHRLERAASRANTVRSFHHEESLEELPETSGKTTRRFFFNLSSIPTEEFITSAELQVFREQMQDALGNNSSFHHRINIYEIIKPATANSKFPVTRLLDTRLVNQNASRWESFDVTPAVMRWTAQGHANHGFVVEVAHLEEKQGVSKRHVRISRSLHQDEHSWSQIRPLLVTFGHDGKGHPLHKREKRQAKHKQRKRLKSSCKRHPLYVDFSDVGWNDWIVAPPGYHAFYCHGECPFPLADHLNSTNHAIVQTLVNSVNSKIPKACCVPTELSAISMLYLDENEKVVLKNYQDMVVEGCGCR

SEQ ID NO: 757954 - protein, 330 aa, Homo sapiens
MVAGTRCLLALLLPQVLLGGAAGLVPELGRRKFAAASSGRPSSQPSDEVLSEFELRLLSMFGLKQRPTPSRDAVVPPYMLDLYRRHSGQPGSPAPDHRLERAASRANTVRSFHHEESLEELPETSGKTTRRFFFNLSSIPTEEFITSAELQVFREQMQDALGNNSSFHHRINIYEIIKPATANSKFPVTRLLDTRLVNQNASRWESFDVTPAVMRWTAQGHANHGFVVEVAHLEEKQGVSKRHVRISRSLHQDEHSWSQIRPLLVTFGHDGKGHPLHKREKRQAKHKQRKRLKSSCKRHPLYVDFSDVGWNDWIVAPPGYHAYLNMGRAR

SEQ ID NO: 757955 - protein, 396 aa, Homo sapiens; identical to SEQ ID NO: 757952

SEQ ID NO: 757956 - protein, 318 aa, Homo sapiens
MVAGTRCLLALLLPQVLLGGAAGLVPELGRRKFAAASSGRPSSQPSDEVLSEFELRLLSMFGLKQRPTPSRDAVVPPYMLDLYRRHSGQPGSPAPDHRLERAASRANTVRSFHHEESLEELPETSGKTTRRFFFNLSSIPTEEFITSAELQVFREQMQDALGNNSSFHHRINIYEIIKPATANSKFPVTRLLDTRLVNQNASRWESFDVTPAVMRWTAQGHANHGFVVEVAHLEEKQGVSKRHVRISRSLHQDEHSWSQIRPLLVTFGHDGKGHPLHKREKRQAKHKQRKRLKSRLWLPRGITPFTATENALFLWLII

SEQ ID NO: 757957 - protein, 332 aa, Homo sapiens
MVAGTRCLLALLLPQVLLGGAAGLVPELGRRKFAAASSGRPSSQPSDEVLSEFELRLLSMFGLKQRPTPSRDAVVPPYMLDLYRRHSGQPGSPAPDHRLERAASRANTVRSFHHEESLEELPETSGKTTRRFFFNLSSIPTEEFITSAELQVFREQMQDALGNNSSFHHRINIYEIIKPATANSKFPVTRLLDTRLVNQNASRWESFDVTPAVMRWTAQGHANHGFVVEVAHLEEKQGVSKRHVRISRSLHQDEHSWSQIRPLLVTFPLADHLNSTNHAIVQTLVNSVNSKIPKACCVPTELSAISMLYLDENEKVVLKNYQDMVVEGCGCR

SEQ ID NO: 757958 - protein, 105 aa, Homo sapiens
VQNLQAECRKRRLLLEDSKRLVNELNHLKEKERQYEKKQAERELQETQDQLTATIRCTKGMEGDAQKLEVENAMMRKTIKKQDDQIERLEKILQRSSLMPQVFKS

SEQ ID NO: 757959 - protein, 94 aa, Homo sapiens
QPESPHSFMSSPRAGWNLIHIGFITSYCNPLSTSQSLPQESQKFSNASVHKITCSMINSRSPGSTTKIPIWGPGMNIFINIPGDLHAGDPGAPH

SEQ ID NO: 757960 - protein, 222 aa, Homo sapiens
AKECMCSCPQAGFGLPLVWETRVAAIGVGKKGTGPKQCPVDRTGRVADFTEQYNEQYGAVRTPYTMGYGESMYYNDAYGALDYYKRYRVRSYEAVAAAAAASAYNYAEQTMSHLPQVQSTTVTSHLNSTSVDPYDRHLLPNSGAAATSAAMAAAAATTSSYYGRDRSPLRRAAAMLPTVGEGYGYGPESELSQASAATRNSLYDMARYEREQYVDRARYSAF

SEQ ID NO: 757961 - protein, 222 aa, Homo sapiens; identical to SEQ ID NO: 757960

SEQ ID NO: 757962 - protein, 222 aa, Homo sapiens; identical to SEQ ID NO: 757960

SEQ ID NO: 757963 - protein, 222 aa, Homo sapiens; identical to SEQ ID NO: 757960

SEQ ID NO: 757964 - protein, 192 aa, Homo sapiens
GWKPRPAEEFPKTLRGGFDRAKMATPMHRLIARRQAEANKQHVRCQKCLEFGHWTYECTGKRKYLHRPSRTAELKKALKEKENRLLLQQSIGETNVERKAKKKRSKSVTSSSSSSSDSSASDSSSESEETSTSSSSEDSDTDESSSSSSSSASSTTSSSSSDSDSDSSSSSSSSTSTDSSSDDEPPKKKKKK

SEQ ID NO: 757965 - protein, 192 aa, Homo sapiens; identical to SEQ ID NO: 757964

SEQ ID NO: 757966 - protein, 136 aa, Homo sapiens
GWKPRPAEEFPKTLRGGFDRAKMATPMHRLIARRQAFDTELQPVKTFWILIQPSIVISEANKQHVRCQKCLEFGHWTYECTGKRKYLHRPSRTAELKKALKEKENRLLLQQRSFFPPRVYQHWRNQCRKKGQEKKV

SEQ ID NO: 757967 - protein, 124 aa, Homo sapiens
GWKPRPAEEFPKTLRGGFDRAKMATPMHRLIARRQASKSVTSSSSSSSDSSASDSSSESEETSTSSSSEDSDTDESSSSSSSSASSTTSSSSSDSDSDSSSSSSSSTSTDSSSDDEPPKKKKKK

SEQ ID NO: 757968 - protein, 160 aa, Homo sapiens
GWKPRPAEEFPKTLRGGFDRAKMATPMHRLIARRQAFDTELQPVKTFWILIQPSIVISIGETNVERKAKKKRSKSVTSSSSSSSDSSASDSSSESEETSTSSSSEDSDTDESSSSSSSSASSTTSSSSSDSDSDSSSSSSSSTSTDSSSDDEPPKKKKKK

SEQ ID NO: 757969 - protein, 200 aa, Homo sapiens
GWKPRPAEEFPKTLRGGFDRAKMATPMHRLIARRQAFDTELQPVKTFWILIQPSIVISEANKQHVRCQKCLEFGHWTYECTGKRKYLHRPSRTAELKKALKEKENRLLLQQRSKSVTSSSSSSSDSSASDSSSESEETSTSSSSEDSDTDESSSSSSSSASSTTSSSSSDSDSDSSSSSSSSTSTDSSSDDEPPKKKKKK

SEQ ID NO: 757970 - protein, 101 aa, Homo sapiens
MKLLLTFYYMSPSHVYNSVLSNRSKSVTSSSSSSSDSSASDSSSESEETSTSSSSEDSDTDESSSSSSSSASSTTSSSSSDSDSDSSSSSSSSTSTDSSSD

SEQ ID NO: 757971 - protein, 192 aa, Homo sapiens; identical to SEQ ID NO: 757964

SEQ ID NO: 757972 - protein, 214 aa, Homo sapiens
GWKPRPAEEFPKTLRGGFDRAKMATPMHRLIARRQAFDTELQPVKTFWILIQPSIVISEANKQHVRCQKCLEFGHWTYECTGKRKYLHRPSRTAELKKALKEKENRLLLQQSIGETNVERKAKKKRSKSVTSSSSSSSDSSASDSSSESEETSTSSSSEDSDTDESSSSSSSSASSTTSSSSSDSDSDSSSSSSSSTSTDSSSDDEPPKKKKKK

SEQ ID NO: 757973 - protein, 114 aa, Homo sapiens
GWKPRPAEEFPKTLRGGFDRAKMATPMHRLIARRQAEANKQHVRCQKCLEFGHWTYECTGKRKYLHRPSRTAELKKALKEKENRLLLQQRSFFPPRVYQHWRNQCRKKGQEKKV

SEQ ID NO: 757974 - protein, 150 aa, Homo sapiens
GWKPRPAEEFPKTLRGGFDRAKMATPMHRLIARRQAFDTELQPVKTFWILIQPSIVISEANKQHVRCQKCLEFGHWTYECTGKRKSEIDKRTHSKTRAEQKMNRDYTRNASNLERNDLRIEDGISSTLPSKESRRKGGLDYLKQVENEQE

SEQ ID NO: 757975 - protein, 132 aa, Homo sapiens
PLLFTRATALLPQDLFILPVLGLSICKLEVLRAGKGGCEEGFGQLLLLSEVASSSRHGGLSTTGLLGYLPLICSLVRALVNRQARGAGTRRGLQRVQYQIFQTQHLCPGVSKLSSALGFIHTVKLPVYANDM

SEQ ID NO: 757976 - protein, 423 aa, Homo sapiens
PESIQGSKEKGIWKPETPQDSSGLAPFKTKEPSTRIGKIQANLAINPAALLPTAASQISEVKPVLPELAFPSSEHRRSHGLESVPVLPGSGEAGVSFDLPAQADTLHSANKSRVKMRGKRRPQTRAARRLAAQESSETEDMSVPRGPIAQWADGAISPNGHRPQLRAASGEDSTEEALAAAAAPWEGGPVPGVDRSPFAKSLGHSRGEADLFDSGDIFSTGTGSQSVERTKPKAKIAENPANPPVGGKAKSPMFPALGEASSDDDLFQSAKPKPAKKTNTFPLLEDEDDLFTDQKVKKNETKSNSQQDVILTTQDIFEDDIFATEAIKPSQKTREKEKTLESNLFDDNIDIFADLTVKPKEKSKKKVEAKSIFDDDMDDIFSSGIQAKTTKPKSRSAQAAPEPRFEHKVSNIFDDPLNAFGGQ

SEQ ID NO: 757977 - protein, 77 aa, Homo sapiens
VFGGLPCHVSLKSTLSSQPLFSNRFSFFFPKDDIFSSGIQAKTTKPKSRSAQAAPEPRFEHKVSNIFDDPLNAFGGQ

SEQ ID NO: 757978 - protein, 309 aa, Homo sapiens
PESIQGSKEKGIWKPETPQDSSGLAPFKTKEPSTRIGKIQANLAINPAALLPTAASQISEVKPVLPELAFPSSEHRRSHGLESVPVLPGSGEAGVSFDLPAQADTLHSANKSRVKMRGKRRPQTRAARRLAAQESSETEDMSVPRGPIAQWADGAISPNGHRPQLRAASGEDSTEEALAAAAAPWEGGPVPGVDRSPFAKSLGHSRGEADLFDSGDIFSTGTGSQSVERTKPKAKIAENPANPPVGGKAKSPMFPALGEASSDDDLFQSAKPKPAKKTNTFPLLEDEDDLFTDQKVKKYKRLEYTCRVI

SEQ ID NO: 757979 - protein, 423 aa, Homo sapiens; identical to SEQ ID NO: 757976

SEQ ID NO: 757980 - protein, 153 aa, Homo sapiens
ILSMAVPTIIGLSLWKEFFPRLMTELMELQEFYDPDTVELMTWIKRQAPVAAVFAGSPQLMGAIKLCTGWMVTSLPLYNDDDLLKRNENIYQIYSKRSAEDIYKILTSYKANYLIVEDAICNEVGPMRGCRVKDLLDIANGHMVCEEGDKLTY

SEQ ID NO: 757981 - protein, 353 aa, Homo sapiens
METNFSIPLNETEEVLPEPAGHTVLWIFSLLVHGVTFVFGVLGNGLVIWVAGFRMTRTVNTICYLNLALADFSFSAILPFRMVSVAMREKWPFASFLCKLVHVMIDINLFVSVYLITIIALDRCICVLHPAWAQNHRTMSLAKRVMTGLWIFTIVLTLPNFIFWTTISTTNGDTYCIFNFAFWGDTAVERLNVFITMAKVFLILHFIIGFTVPMSIITVCYGIIAAKIHRNHMIKSSRPLRVFAAVVASFFICWFPYELIGILMAVWLKEMLLNGKYKIILVLINPTSSLAFFNSCLNPILYVFMGRNFQERLIRSLPTSLERALTEVPDSAQTSNTHTTSASPPEETELQAM

SEQ ID NO: 757982 - protein, 114 aa, Homo sapiens
METAVQKSCQVSSPGSGGSWSRGGDDSRGRSPPGTKGHGREGLDELGDRGPGRCGALGRVLGAFPGTESQGIGLWIALVVFLSFLIFSTSFYISNAEQPFFKGPPTEAAKELSL

SEQ ID NO: 757983 - protein, 108 aa, Homo sapiens
GRWFRINWIGFLISEGTSSPGIRKCDPQFREEEERRPYLSGVTVRREVGKGWAPLGVPGSRQKSPGLRQSADTEFPCQRRGSTRTGSSSSGTYFIQLGAEKESWKLGN

SEQ ID NO: 757984 - protein, 110 aa, Homo sapiens
MVGLSLPTVREVRRGNARGHSAGVDPLPTAGAQPLSVDPTGARPLNPALGVLRAPRGALLGGSAAPRVPRSRGPECASPRLESESGGLLRAGGRAPKSALPPMRWPWGRR

SEQ ID NO: 757985 - protein, 200 aa, Homo sapiens
MVNQSSPMGFLLLGFSEHPALERTLFVVVFTSYLLTLVGNTLIILLSVLYPRLHSPMYFFLSDLSFLDLCFTTSCVPQMLVNLWGPKKTISFLGCSVQLFIFLSLGTTECILLTVMAFDRYVAVCQPLHYATIIHPRLCWQLASVAWVMSLVQSIVQTPSTLHLPFCPHQQIDDFLCEVPSLIRLSCGDTSYNEIQLAVS

SEQ ID NO: 757986 - protein, 122 aa, Homo sapiens
MLVNLWGPKKTISFLGCSVQLFIFLSLGTTECILLTVMAFDRYVAVCQPLHYATIIHPRLCWQLASVAWVMSLVQSIVQTPSTLHLPFCPHQQIDDFLCEVPSLIRLSCGDTSYNEIQLAVS

SEQ ID NO: 757987 - protein, 219 aa, Homo sapiens
GQAWRPAWAPPRGAGSVRTRRGRLGALELPCRPGTSVGFPGEVWGGSSVRPELQVLVLFLVVREGICERIFLIRRFKLVLARKWITHIHSMSLPFQPFKVLATETVSHKALDADIYSAIPTEKVDGTCCYVTTYKDQPYLWARLDRKPNKQAEKRFKNFLHSKENPKEFFWNVEEDFKPAPECWIPAKETEQINGNPVPDENGHIPGIMISLLVQFCVY

SEQ ID NO: 757988 - protein, 237 aa, Homo sapiens
MKRLGSVQRKMPCVFVTEVKEEPSSKREHQPFKVLATETVSHKALDADIYSAIPTEKVDGTCCYVTTYKDQPYLWARLDRKPNKQAEKRFKNFLHSKENPKEFFWNVEEDFKPAPECWIPAKETEQINGNPVPDENGHIPGWVPVEKNNKQYCWHSSVVNYEFEIALVLKHHPDDSGLLEISAVPLSDLLEQTLELIGTIHGPLGFGPENPSFFTMGFLEYLLRQVPSVKWRAHREH

SEQ ID NO: 757989 - protein, 209 aa, Homo sapiens
MPCVFVTEVKEEPSSKREHQVSTFVGKPPNQPFKVLATETVSHKALDADIYSAIPTEKVDGTCCYVTTYKDQPYLWARLDRKPNKQAEKRFKNFLHSKENPKEFFWNVEEDFKPAPECWIPAKETEQINGNPVPDENGHIPGWVPVEKNNKQYCWHSSVVNYEFEIALVLKHHPDDSGLLEISAVPLSDLLEQTLELIGTNINGNPYGE

SEQ ID NO: 757990 - protein, 325 aa, Homo sapiens
MKRLGSVQRKMPCVFVTEVKEEPSSKREHQPFKVLATETVSHKALDADIYSAIPTEKVDGTCCYVTTYKDQPYLWARLDRKPNKQAEKRFKNFLHSKENPKEFFWNVEEDFKPAPECWIPAKETEQINGNPVPDENGHIPGWVPVEKNNKQYCWHSSVVNYEFEIALVLKHHPDDSGLLEISAVPLSDLLEQTLELIGTNINGNPYGLGSKKHPLHLLIPHGAFQIRNLPSLKHNDLLSWFEDCKEGKIEGIVWHCSDGCLIKVHRHHLGLCWPIPDTYMNSRPVIINMNLNKCDSAFDIKCLFNHFLKIDNQKFVRLKDIIFDV

SEQ ID NO: 757991 - protein, 325 aa, Homo sapiens; identical to SEQ ID NO: 757990

SEQ ID NO: 757992 - protein, 208 aa, Homo sapiens
MKRLGSVQRKMPCVFVTEVKEEPSSKREHQPFKVLATETVSHKALDADIYSAIPTEKVDGTCCYVTTYKDQPYLWARLDRKPNKQAEKRFKNFLHSKENPKEFFWNVEEDFKPAPECWIPAKETEQINGNPVPDENGHIPGWVPVEKNNKQYCWHSSVVNYEFEIALVLKHHPDDSGLLEISAVPLSDLLEQTLELIGTNINGNPYGE

SEQ ID NO: 757993 - protein, 96 aa, Homo sapiens
TNSTHHIGPPEATSASSLYTDSVSVFLSSLTLHEGDFWWSKGSSSCRTCRERGTSSARYGATAHSMGKSPSRGSAAARGSSRVLRALHRYSQRPAK

SEQ ID NO: 757994 - protein, 136 aa, Homo sapiens
MPIPRRVRSFHGPHTTCLHAACGPVRASHLARTKYNNFDVYIKTRWLYGFIRFLLYFSCSLFTAALWGALAALFCLQYLGVRVLLRFQRKLSVLLLLLGRRRVDFRLVNELLVYGIHVTMLLVGGLGWCFMVFVDM

SEQ ID NO: 757995 - protein, 136 aa, Homo sapiens; identical to SEQ ID NO: 757994

SEQ ID NO: 757996 - protein, 146 aa, Homo sapiens [sequence omitted]

SEQ ID NO: 757997 - protein, 136 aa, Homo sapiens; identical to SEQ ID NO: 757994

SEQ ID NO: 757998 - protein, 158 aa, Homo sapiens
MRPPCARSPEGQGHPQARPLAPPAGPEVRDAGAAAERAPGELRAGTRPRRGPSPGQRAARDPEVAPAGALQPGGPARRGAGPVLTRSWPGPVASLRPRGNSPGSMGRAERASAETQGPGWSRGPRDPAGTQLRRVAFEWHRHGWGPGRGELQAKAGLK

SEQ ID NO: 757999 - protein, 136 aa, Homo sapiens; identical to SEQ ID NO: 757994

SEQ ID NO: 758000 - protein, 136 aa, Homo sapiens; identical to SEQ ID NO: 757994

SEQ ID NO: 758001 - protein, 136 aa, Homo sapiens; identical to SEQ ID NO: 757994

SEQ ID NO: 758002 - protein, 136 aa, Homo sapiens; identical to SEQ ID NO: 757994

SEQ ID NO: 758003 - protein, 83 aa, Homo sapiens
ASGGPQQPNLVLSPAYQQRADGTNADADPGDKRNSGGHRSGQCKHYALRCLGQKENIKENKISHWCLAGEFLKTYKSTSCSNK

SEQ ID NO: 758004 - protein, 165 aa, Homo sapiens
MTLEEFSAGEQKTERMDKVGDALEEVLSKALSQRTITVGVYEAAKLLNVDPDNVVLCLLAADEDDDRDVALQIHFTLIQAFCCENDINILRVSNPGRLAELLLLETDAGPAASEGAEQPPDLHCVLVTNPHSSQWKDPALSQLICFCRESRYMDQWVPVINLPER

SEQ ID NO: 758005 - protein, 165 aa, Homo sapiens; identical to SEQ ID NO: 758004

SEQ ID NO: 758006 - protein, 131 aa, Homo sapiens
MTLEEFSAGEQKTESDPDNVVLCLLAADEDDDRDVALQIHFTLIQAFCCENDINILRVSNPGRLAELLLLETDAGPAASEGAEQPPDLHCVLVTNPHSSQWKDPALSQLICFCRESRYMDQWVPVINLPER

SEQ ID NO: 758007 - protein, 98 aa, Homo sapiens
MGLRAPALLRSLAPPAAPSDPDNVVLCLLAADEDDDRDVALQIHFTLIQAFCCENDINILRVSNPGRLAELLLLETDAGPAASEGAEQPPDLHCVLVT

SEQ ID NO: 758008 - protein, 135 aa, Homo sapiens
MGLRAPALLRSLAPPAAPSDPDNVVLCLLAADEDDDRDVALQIHFTLIQAFCCENDINILRVSNPGRLAELLLLETDAGPAASEGAEQPPDLHCVLVTNPHSSQWKDPALSQLICFCRESRYMDQWVPVINLPER

SEQ ID NO: 758009 - protein, 165 aa, Homo sapiens; identical to SEQ ID NO: 758004

SEQ ID NO: 758010 - protein, 111 aa, Homo sapiens
MLQRCTGWALELGCRASNWLHAWASLRSSSHACCGPSLTSPSGGGRLAGLFQSWSPGGSCFAKSRSSQGLPAAQNTQTGSGLPGFTARPMPLCPGIWGKAVTGQTWSGFLP

SEQ ID NO: 758011 - protein, 630 aa, Homo sapiens
MAAGVAAWLPFARAAAIGWMPVASGPMPAPPRQERKRTQDALIVLNVSGTRFQTWQDTLERYPDTLLGSSERDFFYHPETQQYFFDRDPDIFRHILNFYRTGKLHYPRHECISAYDEELAFFGLIPEIIGDCCYEEYKDRRRENAERLQDDADTDTAGESALPTMTARQRVWRAFENPHTSTMALVFYYVTGFFIAVSVIANVVETVPCGSSPGHIKELPCGERYAVAFFCLDTACVMIFTVEYLLRLAAAPSRYRFVRSVMSIIDVVAILPYYIGLVMTDNEDVSGAFVTLRVFRVFRIFKFSRHSQGLRILGYTLKSCASELGFLLFSLTMAIIIFATVMFYAEKGSSASKFTSIPAAFWYTIVTMTTLGYGDMVPKTIAGKIFGSICSLSGVLVIALPVPVIVSNFSRIYHQNQRADKRRAQKKARLARIRAAKSGSANAYMQSKRNGLLSNQLQSSEDEQAFVSKSGSSFETQHHHLLHCLEKTTNHEFVDEQVFEESCMEVATVNRPSSHSPSLSSQQGVTSTCCSRRHKKTFRIPNANVSGSHQGSIQELSTIQIRCVERTPLSNSRSSLNAKMEECVKLNCEQPYVTTAIISIPTPPVTTPEGDDRPESPEYSGGNIVRVSAL

SEQ ID NO: 758012 - protein, 195 aa, Homo sapiens
DPLPLWEHPASGSLPPSLCLPSPGHQERPLLSPGRPTAGSRIAGPSAWPGVSGERGSGACALGGVVIRDRSPGERGGDKGAVWGRSMSLCWHPRAPRFANSSSHRQGHGSGLLRSKGSVIGWNRAAGEETGSFCIPSTEHLMKYSIYIYKYIYKYIYILLFVGTLGKCPLVTVNMNCDPIPSRMSPVSPSSYQPP

SEQ ID NO: 758013 - protein, 170 aa, Homo sapiens
MRVSRARLRRPLLLLLLPPPQRLLGLSTPRNRPPRAARRTRCPCRPGRVGRPRAAPSYFCPATALPSQLSTCLPEVNFQKQESPEPGRGMNREGAPGKSPEEMYIQQKVRVLLMLRKMGSNLTASEEEFLRTYAGVVNSQLSQLPPHSIDQGAEDVVMAFSRSETEDRRQ

SEQ ID NO: 758014 - protein, 40 aa, Homo sapiens
MNREGAPGKSPEEMYIQQKVRVLLMLRKMGSNECLWGVRQ

SEQ ID NO: 758015 - protein, 243 aa, Homo sapiens
DWYNHGWAQIEDQGEKAAGTRQKKVLRSELGGFGQAGRSAGRPSQPAGARCRPPPAGPSPGGLAPPSLPNRGDSRSGRRRLRRPLLLLLLPPPQRLLGLSTPRNRPPRAARRTRCPCRPGRVGRPRAAPSYFCPATALPSQLSTCLPEVNFQKQESPEPGRGMNREGAPGKSPEEMYIQQKVRVLLMLRKMGSNLTASEEEFLRTYAGVVNSQLSQLPPHSIDQGAEDVVMAFSRSETEDRRQ

SEQ ID NO: 758016 - protein, 132 aa, Homo sapiens
PEVWVQVSWACQTHRAAPSYFCPATALPSQLSTCLPEVNFQKQESPEPGRGMNREGAPGKSPEEMYIQQKVRVLLMLRKMGSNLTASEEEFLRTYAGVVNSQLSQLPPHSIDQGAEDVVMAFSRSETEDRRQ

SEQ ID NO: 758017 - protein, 73 aa, Homo sapiens
GDTGIVYTPAETTAVLYGLGSEAEAAAPAAATAAAAAAARAEHAPEQAAARCAPDPLPLPARPGRAAQVQRTW

SEQ ID NO: 758018 - protein, 243 aa, Homo sapiens; identical to SEQ ID NO: 758015

SEQ ID NO: 758019 - protein, 106 aa, Homo sapiens
MCCVSEHTRVHTHTHVHTHALSPLRGLEVWLSPWGKVSSFISLLQVGVPGVRCRGHIAGCPLFVAPIKGPHLVDTWLSVWSLPQPVLVTITGLAFVTMMTPACLIF

SEQ ID NO: 758020 - protein, 243 aa, Homo sapiens; identical to SEQ ID NO: 758015

SEQ ID NO: 758021 - protein, 106 aa, Homo sapiens; identical to SEQ ID NO: 758019

SEQ ID NO: 758022 - protein, 132 aa, Homo sapiens
LVTHQEFLSRYRFPQAAPSYFCPATALPSQLSTCLPEVNFQKQESPEPGRGMNREGAPGKSPEEMYIQQKVRVLLMLRKMGSNLTASEEEFLRTYAGVVNSQLSQLPPHSIDQGAEDVVMAFSRSETEDRRQ

SEQ ID NO: 758023 - protein, 145 aa, Homo sapiens
MAVLYGLGSEAEAAAPAAATAAAAAAARAEHAPEQAAARCAPDPLPLPARPGRAAQESPEPGRGMNREGAPGKSPEEMYIQQKVRVLLMLRKMGSNLTASEEEFLRTYAGVVNSQLSQLPPHSIDQGAEDVVMAFSRSETEDRRQ

SEQ ID NO: 758024 - protein, 182 aa, Homo sapiens
GDTGKCKPRLKRRQYYTVKVARLRRPLLLLLLPPPQRLLGLSTPRNRPPRAARRTRCPCRPGRVGRPRAAPSYFCPATALPSQLSTCLPEVNFQKQESPEPGRGMNREGAPGKSPEEMYIQQKVRVLLMLRKMGSNPALPHPTSQLLSGAGIKGDTSGAFIIGLKGWTCDWLQEETFLFFKS

SEQ ID NO: 758025 - protein, 243 aa, Homo sapiens; identical to SEQ ID NO: 758015

SEQ ID NO: 758026 - protein, 243 aa, Homo sapiens; identical to SEQ ID NO: 758015

SEQ ID NO: 758027 - protein, 114 aa, Homo sapiens
QQAGWDPLRRSWSATGRSLNLDPVGTGEPRRASSRRRCRRLCVRLERKVGTCSQASPPVSFDSQVRQSRPTPWLGSPGPLHLGLSQGWGWGRLSVATTPCNTQGGRGCGCQGTG

SEQ ID NO: 758028 - protein, 156 aa, Homo sapiens [sequence omitted]

SEQ ID NO: 758029 - protein, 156 aa, Homo sapiens [sequence omitted]

SEQ ID NO: 758030 - protein, 156 aa, Homo sapiens [sequence omitted]

SEQ ID NO: 758031 - protein, 242 aa, Homo sapiens
MPVGPAFSPSRRTSKGSVCPGCAGLQAGAGPSPDWKMRLTSWPRSLPGRSLDTQLRPYPRTDSGSRSLPPWASRHGGRGWSWGLPSTPGNPHAHAPHLPGLPLLILAFCVAGAAALSVASLCWCRLQREIRLTQKADYATAKAPGSPAAPRISPGDQRLAQSAEMYHYQHQRQQMLCLERHKEPPKELDTASSDEENEDGDFTVYECPGLAPTGEMEVRNPLFDHAALSAPLPAPSSPPALP

SEQ ID NO: 758032 - protein, 156 aa, Homo sapiens [sequence omitted]

SEQ ID NO: 758033 - protein, 187 aa, Homo sapiens
MATPLPPPSPRHLRLLRLLLSGLVLGAALRGAAAGHPDVAACPGSLDCALKRRARCPPGAHACGPCLQPFQEDQQGLCVPRMRRPPGGGRPQPRLEDEIDFLAQELARKESGHSTPPLPKDRQRLPEPATLGFSARGQGLELGPPLHSREPPRPRPTPPWAPLCHPTRCTCRPWSPGEGKATASPLC

SEQ ID NO: 758034 - protein, 146 aa, Homo sapiens
MATPLPPPSPRHLRLLRLLLSGLVLGAALRGAAAGHPDVAACPGSLDCALKRRARCPPGAHACGPCLQPFQEDQQGLCVPRMRRPPGGGRPQPRLEDEIDFLAQELARKESGHSTPPLPKDRQRLPEPATLGFSARGQGLELGPPC

SEQ ID NO: 758035 - protein, 156 aa, Homo sapiens [sequence omitted]

SEQ ID NO: 758036 - protein, 156 aa, Homo sapiens [sequence omitted]

SEQ ID NO: 758037 - protein, 156 aa, Homo sapiens [sequence omitted]

SEQ ID NO: 758038 - protein, 187 aa, Homo sapiens; identical to SEQ ID NO: 758033

SEQ ID NO: 758039 - protein, 112 aa, Homo sapiens
AFPTTVTVTSSTEVLNPSRLPMKVRINFFQTPFHVDSSSIIRQQMLCLERHKEPPKELDTASSDEENEDGDFTVYECPGLAPTGEMEVRNPLFDHAALSAPLPAPSSPPALP

SEQ ID NO: 758040 - protein, 137 aa, Homo sapiens
FPPPLANFTPGPATLTCTLTFTSPAALTLTSPGQLHPGLCSPATPGLRWAECPLPDWATGTSRAWGGPSDPPPPRHKEPPKELDTASSDEENEDGDFTVYECPGLAPTGEMEVRNPLFDHAALSAPLPAPSSPPALP

SEQ ID NO: 758041 - protein, 92 aa, Homo sapiens
SWYSEDPRLGITRGHFSIPAQREQMLCLERHKEPPKELDTASSDEENEDGDFTVYECPGLAPTGEMEVRNPLFDHAALSAPLPAPSSPPALP

SEQ ID NO: 758042 - protein, 106 aa, Homo sapiens
MFNVPKSRPTDTGGCCPRLWRVCGAWRWLLCPPATAAAGTALKEGGQPEGPECQVTKETKPANQGLEKDDAPCGPRGPACSVQCGAGQRGRVLVSQRCHRRLPRQG

SEQ ID NO: 758043 - protein, 82 aa, Homo sapiens
IAVPEDPVVSTRQQMLCLERHKEPPKELDTASSDEENEDGDFTVYECPGLAPTGEMEVRNPLFDHAALSAPLPAPSSPPALP

SEQ ID NO: 758044 - protein, 156 aa, Homo sapiens [sequence omitted]

SEQ ID NO: 758045 - protein, 156 aa, Homo sapiens [sequence omitted]

SEQ ID NO: 758046 - protein, 156 aa, Homo sapiens [sequence omitted]

SEQ ID NO: 758047 - protein, 187 aa, Homo sapiens; identical to SEQ ID NO: 758033

SEQ ID NO: 758048 - protein, 352 aa, Homo sapiens
MATPLPPPSPRHLRLLRLLLSGLVLGAALRGAAAGHPDVAACPGSLDCALKRRARCPPGAHACGPCLQPFQEDQQGLCVPRMRRPPGGGRPQPRLEDEIDFLAQELARKESGHSTPPLPKDRQRLPEPGGDPRFPCPTALSLAQCSHSNLSSLSSHPGLLGTGAGAGAGASPPLQGTPTPTPHTSLGSPVSSDPVHMSPLEPRGGQGDGLALVLILAFCVAGAAALSVASLCWCRLQREIRLTQKADYATAKAPGSPAAPRISPGDQRLAQSAEMYHYQHQRQQMLCLERHKEPPKELDTASSDEENEDGDFTVYECPGLAPTGEMEVRNPLFDHAALSAPLPAPSSPPALP

SEQ ID NO: 758049 - protein, 156 aa, Homo sapiens [sequence omitted]

SEQ ID NO: 758050 - protein, 148 aa, Homo sapiens
CRRIGISPLLILAFCVAGAAALSVASLCWCRLQREIRLTQKADYATAKAPGSPAAPRISPGDQRLAQSAEMYHYQHQRQQMLCLERHKEPPKELDTASSDEENEDGDFTVYECPGLAPTGEMEVRNPLFDHAALSAPLPAPSSPPALP

SEQ ID NO: 758051 - protein, 129 aa, Homo sapiens
MSPLEPRGGQGDGLALVLILAFCVAGAAALSVASLCWCRLQREIRLTQKADYATAKAPGSPAAPRISPGDQRLAQSAEMYHYQHQRQQMLCLERHKEPPKELDTASSDEENEDGDFTVYECPGLAPVPQ

SEQ ID NO: 758052 - protein, 111 aa, Homo sapiens
IAVPEDPVSAYGNRCCAWSGLRWAECPLPDWATGTSRAWGGPSDPPPPRHKEPPKELDTASSDEENEDGDFTVYECPGLAPTGEMEVRNPLFDHAALSAPLPAPSSPPALP

SEQ ID NO: 758053 - protein, 82 aa, Homo sapiens; identical to SEQ ID NO: 758043

SEQ ID NO: 758054 - protein, 169 aa, Homo sapiens
EPHEGPEQDRVPPADPNMSRLPVLLLLQLLVRPGLQAPMTQTTPLKTSWVNCSNMIDEIITHLKQPPLPLLDFNNLNGEDQDILMENNLRRPNLEAFNRAVKSLQNASAIESILKNLLPCLPLATAAPTRHPIHIKDGDWNEFRRKLTFYLKTLENAQAQQTTLSLAIF

SEQ ID NO: 758055 - protein, 782 aa, Homo sapiens
TAESSLGATEEPRANPQPYLGLVLELLRRVVAALTEGMRPDSHPYGFPWELVIRAAVAGFFAVLFLWRSFRSVTSRLYVRREKKFAVALSGLIEEKCKLLEKFSLVQKEYEGYEVESSLKNASFEKEATEAQSLEATCEKLNRFNSELVHEILCLEKELKEEKSKHSEQNELMADISKRIQSLEDESKSLKSQVAEAKMTFKRFQANEERLEIEIQDAWKENSELQESQKQLLQEAEVWKEQVSELIKQKRTFEDSKVHAEQVLNDKENHIKTLTERLLKMKDGVAMLEEDVTDDDNLELEMNSESEDGAYLDNPPKGALKKLIHAAKLNASLKTLEGERNQIYIQLSEVDKTKEELTEHIKNLQTEQASLQSENTHFESENQKLQQKLKVMTELYQENEMKLYRKLIVEEKCRLEKEEKLSKVDEMISHATEELETYRKRAKDLKEFEKTIHFYQKKIILHEKKAHDNWSAAWTAERNLNDLRKENAHNRQKLTEIEFKIKLLEKDPYGLDVPNTAFGRQHSPYGPSPLGWPSSETRASLYPPTLLEGPLRLSPLLPRGGGRGSRGPGNPPDHQITKERGESSCDRLTDPHRAPSDAGPLAPPWEQDYRMMFPPPGQSYPDSALPPQRQDRFYSNCARLSGPAELRSFNMPSLDKMDGSMPSEMESSRNDTKDNLGNLKVPDSSLPAENEATGPGFVPPPLAPIRGLLFPVDTRGPFIRRGPPFPPPPPGTVFGASPDYFSPRDVPGPPRAPFAMRNVYLPRGFLPYRPPRPAFFPPAPTF

SEQ ID NO: 758056 - protein, 782 aa, Homo sapiens; identical to SEQ ID NO: 758055

SEQ ID NO: 758057 - protein, 153 aa, Homo sapiens
ARSSVFLPGYAGLCMSSCSELATGRAEGVDSRVPGLPSSLFLRTPTAAAPGESAPKFRGTAPQRPGGKGNGAVNVSNSDPLSRSELVSRGHLRAAGHSLPGAFLGPIHRASTGFHGACKLETLMPQICGVLPPAHPPLPRLGLKAPSLPLLTP

SEQ ID NO: 758058 - protein, 96 aa, Homo sapiens
LIGRLGLVGTSKKAKQREVWTLPSPPPWKTGCSSHCGVSAGVCFLPRLNGQHEEVGTDVTHVLQWKNLRLKEILSFKIASQTKTPMETLWKGLCSV

SEQ ID NO: 758059 - protein, 478 aa, Homo sapiens
MSSGRRRGSAPWHSFSRFFAPRSPSRDKEEEEEERPGTSPPPAPGRSAASHVLNELIQTERVYVRELYTVLLGYRAEMDNPEMFDLMPPLLRNKKDILFGNMAEIYEFHNDIFLSSLENCAHAPERVGPCFLERKDDFQMYAKYCQNKPRSETIWRKYSECAFFQECQRKLKHRLRLDSYLLKPVQRITKYQLLLKELLKYSKDCEGSALLKKALDAMLDLLKSVNDSMHQIAINGYIGNLNELGKMIMQGGFSVWIGHKKGATKMKDLARFKPMQRHLFLYEKAIVFCKRRVESGEGSDRYPSYSFKHCWKMDEVGITEYVKGDNRKFEIWYGEKEEVYIVQASNVDVKMTWLKEIRNILLKQQELLTVKKRKQQDQLTERDKFQISLQQNDEKQQGAFISTEETELEHTSTVVEVCEAIASVQAEANTVWTEASQSAEISEEPAEWSSNYFYPTYDENEEENRPLMRPVSEMALLY

SEQ ID NO: 758060 - protein, 915 aa, Homo sapiens
MRFRRNAASFPGNLHLVLVLRPTSFLQRTFTDIGFWFSQEDFMLKLPVVMLSSVSDLLTYIDDKQLTPELGGTLQYCHSEWIIFRNAIENFALTVKEMAQMLQSFGTELAETELPDDIPSIEEILAIRAERYHLLKNDITAVTKEGKILLTNLEVPDTEGAVSSRLECHRQISGDWQTINKLLTQVHDMETAFDGFWEKHQLKMEQYLQLWKFEQDFQQLVTEVEFLLNQQAELADVTGTIAQVKQKIKKLENLDENSQELLSKAQFVILHGHKLAANHHYALDLICQRCNELRYLSDILVNEIKAKRIQLSRTFKMHKLLQQARQCCDEGECLLANQEIDKFQSKEDAQKALQDIENFLEMALPFINYEPETLQYEFDVILSPELKVQMKTIQLKLENIRSIFENQQAGFRNLADKHVRPIQFVVPTPENLVTSGTPFFSSKQGKKTWRQNQSNLKIEVVPDCQEKRSSGPSSSLDNGNSLDVLKNHVLNELIQTERVYVRELYTVLLGYRAEMDNPEMFDLMPPLLRNKKDILFGNMAEIYEFHNDIFLSSLENCAHAPERVGPCFLERKDDFQMYAKYCQNKPRSETIWRKYSECAFFQECQRKLKHRLRLDSYLLKPVQRITKYQLLLKELLKYSKDCEGSALLKKALDAMLDLLKSVNDSMHQIAINGYIGNLNELGKMIMQGGFSVWIGHKKGATKMKDLARFKPMQRHLFLYEKAIVFCKRRVESGEGSDRYPSYSFKHCWKMDEVGITEYVKGDNRKFEIWYGEKEEVYIVQASNVDVKMTWLKEIRNILLKQQELLTVKKRKQQDQLTERDKFQISLQQNDEKQQGAFISTEETELEHTSTVVEVCEAIASVQAEANTVWTEASQSAEISEEPAEWSSNYFYPTYDENEEENRPLMRPVSEMALLY

SEQ ID NO: 758061 - protein, 567 aa, Homo sapiens
LFGRPTRADRRVLGTEPRLAAGSFRGSVKRSAAPAGASQVQMKTIQLKLENIRSIFENQQAGFRNLADKHVRPIQFVVPTPENLVTSGTPFFSSKQGKKTWRQNQSNLKIEVVPDCQEKRSSGPSSSLDNGNSLDVLKNHVLNELIQTERVYVRELYTVLLGYRAEMDNPEMFDLMPPLLRNKKDILFGNMAEIYEFHNDIFLSSLENCAHAPERVGPCFLERKDDFQMYAKYCQNKPRSETIWRKYSECAFFQECQRKLKHRLRLDSYLLKPVQRITKYQLLLKELLKYSKDCEGSALLKKALDAMLDLLKSVNDSMHQIAINGYIGNLNELGKMIMQGGFSVWIGHKKGATKMKDLARFKPMQRHLFLYEKAIVFCKRRVESGEGSDRYPSYSFKHCWKMDEVGITEYVKGDNRKFEIWYGEKEEVYIVQASNVDVKMTWLKEIRNILLKQQELLTVKKRKQQDQLTERDKFQISLQQNDEKQQGAFISTEETELEHTSTVVEVCEAIASVQAEANTVWTEASQSAEISEEPAEWSSNYFYPTYDENEEENRPLMRPVSEMALLY

SEQ ID NO: 758062 - protein, 999 aa, Homo sapiens
TDLLLRIKDISHFLMQDIAFLSGGRGKDNAWIITFPENCNFRCIPEEVIAKVLTYLTSIARQNGSDSRFTIILDRRLDTWSSLKISLQKISASFPGNLHLVLVLRPTSFLQRTFTDIGFWFSQEDFMLKLPVVMLSSVSDLLTYIDDKQLTPELGGTLQYCHSEWIIFRNAIENFALTVKEMAQMLQSFGTELAETELPDDIPSIEEILAIRAERYHLLKNDITAVTKEGKILLTNLEVPDTEGAVSSRLECHRQISGDWQTINKLLTQVHDMETAFDGFWEKHQLKMEQYLQLWKFEQDFQQLVTEVEFLLNQQAELADVTGTIAQVKQKIKKLENLDENSQELLSKAQFVILHGHKLAANHHYALDLICQRCNELRYLSDILVNEIKAKRIQLSRTFKMHKLLQQARQCCDEGECLLANQEIDKFQSKEDAQKALQDIENFLEMALPFINYEPETLQYEFDVILSPELKVQMKTIQLKLENIRSIFENQQAGFRNLADKHVRPIQFVVPTPENLVTSGTPFFSSKQGKKTWRQNQSNLKIEVVPDCQEKRSSGPSSSLDNGNSLDVLKNHVLNELIQTERVYVRELYTVLLGYRAEMDNPEMFDLMPPLLRNKKDILFGNMAEIYEFHNDIFLSSLENCAHAPERVGPCFLERKDDFQMYAKYCQNKPRSETIWRKYSECAFFQECQRKLKHRLRLDSYLLKPVQRITKYQLLLKELLKYSKDCEGSALLKKALDAMLDLLKSVNDSMHQIAINGYIGNLNELGKMIMQGGFSVWIGHKKGATKMKDLARFKPMQRHLFLYEKAIVFCKRRVESGEGSDRYPSYSFKHCWKMDEVGITEYVKGDNRKFEIWYGEKEEVYIVQASNVDVKMTWLKEIRNILLKQQELLTVKKRKQQDQLTERDKFQISLQQNDEKQQGAFISTEETELEHTSTVVEVCEAIASVQAEANTVWTEASQSAEISEEPAEWSSNYFYPTYDENEEENRPLMRPVSEMALLY

SEQ ID NO: 758063 - protein, 941 aa, Homo sapiens
MAEANPRRGKMRFRRNAASFPGNLHLVLVLRPTSFLQRTFTDIGFWFSQEDFMLKLPVVMLSSVSDLLTYIDDKQLTPELGGTLQYCHSEWIIFRNAIENFALTVKEMAQMLQSFGTELAETELPDDIPSIEEILAIRAERYHLLKNDITAVTKEGKILLTNLEVPDTEGAVSSRLECHRQISGDWQTINKLLTQVHDMETAFDGFWEKHQLKMEQYLQLWKFEQDFQQLVTEVEFLLNQQAELADVTGTIAQVKQKIKKLENLDENSQELLSKAQFVILHGHKLAANHHYALDLICQRCNELRYLSDILVNEIKAKRIQLSRTFKMHKLLQQARQCCDEGECLLANQEIDKFQSKEDAQKALQDIENFLEMALPFINYEPETLQYEFDVILSPELKVQMKTIQLKLENIRSIFENQQAGFRNLADKHVRPIQFVVPTPENLVTSGTPFFSSKQVGVGYSFFQACKLFSKGKKTWRQNQSNLKIEVVPDCQEKRSSGPSSSLDNGNSLDVLKNHVLNELIQTERVYVRELYTVLLGYRAEMDNPEMFDLMPPLLRNKKDILFGNMAEIYEFHNDIFLSSLENCAHAPERVGPCFLERKDDFQMYAKYCQNKPRSETIWRKYSECAFFQECQRKLKHRLRLDSYLLKPVQRITKYQLLLKELLKYSKDCEGSALLKKALDAMLDLLKSVNDSMHQIAINGYIGNLNELGKMIMQGGFSVWIGHKKGATKMKDLARFKPMQRHLFLYEKAIVFCKRRVESGEGSDRYPSYSFKHCWKMDEVGITEYVKGDNRKFEIWYGEKEEVYIVQASNVDVKMTWLKEIRNILLKQQELLTVKKRKQQDQLTERDKFQISLQQNDEKQQGAFISTEETELEHTSTVVEVCEAIASVQAEANTVWTEASQSAEISEEPAEWSSNYFYPTYDENEEENRPLMRPVSEMALLY

SEQ ID NO: 758064 - protein, 1274 aa, Homo sapiens
MPEPGKKPVSAFSKKPRSVEVAAGSPAVFEAETERAGVKVRWQRGGSDISASNKYGLATEGTRHTLTVREVGPADQGSYAVIAGSSKVKFDLKVIEAEKAEPMLAPAPAPAEATGAPGEAPAPAAELGESAPSPKGSSSAALNGPTPGAPDDPIGLFVMRPQDGEVTVGGSITFSARVAGASLLKPPVVKWFKGKWVDLSSKVGQHLQLHDSYDRASKVYLFELHITDAQPAFTGSYRCEVSTKDKFECSNFNLTVHEAMGTGDLDLLSAFRRTSLAGGGRRISDSHEDTGILDFSSLLKKRDSCGTPRDSKLEAPAEEDVWEILRQAPPSEYERIAFQYGVTDLRGMLKRLKGMRRDEKKSTAFQKKLEPAYQVSKGHKIRLTVELADHDAEVKWLKNGQEIQMSGSKYIFESIGAKRTLTISQCSLADDAAYQCVVGGEKCSTELFVKEPPVLITRPLEDQLVMVGQRVEFECEVSEEGAQVKWLKDGVELTREETFKYRFKKDGQRHHLIINEAMLEDAGHYALCTSGGQALRELIVQEKKLEVYQSIADLMVGAKDQAVFKCEVSDENVRGVWLKNGKELVPDSRIKVSHIGRVHKLTIDDVTPADEADYSFVPEGFACNLSAKLHFMEVKIDFVPRQEPPKIHLDCPGRIPDTIVVVAGNKLRLDVPISGDPAPTVIWQKAITQGNKAPARPAPDAPEDTGDSDEWVFDKKLLCETEGRVRVETTKDRSIFTVEGAEKEDEGVYTVTVKNPVGEDQVNLTVKVIDVPDAPAAPKISNVGEDSCTVQWEPPAYDGGQPILGYILERKKKKSYRWMRLNFDLIQELSHEARRMIEGVVYEMRVYAVNAIGMSRPSPASQPFMPIGPPSEPTHLAVEDVSDTTVSLKWRPPERVGAGGLDGYSVEYCPEGCSEWVAALQGLTEHTSILVKDLPTGARLLFRVRAHNMAGPGAPVTTTEPVTVQEILQRPRLQLPRHLRQTIQKKVGEPVNLLIPFQGKPRPQVTWTKEGQPLAGEEVSIRNSPTDTILFIRAARRVHSGTYQVTVRIENMEDKATLVLQVVDKPSPPQDLRVTDAWGLNVALEWKPPQDVGNTELWGYTVQKADKKTMEWFTVLEHYRRTHCVVPELIIGNGYYFRVFSQNMVGFSDRAATTKEPVFIPRPGITYEPPNYKALDFSEAPSFTQPLVNRSVIAGYTAMLCCAVRGSPKPKISWFKNGLDLGEDARFRMFSKQGVLTLEIRKPCPFDGGIYVCRATNLQGEARCECRLEVRVPQ

SEQ ID NO: 758065 - protein, 83 aa, Homo sapiens
EGPSVRSFSHSTNITGMLPEPSGNRTGFSAQKEPRSGGDGGRCIQQISCDTAVHEPCPECRGSTEQRAIPVPGGDAFRRLRRW

SEQ ID NO: 758066 - protein, 1189 aa, Homo sapiens
MPEPGKKPVSAFSKKPRSVEVAAGSPAVFEAETERAGVKVRWQRGGSDISASNKYGLATEGTRHTLTVREVGPADQGSYAVIAGSSKVKFDLKVIEAEKAEPMLAPAPAPAEATGAPGEAPAPAAELGESAPSPKGSSSAALNGPTPGAPDDPIGLFVMRPQDGEVTVGGSITFSARVAGASLLKPPVVKWFKGKWVDLSSKVGQHLQLHDSYDRASKVYLFELHITDAQPAFTGSYRCEVSTKDKFECSNFNLTVHEAMGTGDLDLLSAFRRTSLAGGGRRISDSHEDTGILDFSSLLKKRDSCGTPRDSKLEAPAEEDVWEILRQAPPSEYERIAFQYGVTDLRGMLKRLKGMRRDEKKSTAFQKKLEPAYQVSKGHKIRLTVELADHDAEVKWLKNGQEIQMSGSKYIFESIGAKRTLTISQCSLADDAAYQCVVGGEKCSTELFVKEPPVLITRPLEDQLVMVGQRVEFECEVSEEGAQVKWLKDGVELTREETFKYRFKKDGQRHHLIINEAMLEDAGHYALCTSGGQALRELIVQEKKLEVYQSIADLMVGAKDQAVFKCEVSDENVRGVWLKNGKELVPDSRIKVSHIGRVHKLTIDDVTPADEADYSFVPEGFACNLSAKLHFMEVKIDFVPRQEPPKIHLDCPGRIPDTIVVVAGNKLRLDVPISGDPAPTVIWQKAITQGNKAPARPAPDAPEDTGDSDEWVFDKKLLCETEGRVRVETTKDRSIFTVEGAEKEDEGVYTVTVKNPVGEDQVNLTVKVIDVPDAPAAPKISNVGEDSCTVQWEPPAYDGGQPILGYILERKKKKSYRWMRLNFDLIQELSHEARRMIEGVVYEMRVYAVNAIGMSRPSPASQPFMPIGPPSEPTHLAVEDVSDTTVSLKWRPPERVGAGGLDGYSVEYCPEGCSEWVAALQGLTEHTSILVKDLPTGARLLFRVRAHNMAGPGAPVTTTEPVTVQEILQRPRLQLPRHLRQTIQKKVGEPVNLLIPFQGKPRPQVTWTKEGQPLAGEEVSIRNSPTDTILFIRAARRVHSGTYQVTVRIENMEDKATLVLQVVDKPSPPQDLRVTDAWGLNVALEWKPPQDVGNTELWGYTVQKADKKTMEWFTVLEHYRRTHCVVPELIIGNGYYFRVFSQNMVGFSDRAATTKEPVFIPRPGIYVCRATNLQGEARCECRLEVRVPQ

SEQ ID NO: 758067 - protein, 975 aa, Homo sapiens
MPEPGKKPVSAFSKKPRSVEVAAGSPAVFEAETERAGVKVRWQRGGSDISASNKYGLATEGTRHTLTVREVGPADQGSYAVIAGSSKVKFDLKVIEAEKAEPMLAPAPAPAEATGAPGEAPAPAAELGESAPSPKGSSSAALNGPTPGAPDDPIGLFVMRPQDGEVTVGGSITFSARVAGASLLKPPVVKWFKGKWVDLSSKVGQHLQLHDSYDRASKVYLFELHITDAQPAFTGSYRCEVSTKDKFECSNFNLTVHEAMGTGDLDLLSAFRRTSLAGGGRRISDSHEDTGILDFSSLLKKRDSCGTPRDSKLEAPAEEDVWEILRQAPPSEYERIAFQYGVTDLRGMLKRLKGMRRDEKKSTAFQKKLEPAYQVSKGHKIRLTVELADHDAEVKWLKNGQEIQMSGSKYIFESIGAKRTLTISQCSLADDAAYQCVVGGEKCSTELFVKEPPVLITRPLEDQLVMVGQRVEFECEVSEEGAQVKWLKDGVELTREETFKYRFKKDGQRHHLIINEAMLEDAGHYALCTSGGQALRELIVQEKKLEVYQSIADLMVGAKDQAVFKCEVSDENVRGVWLKNGKELVPDSRIKVSHIGRVHKLTIDDVTPADEADYSFVPEGFACNLSAKLHFMEVKIDFVPRQEPPKIHLDCPGRIPDTIVVVAGNKLRLDVPISGDPAPTVIWQKAITQGNKAPARPAPDAPEDTGDSDEWVFDKKLLCETEGRVRVETTKDRSIFTVEGAEKEDEGVYTVTVKNPVGEDQVNLTVKVIDVPDAPAAPKISNVGEDSCTVQWEPPAYDGGQPILGYILERKKKKSYRWMRLNFDLIQELSHEARRMIEGVVYEMRVYAVNAIGMSRPSPASQPFMPIGPPSEPTHLAVEDVSDTTVSLKWRPPERVGAGGLDGYSVEYCPEGCSEWVAALQGLTEHTSILVKDLPTGARLLFRVRAHNMAGPGAPVTTTEPVTVQEILRECPFVQ

SEQ ID NO: 758068 - protein, 71 aa, Homo sapiens
RDPRDSKLEAPAEEDVWEILRQAPPSEYERIAFQYGVTDLRGMLKRLKGMRRDEKKSTGYPSSEGRGEGTG

SEQ ID NO: 758069 - protein, 108 aa, Homo sapiens
GSDLDLTPTLHPTQLLCETEGRVRVETTKDRSIFTVEGAEKEDEGVYTVTVKNPVGEDQVNLTVKVIGEAGRGPSWRTQRGSPKEGPSVRSFSHSTNITGMLPEPSGN

SEQ ID NO: 758070 - protein, 117 aa, Homo sapiens
MERSTTPTSPEGTDQNRRERRDRGCCDWRLMGLHRAPSSHPTVFLHICSAHHSPALEFSALPLLPSPPRQTGFIQPPGRPTHLLLQQAALPRCTAQRIKCIYLPEDMTKAIPGVAFM

SEQ ID NO: 758071 - protein, 207 aa, Homo sapiens
WAFGTAEEQCPAMAGARRLELGEALALGSGWRHACHALLYAPDPGMLFGRIPLRYAILMQMRFDGRLGFPGGFVDTQDRSLEDGLNRELREELGEAAAAFRVERTDYRSSHVGSGPRVVAHFYAKRLTLEELLAVEAGATRAKDHGLEVLGLVRVPLYTLRDGVGGLPTFLENSFIGSAREQLLEALQDLGLLQSGSISGLKIPAHH

SEQ ID NO: 758072 - protein, 207 aa, Homo sapiens; identical to SEQ ID NO: 758071

SEQ ID NO: 758073 - protein, 203 aa, Homo sapiens
PQLSPDGLLWGAPANPRFPLPQMQMRFDGRLGFPGGFVDTQDRSLEDGLNRELREELGEAAAAFRVERTDYRSSHVGSGPRVVAHFYAKRLTLEELLAVEAGATRAKDHGLEVGPAWDSVPFPISSSPKAFSPPRKHPWRKVFAPLTLPSPQLSWWSWDRDHLYSELVLPTWAFCKGLSHPLPGEILSRTHSSMSLCCSLLTV

SEQ ID NO: 758074 - protein, 207 aa, Homo sapiens; identical to SEQ ID NO: 758071

SEQ ID NO: 758075 - protein, 239 aa, Homo sapiens
WAFGTAEEQCPAMAGARRLELGEALALGSGWRHACHALLYAPDPGMLFGRIPLRYAILMQMRFDGRLGFPGGFVDTQDRSLEDGLNRELREELGEAAAAFRVERTDYRSSHVGSGPRVVAHFYAKRLTLEELLAVEAGATRAKDHGLEVGPAWDSVPFPISSSPKAFSPPRKHPWRKVFAPLTLPSPQLSWWSWDRDHLYSELVLPTWAFCKGLSHPLPGEILSRTHSSMSLCCSLLTV

SEQ ID NO: 758076 - protein, 207 aa, Homo sapiens; identical to SEQ ID NO: 758071

SEQ ID NO: 758077 - protein, 207 aa, Homo sapiens; identical to SEQ ID NO: 758071

SEQ ID NO: 758078 - protein, 80 aa, Homo sapiens
YTHAMTHEKGKGENTNYPGAGLFRLFLQKEKSFSSCAGFLCAAEPGPSAACSLGKGADSGAPSRPQSKRGEPRRRSWHCR

SEQ ID NO: 758079 - protein, 80 aa, Homo sapiens; identical to SEQ ID NO: 758078

SEQ ID NO: 758080 - protein, 80 aa, Homo sapiens; identical to SEQ ID NO: 758078

SEQ ID NO: 758081 - protein, 269 aa, Homo sapiens
LNAARVWRLRTRQTNIQSCWNATETGSQTGHARPALGSRQVVRDMTSEFFSAQLRAQISDDTTHPISYYKPEFYMPDDGGTAHLSVVAEDGSAVSATSTINLYFGSKVRSPVSGILLNNEMDDFSSTSITNEFGVPPSPANFIQPGKQPLSSMCPTIMVGQDGQVRMVVGAAGGTQITMATALAIIYNLWFGYDVKWAVEEPRLHNQLLPNVTTVERNIDQEVTAALETRHHHTQITSTFIAVVQAIVRMAGGWAAASDSRKGGEPAGY

SEQ ID NO: 758082 - protein, 225 aa, Homo sapiens
MTSEFFSAQLRAQISDDTTHPISYYKPEFYMPDDGGTAHLSVVAEDGSAVSATSTINLYFGSKVRSPVSGILLNNEMDDFSSTSITNEFGVPPSPANFIQPGKQPLSSMCPTIMVGQDGQVRMVVGAAGGTQITMATALAIIYNLWFGYDVKWAVEEPRLHNQLLPNVTTVERNIDQEVTAALETRHHHTQITSTFIAVVQAIVRMAGGWAAASDSRKGGEPAGY

SEQ ID NO: 758083 - protein, 210 aa, Homo sapiens
MVFYYSTGIFKDAGVQQPIYATISAGVVNTIFTLLSLFLVERAGRRTLHMIGLGGMAFCSTLMTVSLLLKNHYNGMSFVCIGAILVFVACFEIGPGPIPWFIVAELFSQGPRPAAMAVAGCSNWTSNFLVGLLFPSAAYYLGAYVFIIFTGFLITFLAFTFFKVPETRGRTFEDITRAFEGQAHGADRSGKDGVMGMNSIEPAKETTTNV

SEQ ID NO: 758084 - protein, 102 aa, Homo sapiens
MEPRAMCPPVGAMRGSRRDPASSSLSPDHLAQLQPGAGFLFCSAPALSGSFPPRPHHRVTWQLLAPGFATSSGPRTGTCSVWTQERGSLGGHRLGRFRKVCG

SEQ ID NO: 758085 - protein, 983 aa, Homo sapiens
MDCQLSILLLLSCSVLDSFGELIPQPSNEVNLLDSKTIQGELGWISYPSHGWEEISGVDEHYTPIRTYQVCNVMDHSQNNWLRTNWVPRNSAQKIYVELKFTLRDCNSIPLVLGTCKETFNLYYMESDDDHGVKFREHQFTKIDTIAADESFTQMDLGDRILKLNTEIREVGPVNKKGFYLAFQDVGACVALVSVRVYFKKCPFTVKNLAMFPDTVPMDSQSLVEVRGSCVNNSKEEDPPRMYCSTEGEWLVPIGKCSCNAGYEERGFMCQACRPGFYKALDGNMKCAKCPPHSSTQEDGSMNCRCENNYFRADKDPPSMACTRPPSSPRNVISNINETSVILDWSWPLDTGGRKDVTFNIICKKCGWNIKQCEPCSPNVRFLPRQFGLTNTTVTVTDLLAHTNYTFEIDAVNGVSELSSPPRQFAAVSITTNQAAPSPVLTIKKDRTSRNSISLSWQEPEHPNGIILDYEVKYYEKQEQETSYTILRARGTNVTISSLKPDTIYVFQIRARTAAGYGTNSRKFEFETSPDSFSISGESSQVVMIAISAAVAIILLTVVIYVLIGRFCGYKSKHGADEKRLHFGNGHLKLPGLRTYVDPHTYEDPTQAVHEFAKELDATNISIDKVVGAGEFGEVCSGRLKLPSKKEISVAIKTLKVGYTEKQRRDFLGEASIMGQFDHPNIIRLEGVVTKSKPVMIVTEYMENGSLDSFLRKHDAQFTVIQLVGMLRGIASGMKYLSDMGYVHRDLAARNILINSNLVCKVSDFGLSRVLEDDPEAAYTTRGGKIPIRWTSPEAIAYRKFTSASDVWSYGIVLWEVMSYGERPYWEMSNQDVIKAVDEGYRLPPPMDCPAALYQLMLDCWQKDRNNRPKFEQIVSILDKLIRNPGSLKIITSAAARPSNLLLDQSNVDITTFRTTGDWLNGVWTAHCKEIFTGVEYSSCDTIAKISTDDMKKVGVTVVGPQKKIISSIKALETQSKNGPVPV

SEQ ID NO: 758086 - protein, 539 aa, Homo sapiens
MDCQLSILLLLSCSVLDSFGELIPQPSNEVNLLDSKTIQGELGWISYPSHGWEEISGVDEHYTPIRTYQVCNVMDHSQNNWLRTNWVPRNSAQKIYVELKFTLRDCNSIPLVLGTCKETFNLYYMESDDDHGVKFREHQFTKIDTIAADESFTQMDLGDRILKLNTEIREVGPVNKKGFYLAFQDVGACVALVSVRVYFKKCPFTVKNLAMFPDTVPMDSQSLVEVRGSCVNNSKEEDPPRMYCSTEGEWLVPIGKCSCNAGYEERGFMCQACRPGFYKALDGNMKCAKCPPHSSTQEDGSMNCRCENNYFRADKDPPSMACTRPPSSPRNVISNINETSVILDWSWPLDTGGRKDVTFNIICKKCGWNIKQCEPCSPNVRFLPRQFGLTNTTVTVTDLLAHTNYTFEIDAVNGVSELSSPPRQFAAVSITTNQAAPSPVLTIKKDRTSRNSISLSWQEPEHPNGIILDYEVKYYEKQEQETSYTILRARGTNVTISSLKPDTIYVFQIRARTAAGYGTNSRKFEFETSPDCMYYFNAV

SEQ ID NO: 758087 - protein, 983 aa, Homo sapiens; identical to SEQ ID NO: 758085

SEQ ID NO: 758088 - protein, 983 aa, Homo sapiens; identical to SEQ ID NO: 758085

SEQ ID NO: 758089 - protein, 666 aa, Homo sapiens
MDCQLSILLLLSCSVLDSFGELIPQPSNEVNLLDSKTIQGELGWISYPSHGWEEISGVDEHYTPIRTYQVCNVMDHSQNNWLRTNWVPRNSAQKIYVELKFTLRDCNSIPLVLGTCKETFNLYYMESDDDHGVKFREHQFTKIDTIAADESFTQMDLGDRILKLNTEIREVGPVNKKGFYLAFQDVGACVALVSVRVYFKKCPFTVKNLAMFPDTVPMDSQSLVEVRGSCVNNSKEEDPPRMYCSTEGEWLVPIGKCSCNAGYEERGFMCQACRPGFYKALDGNMKCAKCPPHSSTQEDGSMNCRCENNYFRADKDPPSMACTRPPSSPRNVISNINETSVILDWSWPLDTGGRKDVTFNIICKKCGWNIKQCEPCSPNVRFLPRQFGLTNTTVTVTDLLAHTNYTFEIDAVNGVSELSSPPRQFAAVSITTNQAAPSPVLTIKKDRTSRNSISLSWQEPEHPNGIILDYEVKYYEKQEQETSYTILRARGTNVTISSLKPDTIYVFQIRARTAAGYGTNSRKFEFETSPDSFSISGESSQVVMIAISAAVAIILLTVVIYVLIGRFCGYKSKHGADEKRLHFGNGHLKLPGLRTYVDPHTYEDPTQAVHEFAKELDATNISIDKVVGAVLTSEQLHDAEGFSLAGFNVSSQECTFLQHGACGSKC

SEQ ID NO: 758090 - protein, 712 aa, Homo sapiens
MGMRIKLQSTNHPNNLLKELNKCRLSETMCDVTIVVGSRSFPAHKAVLACAAGYFQNLFLNTGLDAARTYVVDFITPANFEKVLSFVYTSELFTDLINVGVIYEVAERLGMEDLLQACHSTFPDLESTARAKPLTSTSESHSGTLSCPSAEPAHPLGELRGGGDYLGADRNYVLPSDAGGSYKEEEKNVASDANHSLHLPQPPPPPPKTEDHDTPAPFTSIPSMMTQPLLGTVSTGIQTSTSSCQPYKVQSNGDFSKNSFLTPDNAVDITTGTNSCLSNSEHSKDPGFGQMDELQLEDLGDDDLQFEDPAEDIGTTEEVIELSDDSEDELAFGENDNRENKAMPCQVCKKVLEPNIQLIRQHARDHVDLLTGNCKVCETHFQDRNSRVTHVLSHIGIFLFSCDMCETKFFTQWQLTLHRRDGIFENNIIVHPNDPLPGKLGLFSGAASPELKCAACGKVLAKDFHVVRGHILDHLNLKGQACSVCDQRHLNLCSLMWHTLSHLGISVFSCSVCANSFVDWHLLEKHMAVHQSLEDALFHCRLCSQSFKSEAAYRYHVSQHKCNSGLDARPGFGLQHPALQKRKLPAEEFLGEELALQGQPGNSKYSCKVCGKRFAHTSEFNYHRRIHTGEKPYQCKVCHKFFRGRSTIKCHLKTHSGALMYRCTVCGHYSSTLNLMSKHVGVHKGSLPPDFTIEQTFMYIIHSKEADKNPDS

SEQ ID NO: 758091 - protein, 712 aa, Homo sapiens; identical to SEQ ID NO: 758090

SEQ ID NO: 758092 - protein, 157 aa, Homo sapiens
GGVVCVRACVAGGSHCLFNSCCCCTSASLPARERHEWPGPAAAAAAAAAAARRSQTQREQTEKETNTPKKKESKVSMSKNSKLLSTSAKRIQKELADITLDPPPNCSAGPKGDNIYEWRSTILGPPGSVYEGGVFFLDITFTPEYPFKPPKVRNLPV

SEQ ID NO: 758093 - protein, 193 aa, Homo sapiens
MSDDDSRASTSSSSSSSSNQQTEKETNTPKKKESKVSMSKNSKLLSTSAKRIQKELADITLDPPPNCSAGPKGDNIYEWRSTILGPPGSVYEGGVFFLDITFTPEYPFKPPKVTFRTRIYHCNINSQGVICLDILKDNWSPALTISKVLLSICSLLTDCNPADPLVGSIATQYMTNRAEHDRMARQWTKRYAT

SEQ ID NO: 758094 - protein, 188 aa, Homo sapiens
PRLAGHSGPRGLVGSGHVGFVTEDSGRVVVLSEASDLRPVGGALPGIQKELADITLDPPPNCSAGPKGDNIYEWRSTILGPPGSVYEGGVFFLDITFTPEYPFKPPKVTFRTRIYHCNINSQGVICLDILKDNWSPALTISKVLLSICSLLTDCNPADPLVGSIATQYMTNRAEHDRMARQWTKRYAT

SEQ ID NO: 758095 - protein, 160 aa, Homo sapiens
MKEVGRPREVRGRPGKSRIQKELADITLDPPPNCSAGPKGDNIYEWRSTILGPPGSVYEGGVFFLDITFTPEYPFKPPKVTFRTRIYHCNINSQGVICLDILKDNWSPALTISKVLLSICSLLTDCNPADPLVGSIATQYMTNRAEHDRMARQWTKRYAT

SEQ ID NO: 758096 - protein, 175 aa, Homo sapiens
MSDDDSRASTSSSSSSSSNQQTEKETNTPKKKESKVSMSKITLDPPPNCSAGPKGDNIYEWRSTILGPPGSVYEGGVFFLDITFTPEYPFKPPKVTFRTRIYHCNINSQGVICLDILKDNWSPALTISKVLLSICSLLTDCNPADPLVGSIATQYMTNRAEHDRMARQWTKRYAT

SEQ ID NO: 758097 - protein, 67 aa, Homo sapiens
  misc_feature (7)..(8): Xaa can be any naturally occurring amino acid
AGWYPRXXGIDNWSPALTISKVLLSICSLLTDCNPADPLVGSIATQYMTNRAEHDRMARQWTKRYAT

SEQ ID NO: 758098 - protein, 193 aa, Homo sapiens; identical to SEQ ID NO: 758093

SEQ ID NO: 758099 - protein, 193 aa, Homo sapiens; identical to SEQ ID NO: 758093

SEQ ID NO: 758100 - protein, 232 aa, Homo sapiens
GGVVCVRACVAGGSHCLFNSCCCCTSASLPARERHEWPGPAAAAAAAAAAARRSQTQREQTEKETNTPKKKESKVSMSKNSKLLSTSAKRIQKELADITLDPPPNCSAGPKGDNIYEWRSTILGPPGSVYEGGVFFLDITFTPEYPFKPPKVTFRTRIYHCNINSQGVICLDILKDNWSPALTISKVLLSICSLLTDCNPADPLVGSIATQYMTNRAEHDRMARQWTKRYAT

SEQ ID NO: 758101 - protein, 193 aa, Homo sapiens; identical to SEQ ID NO: 758093

SEQ ID NO: 758102 - protein, 193 aa, Homo sapiens
MSDDDSRASTSSSSSSSSNQQTEKETNTPKKKESKVSMSKNSKLLSTSAKRIQKELADITLDPPPNCSAGPKGDNIYEWRSTILGPPGSVYEGGVFFLDITFTPEYPFKPPKVTFRTRIYHCNINSQGVICLDILKDNWSPALTISKVLLSICSLLTDCNPADPLVGSIATQYMTNRAEHDRYYSVLFPKILL

SEQ ID NO: 758103 - protein, 866 aa, Homo sapiens
MNGEQQLDADAGSGMEEVELSWEDYLEETGSTAVPYGSFKHVDTRLQNGFAPGMKLEVAVRTDPETYWVATVITTCEQLLLLRYDGYGEDRRADFWCDIRKADLYPIGWCEQNKKTLEAPEGIRDKVSDWDEFLRQTLIGACSPPVPLLEGLRNGRNPLDLIAPGSRLECQAFQDSLSTWIVTVVENIGGRLKLRYEGLESSDNYEHWLYYLDPFLHHVGWAAQQGYELQPPSAIRHLKNEAEWQEILAKVKEEEEEPLPSYLFKDKQVIGIHTFSVNMKLEAVDPWSPFGISPATVVKVFDEKYFLVEMDDLRPENHARRSFVCHADSPGIFPVQWSLKNGLHISPPPGYPSQDFDWADYLKQCGAEAAPQRCFPPLISEHEFKENMKLEAVNPILPEEVCVATITAVRGSYLWLQLEGSKKPIPECIVSVESMDIFPLGWCETNGHPLSTPRRARVYKQRKIAVVQPEKQVPSSRTVHEGLRNQELNSTESVMINGKYCCPKIYFNHRCFSGPYLNKGRIAELPQCVGPGNCVLVLREVLTLLINAAYKPSRVLRELQLDKDSVWHGCGEVLKAKYKGKSYRATVEIVKTADRVTEFCRQTCIKLECCPNLFGPRMVLDKCSENCSVLTKTKYTHYYGKKKNKRIGRPPGGHSNLACALKKASKRRKRRKNVFVHKKKRSSASVDNTPAGSPQGSGGEDEDDPDEGDDDSLSEGSTSEQQDELQEESEMSEKKSCSSSPTQSEISTSLPPDRQRRKRELRTFSFSDDENKPPSPKEIRIEVAERLHLDSNPLKWSVADVVRFIRSTDCAPLARIFLDQEIDGQALLLLTLPTVQECMDLKLGPAIKLCHHIERIKFAFYEQFAN

SEQ ID NO: 758104 - protein, 824 aa, Homo sapiens
MNGEQQLDADAGSGMEEVELSWEDYLEETGSTAVPYGSFKHVDTRLQNGFAPGMKLEVAVRTDPETYWVATVITTCEQLLLLRYDGYGEDRRADFWCDIRKADLYPIGWCEQNKKTLEAPEGIRDKVSDWDEFLRQTLIGACSPPVPLLEGLRNGRNPLDLIAPGSRLECQAFQDSLSTWIVTVVENIGGRLKLRYEGLESSDNYEHWLYYLDPFLHHVGWAAQQGYELQPPSAIRHLKNEAEWQEILAKVKEEEEEPLPSYLFKDKQVIGIHTFSVNMKLEAVDPWSPFGISPATVVKVFDEKYFLVEMDDLRPENHARRSFVCHADSPGIFPVQWSLKNGLHISPPPGYPSQDFDWADYLKQCGAEAAPQRCFPPLISEHEFKENMKLEAVNPILPEEVCVATITAVRGSYLWLQLEGSKKPIPECIVSVESMDIFPLGWCETNGHPLSTPRRARVYKQRKIAVVQPEKQVPSSRTVHEGLRNQELNSTESVMINGKYCCPKIYFNHRCFSGPYLNKGRIAELPQCVGPGNCVLVLREVLTLLINAAYKPSRVLRELQLDKDSVWHGCGEVLKAKYKGKSYRATVEIVKTADRVTEFCRQTCIKLECCPNLFGPRMVLDKCSENCSVLTKTKYTHYYGKKKNKRIGRPPGGHSNLACALKKASKRRKRRKNVFVHKKKRSSASVDNTPAGSPQGSGGEDEDDPDEGDDDSLSEGSTSEQQDELQEESEMSEKKSCSSSPTQSEISTSLPPDRQRRKRELRTFSFSDDENKPPSPKQEIDGQALLLLTLPTVQECMDLKLGPAIKLCHHIERIKFAFYEQFAN

SEQ ID NO: 758105 - protein, 824 aa, Homo sapiens; identical to SEQ ID NO: 758104

SEQ ID NO: 758106 - protein, 824 aa, Homo sapiens; identical to SEQ ID NO: 758104

SEQ ID NO: 758107 - protein, 866 aa, Homo sapiens; identical to SEQ ID NO: 758103

SEQ ID NO: 758108 - protein, 344 aa, Homo sapiens
MQLPQCVGPGNCVLVLREVLTLLINAAYKPSRVLRELQLDKDSVWHGCGEVLKAKYKGKSYRATVEIVKTADRVTEFCRQTCIKLECCPNLFGPRMVLDKCSENCSVLTKTKYTHYYGKKKNKRIGRPPGGHSNLACALKKASKRRKRRKNVFVHKKKRSSASVDNTPAGSPQGSGGEDEDDPDEGDDDSLSEGSTSEQQDELQEESEMSEKKSCSSSPTQSEISTSLPPDRQRRKRELRTFSFSDDENKPPSPKEIRIEVAERLHLDSNPLKWSVADVVRFIRSTDCAPLARIFLDQEIDGQALLLLTLPTVQECMDLKLGPAIKLCHHIERIKFAFYEQFAN

SEQ ID NO: 758109 - protein, 866 aa, Homo sapiens; identical to SEQ ID NO: 758103

SEQ ID NO: 758110 - protein, 824 aa, Homo sapiens; identical to SEQ ID NO: 758104

SEQ ID NO: 758111 - protein, 570 aa, Homo sapiens
MNGEQQLDADAGSGMEEVELSWEDYLEETGSTAVPYGSFKHVDTRLQNGFAPGMKLEVAVRTDPETYWVATVITTCEQLLLLRYDGYGEDRRADFWCDIRKADLYPIGWCEQNKKTLEAPEGIRDKVSDWDEFLRQTLIGACSPPVPLLEGLRNGRNPLDLIAPGSRLECQAFQDSLSTWIVTVVENIGGRLKLRYEGLESSDNYEHWLYYLDPFLHHVGWAAQQGYELQPPSAIRHLKNEAEWQEILAKVKEEEEEPLPSYLFKDKQVIGIHTFSVNMKLEAVDPWSPFGISPATVVKVFDEKYFLVEMDDLRPENHARRSFVCHADSPGIFPVQWSLKNGLHISPPPGYPSQDFDWADYLKQCGAEAAPQRCFPPLISEHEFKENMKLEAVNPILPEEVCVATITAVRGSYLWLQLEGSKKPIPECIVSVESMDIFPLGWCETNGHPLSTPRRARVYKQRKIAVVQPEKQVPSSRTVHEGLRNQELNSTESVMINGKYCCPKIYFNHRCFSGPYLNKGRIAELPQCVGPGNCVLVLREVLQTQPCPSGAPAGQRLCVARMWGSPKSQI

SEQ ID NO: 758112 - protein, 627 aa, Homo sapiens
MNAEWQEILAKVKEEEEEPLPSYLFKDKQVIGIHTFSVNMKLEAVDPWSPFGISPATVVKVFDEKYFLVEMDDLRPENHARRSFVCHADSPGIFPVQWSLKNGLHISPPPGYPSQDFDWADYLKQCGAEAAPQRCFPPLISEHEFKENMKLEAVNPILPEEVCVATITAVRGSYLWLQLEGSKKPIPECIVSVESMDIFPLGWCETNGHPLSTPRRARVYKQRKIAVVQPEKQVPSSRTVHEGLRNQELNSTESVMINGKYCCPKIYFNHRCFSGPYLNKGRIAELPQCVGPGNCVLVLREVLTLLINAAYKPSRVLRELQLDKDSVWHGCGEVLKAKYKGKSYRATVEIVKTADRVTEFCRQTCIKLECCPNLFGPRMVLDKCSENCSVLTKTKYTHYYGKKKNKRIGRPPGGHSNLACALKKASKRRKRRKNVFVHKKKRSSASVDNTPAGSPQGSGGEDEDDPDEGDDDSLSEGSTSEQQDELQEESEMSEKKSCSSSPTQSEISTSLPPDRQRRKRELRTFSFSDDENKPPSPKEIRIEVAERLHLDSNPLKWSVADVVRFIRSTDCAPLARIFLDQEIDGQALLLLTLPTVQECMDLKLGPAIKLCHHIERIKFAFYEQFAN

SEQ ID NO: 758113 - protein, 866 aa, Homo sapiens; identical to SEQ ID NO: 758103

SEQ ID NO: 758114 - protein, 165 aa, Homo sapiens
IPDEGQANGRSARGGGTRASGIRPLLRSCHLVRASHVRATAARFAGPVLQVRPANPSGIPAALSTTRGEAQAGSGLGQGGHWVPGDASPLPGRSARGHSAVGGPRRRRVSCATASGPSAPSCWLGAWVARGAGPPAHQPAESLPPARPQPGGMALGRERGSRARE

SEQ ID NO: 758115 - protein, 121 aa, Homo sapiens
MGRIFLDHIGGTRLFSCANCDTILTNRSELISTRFTGATGRAFLFNKVVNLQYSEVQDRVMLTGRHMVRDVSCKNCNSKLGWIYEFATEDSQRYKEGRVILERALVRESEGFEEHVPSDNS

SEQ ID NO: 758116 - protein, 121 aa, Homo sapiens; identical to SEQ ID NO: 758115

SEQ ID NO: 758117 - protein, 121 aa, Homo sapiens; identical to SEQ ID NO: 758115

SEQ ID NO: 758118 - protein, 121 aa, Homo sapiens; identical to SEQ ID NO: 758115

SEQ ID NO: 758119 - protein, 121 aa, Homo sapiens; identical to SEQ ID NO: 758115

SEQ ID NO: 758120 - protein, 121 aa, Homo sapiens; identical to SEQ ID NO: 758115

SEQ ID NO: 758121 - protein, 121 aa, Homo sapiens; identical to SEQ ID NO: 758115

SEQ ID NO: 758122 - protein, 121 aa, Homo sapiens; identical to SEQ ID NO: 758115

SEQ ID NO: 758123 - protein, 121 aa, Homo sapiens; identical to SEQ ID NO: 758115

SEQ ID NO: 758124 - protein, 121 aa, Homo sapiens; identical to SEQ ID NO: 758115

SEQ ID NO: 758125 - protein, 121 aa, Homo sapiens; identical to SEQ ID NO: 758115

SEQ ID NO: 758126 - protein, 121 aa, Homo sapiens; identical to SEQ ID NO: 758115

SEQ ID NO: 758127 - protein, 177 aa, Homo sapiens
APLGCRVSPPGGRPGRPSSASFGLRPSLRLQSGGWACPCNPFPVPSLQVFRTSAIKMGRIFLDHIGGTRLFSCANCDTILTNRSELISTRFTGATGRAFLFNKVVNLQYSEVQDRVMLTGRHMVRDVSCKNCNSKLGWIYEFATEDSQRYKEGRVILERALVRESEGFEEHVPSDNS

SEQ ID NO: 758128 - protein, 121 aa, Homo sapiens; identical to SEQ ID NO: 758115

SEQ ID NO: 758129 - protein, 121 aa, Homo sapiens; identical to SEQ ID NO: 758115

SEQ ID NO: 758130 - protein, 121 aa, Homo sapiens; identical to SEQ ID NO: 758115

SEQ ID NO: 758131 - protein, 121 aa, Homo sapiens; identical to SEQ ID NO: 758115

SEQ ID NO: 758132 - protein, 140 aa, Homo sapiens
GGSHRRSGDLLVFRTSAIKMGRIFLDHIGGTRLFSCANCDTILTNRSELISTRFTGATGRAFLFNKVVNLQYSEVQDRVMLTGRHMVRDVSCKNCNSKLGWIYEFATEDSQRYKEGRVILERALVRESEGFEEHVPSDNS

SEQ ID NO: 758133 - protein, 128 aa, Homo sapiens
MKLQLCLWSLYFLTKFGGTRLFSCANCDTILTNRSELISTRFTGATGRAFLFNKVVNLQYSEVQDRVMLTGRHMVRDVSCKNCNSKLGWIYEFATEDSQRYKEGRVILERALVRESEGFEEHVPSDNS

SEQ ID NO: 758134 - protein, 121 aa, Homo sapiens; identical to SEQ ID NO: 758115

SEQ ID NO: 758135 - protein, 84 aa, Homo sapiens
  misc_feature (18)..(18): Xaa can be any naturally occurring amino acid
PRPQYGLEKVFVITCALXVQDRVMLTGRHMVRDVSCKNCNSKLGWIYEFATEDSQRYKEGRVILERALVRESEGFEEHVPSDNS

SEQ ID NO: 758136 - protein, 121 aa, Homo sapiens; identical to SEQ ID NO: 758115

SEQ ID NO: 758137 - protein, 224 aa, Homo sapiens
RLTLRPNQGEAGPRPGLTKPGDSGGRGASYQLKSDKPLAAADLTAAQEICWLNSEAFLFSRSLLDEDARRACTVVSRIRLSPVIEILGEQFFPVTLYRVSYPCVVLLWWQQLVDDESLILTRLENLIVHRPLAHGRLHVAVRMLPLCTAKVVNLQYSEVQDRVMLTGRHMVRDVSCKNCNSKLGWIYEFATEDSQRYKEGRVILERALVRESEGFEEHVPSDNS

SEQ ID NO: 758138 - protein, 143 aa, Homo sapiens
LSIQKCRSAASCEITATCSICSVRSSPAGLQPEYANREGRKFPGQAVEGEIIWICLKGERIKRADISGRNNVQACNWNLNEYLLSMLTAGAFPPICPQLHTQTSGSTEKTSAPTPGASGAGFYLHFSGFKYFENFFKKHFSLL

SEQ ID NO: 758139 - protein, 594 aa, Homo sapiens
MSKKRKWDDDYVRYWFTCTTEVDGTQRPQCVLCNSVFSNADLRPSKLSDHFNRQHGGVAGHDLNSLKHMPAPSDQSETLKAFGVASHEDTLLQASYQFAYLCAKEKNPHTVAEKLVKPCALEIAQIVLGPDAQKKLQQVPLSDDVIHSRIDEMSQDILQQVLEDIKASPLKVGIQLAETTDMDDCSQLMAFVRYIKEREIVEEFLFCEPLQLSMKGIDVFNLFRDFFLKHKIALDVCGSVCTDGASSMLGENSEFVAYVKKEIPHIVVTHCLLNPHALVIKTLPTKLRDALFTVVRVINFIKGRAPNHRLFQAFFEEIGIEYSVLLFHTEMRWLSRGQILTHIFEMYEEINQFLHHKSSNLVDGFENKEFKIHLAYLADLFKHLNELSASMQRTGMNTVSAREKLSAFVRKFPFWQKRIEKRNFTNFPFLEEIIVSDNEGIFIAAEITLHLQQLSNFFHGYFSIGDLNEASKWILDPFLFNIDFVDDSYLMKNDLAELRASGQILMEFETMKLEDFWCAQFTAFPNLAKTALEILMPFATTYLCELGFSSLLHFKTKSRSCFNLSDDIRVAISKKVPRFSDIIEQKLQLQQKSL

SEQ ID NO: 758140 - protein, 594 aa, Homo sapiens; identical to SEQ ID NO: 758139

SEQ ID NO: 758141 - protein, 594 aa, Homo sapiens; identical to SEQ ID NO: 758139

SEQ ID NO: 758142 - protein, 594 aa, Homo sapiens; identical to SEQ ID NO: 758139

SEQ ID NO: 758143 - protein, 1670 aa, Homo sapiens
MSARTAPRPQVLLLPLLLVLLAAAPAASKGCVCKDKGQCFCDGAKGEKGEKGFPGPPGSPGQKGFTGPEGLPGPQGPKGFPGLPGLTGSKGVRGISGLPGFSGSPGLPGTPGNTGPYGLVGVPGCSGSKGEQGFPGLPGTPGYPGIPGAAGLKGQKGAPAKGEDIELDAKGDPGLPGAPGPQGLPGPPGFPGPVGPPGPPGFFGFPGAMGPRGPKGHMGERVIGHKGERGVKGLTGPPGPPGTVIVTLTGPDNRTDLKGEKGDKGAMGEPGPPGPSGLPGESYGSEKGAPGDPGLQGKPGKDGVPGFPGSEGVKGNRGFPGLMGEDGIKGQKGDIGPPGFRGPTEYYDTYQEKGDEGTPGPPGPRGARGPQGPSGPPGVPGSPGSSRPGLRGAPGWPGLKGSKGERGRPGKDAMGTPGSPGCAGSPGLPGSPGPPGPPGDIVFRKGPPGDHGLPGYLGSPGIPGVDGPKGEPGLLCTQCPYIPGPPGLPGLPGLHGVKGIPGRQGAAGLKGSPGSPGNTGLPGFPGFPGAQGDPGLKGEKGETLQPEGQVGVPGDPGLRGQPGRKGLDGIPGTLGVKGLPGPKGELALSGEKGDQGPPGDPGSPGSPGPAGPAGPPGYGPQGEPGLQGTQGVPGAPGPPGEAGPRGELSVSTPVPGPPGPPGPPGHPGPQGPPGIPGSLGKCGDPGLPGPDGEPGIPGIGFPGPPGPKGDQGFPGTKGSLGCPGKMGEPGLPGKPGLPGAKGEPAVAMPGGPGTPGFPGERGNSGEHGEIGLPGLPGLPGTPGNEGLDGPRGDPGQPGPPGEQGPPGRCIEGPRGAQGLPGLNGLKGQQGRRGKTGPKGDPGIPGLDRSGFPGETGSPGIPGHQGEMGPLGQRGYPGNPGILGPPGEDGVIGMMGFPGAIGPPGPPGNPGTPGQRGSPGIPGVKGQRGTPGAKGEQGDKGNPGPSEISHVIGDKGEPGLKGFAGNPGEKGNRGVPGMPGLKGLKGLPGPAGPPGPRGDLGSTGNPGEPGLRGIPGSMGNMGMPGSKGKRGTLGFPGRAGRPGLPGIHGLQGDKGEPGYSEGTRPGPPGPTGDPGLPGDMGKKGEMGQPGPPGHLGPAGPEGAPGSPGSPGLPGKPGPHGDLGFKGIKGLLGPPGIRGPPGLPGFPGSPGPMGIRGDQGRDGIPGPAGEKGETGLLRAPPGPRGNPGAQGAKGDRGAPGFPGLPGRKGAMGDAGPRGPTGIEGFPGPPGLPGAIIPGQTGNRGPPGSRGSPGAPGPPGPPGSHVIGIKGDKGSMGHPGPKGPPGTAGDMGPPGRLGAPGTPGLPGPRGDPGFQGFPGVKGEKGNPGFLGSIGPPGPIGPKGPPGVRGDPGTLKIISLPGSPGPPGTPGEPGMQGEPGPPGPPGNLGPCGPRGKPGKDGKPGTPGPAGEKGNKGSKGEPGPAGSDGLPGLKGKRGDSGSPATWTTRGFVFTRHSQTTAIPSCPEGTVPLYSGFSFLFVQGNQRAHGQDLGTLGSCLQRFTTMPFLFCNVNDVCNFASRNDYSYWLSTPALMPMNMAPITGRALEPYISRCTVCEGPAIAIAVHSQTTDIPPCPHGWISLWKGFSFIMFTSAGSEGTGQALASPGSCLEEFRASPFLECHGRGTCNYYSNSYSFWLASLNPERMFRKPIPSTVKAGELEKIISRCQVCMKKRH

SEQ ID NO: 758144 - protein, 1498 aa, Homo sapiens
MSARTAPRPQVLLLPLLLVLLAAAPAASKGCVCKDKGQCFCDGAKGEKGEKGFPGPPGSPGQKGFTGPEGLPGPQGPKGFPGLPGLTGSKGVRGISGLPGFSGSPGLPGTPGNTGPYGLVGVPGCSGSKGEQGFPGLPGTPGYPGIPGAAGLKGQKGAPAKGEDIELDAKGDPGLPGAPGPQGLPGPPGFPGPVGPPGPPGFFGFPGAMGPRGPKGHMGERVIGHKGERGVKGLTGPPGPPGTVIVTLTGPDNRTDLKGEKGDKGAMGEPGPPGPSGLPGESYGSEKGAPGDPGLQGKPGKDGVPGFPGSEGVKGNRGFPGLMGEDGIKGQKGDIGPPGFRGPTEYYDTYQEKGDEGTPGPPGPRGARGPQGPSGPPGVPGSPGSSRPGLRGAPGWPGLKGSKGERGRPGKDAMGTPGSPGCAGSPGLPGSPGPPGPPGDIVFRKGPPGDHGLPGYLGSPGIPGVDGPKGEPGLLCTQCPYIPGPPGLPGLPGLHGVKGIPGRQGAAGLKGSPGSPGNTGLPGFPGFPGAQGDPGLKGEKGETLQPEGQVGVPGDPGLRGQPGRKGLDGIPGTLGVKGLPGPKGELALSGEKGDQGPPGDPGSPGSPGPAGPAGPPGYGPQGEPGLQGTQGVPGAPGPPGEAGPRGELSVSTPVPGPPGPPGPPGHPGPQGPPGIPGSLGKCGDPGLPGPDGEPGIPGIGFPGPPGPKGDQGFPGTKGSLGCPGKMGEPGLPGKPGLPGAKGEPAVAMPGGPGTPGFPGERGNSGEHGEIGLPGLPGLPGTPGNEGLDGPRGDPGQPGPPGEQGPPGRCIEGPRGAQGLPGLNGLKGQQGRRGKTGPKGDPGIPGLDRSGFPGETGSPGIPGHQGEMGPLGQRGYPGNPGILGPPGEDGVIGMMGFPGAIGPPGPPGNPGTPGQRGSPGIPGVKGQRGTPGAKGEQGDKGNPGPSEISHVIGDKGEPGLKGFAGNPGEKGNRGVPGMPGLKGLKGLPGPAGPPGPRGDLGSTGNPGEPGLRGIPGSMGNMGMPGSKGKRGTLGFPGRAGRPGLPGIHGLQGDKGEPGYSEGTRPGPPGPTGDPGLPGDMGKKGEMGQPGPPGHLGPAGPEGAPGSPGSPGLPGKPGPHGDLGFKGIKGLLGPPGIRGPPGLPGFPGSPGPMGIRGDQGRDGIPGPAGEKGETGLLRAPPGPRGNPGAQGAKGDRGAPGFPGLPGRKGAMGDAGPRGPTGIEGFPGPPGLPGAIIPGQTGNRGPPGSRGSPGAPGPPGPPGSHVIGIKGDKGSMGHPGPKGPPGTAGDMGPPGRLGAPGTPGLPGPRGDPGFQGFPGVKGEKGNPGFLGSIGPPGPIGPKGPPGVRGDPGTLKIISLPGSPGPPGTPGEPGMQGEPGPPGPPGNLGPCGPRGKPGKDGKPGTPGPAGEKGNKGSKGEPGPAGSDGLPGLKGKRGDSGSPATWTTRGFVFTRHSQTTAIPSCPEGTVPLYSGFSFLFVQGNQRAHGQDLDALFVKVLRSP

SEQ ID NO: 758145 - protein, 1498 aa, Homo sapiens; identical to SEQ ID NO: 758144

SEQ ID NO: 758146 - protein, 1445 aa, Homo sapiens
MSARTAPRPQVLLLPLLLVLLAAAPAASKGCVCKDKGQCFCDGAKGEKGEKGFPGPPGSPGQKGFTGPEGLPGPQGPKGFPGLPGLTGSKGVRGISGLPGFSGSPGLPGTPGNTGPYGLVGVPGCSGSKGEQGFPGLPGTPGYPGIPGAAGLKGQKGAPAKGEDIELDAKGDPGLPGAPGPQGLPGPPGFPGPVGPPGPPGFFGFPGAMGPRGPKGHMGERVIGHKGERGVKGLTGPPGPPGTVIVTLTGPDNRTDLKGEKGDKGAMGEPGPPGPSGLPGESYGSEKGAPGDPGLQGKPGKDGVPGFPGSEGVKGNRGFPGLMGEDGIKGQKGDIGPPGFRGPTEYYDTYQEKGDEGTPGPPGPRGARGPQGPSGPPGVPGSPGSSRPGLRGAPGWPGLKGSKGERGRPGKDAMGTPGSPGCAGSPGLPGSPGPPGPPGDIVFRKGPPGDHGLPGYLGSPGIPGVDGPKGEPGLLCTQCPYIPGPPGLPGLPGLHGVKGIPGRQGAAGLKGSPGSPGNTGLPGFPGFPGAQGDPGLKGEKGETLQPEGQVGVPGDPGLRGQPGRKGLDGIPGTLGVKGLPGPKGELALSGEKGDQGPPGDPGSPGSPGPAGPAGPPGYGPQGEPGLQGTQGVPGAPGPPGEAGPRGELSVSTPVPGPPGPPGPPGHPGPQGPPGIPGSLGKCGDPGLPGPDGEPGIPGIGFPGPPGPKGDQGFPGTKGSLGCPGKMGEPGLPGKPGLPGAKGEPAVAMPGGPGTPGFPGERGNSGEHGEIGLPGLPGLPGTPGNEGLDGPRGDPGQPGPPGEQGPPGRCIEGPRGAQGLPGLNGLKGQQGRRGKTGPKGDPGIPGLDRSGFPGETGSPGIPGHQGEMGPLGQRGYPGNPGILGPPGEDGVIGMMGFPGAIGPPGPPGNPGTPGQRGSPGIPGVKGQRGTPGAKGEQGDKGNPGPSEISHVIGDKGEPGLKGFAGNPGEKGNRGVPGMPGLKGLKGLPGPAGPPGPRGDLGSTGNPGEPGLRGIPGSMGNMGMPGSKGKRGTLGFPGRAGRPGLPGIHGLQGDKGEPGYSEGTRPGPPGPTGDPGLPGDMGKKGEMGQPGPPGHLGPAGPEGAPGSPGSPGLPGKPGPHGDLGFKGIKGLLGPPGIRGPPGLPGFPGSPGPMGIRGDQGRDGIPGPAGEKGETGLLRAPPGPRGNPGAQGAKGDRGAPGFPGLPGRKGAMGDAGPRGPTGIEGFPGPPGLPGAIIPGQTGNRGPPGSRGSPGAPGPPGPPGSHVIGIKGDKGSMGHPGPKGPPGTAGDMGPPGRLGAPGTPGLPGPRGDPGFQGFPGVKGEKGNPGFLGSIGPPGPIGPKGPPGVRGDPGTLKIISLPGSPGPPGTPGEPGMQGEPGPPGPPGNLGPCGPRGKPGKDGKPGTPGPAGEKGNKGSKGEPGKPIPSTVKAGELEKIISRCQVCMKKRH

SEQ ID NO: 758147 - protein, 1642 aa, Homo sapiens
MSARTAPRPQVLLLPLLLVLLAAAPAASKGCVCKDKGQCFCDGAKGEKGEKGFPGPPGSPGQKGFTGPEGLPGPQGPKGFPGLPGLTGSKGVRGISGLPGFSGSPGLPGTPGNTGPYGLVGVPGCSGSKGEQGFPGLPGTPGYPGIPGAAGLKGQKGAPAKGEDIELDAKGDPGLPGAPGPQGLPGPPGFPGPVGPPGPPGFFGFPGAMGPRGPKGHMGERVIGHKGERGVKGLTGPPGPPGTVIVTLTGPDNRTDLKGEKGDKGAMGEPGPPGPSGLPGESYGSEKGAPGDPGLQGKPGKDGVPGFPGSEGVKGNRGFPGLMGEDGIKGQKGDIGPPGFRGPTEYYDTYQEKGDEGTPGPPGPRGARGPQGPSGPPGVPGSPGSSRPGLRGAPGWPGLKGSKGERGRPGKDAMGTPGSPGCAGSPGLPGSPGPPGPPGDIVFRKGPPGDHGLPGYLGSPGIPGVDGPKGEPGLLCTQCPYIPGPPGLPGLPGLHGVKGIPGRQGAAGLKGSPGSPGNTGLPGFPGFPGAQGDPGLKGEKGETLQPEGQVGVPGDPGLRGQPGRKGLDGIPGTLGVKGLPGPKGELALSGEKGDQGPPGDPGSPGSPGPAGPAGPPGYGPQGEPGLQGTQGVPGAPGPPGEAGPRGELSVSTPVPGPPGPPGPPGHPGPQGPPGIPGSLGKCGDPGLPGPDGEPGIPGIGFPGPPGPKGDQGFPGTKGSLGCPGKMGEPGLPGKPGLPGAKGEPAVAMPGGPGTPGFPGERGNSGEHGEIGLPGLPGLPGTPGNEGLDGPRGDPGQPGPPGEQGPPGRCIEGPRGAQGLPGLNGLKGQQGRRGKTGPKGDPGIPGLDRSGFPGETGSPGIPGHQGEMGPLGQRGYPGNPGILGPPGEDGVIGMMGFPGAIGPPGPPGNPGTPGQRGSPGIPGVKGQRGTPGAKGEQGDKGNPGPSEISHVIGDKGEPGLKGFAGNPGEKGNRGVPGMPGLKGLKGLPGPAGPPGPRGDLGSTGNPGEPGLRGIPGSMGNMGMPGSKGKRGTLGFPGRAGRPGLPGIHGLQGDKGEPGYSEGTRPGPPGPTGDPGLPGDMGKKGEMGQPGPPGHLGPAGPEGAPGSPGSPGLPGKPGPHGDLGFKGIKGLLGPPGIRGPPGLPGFPGSPGPMGIRGDQGRDGIPGPAGEKGETGLLRAPPGPRGNPGAQGAKGDRGAPGFPGLPGRKGAMGDAGPRGPTGIEGFPGPPGLPGAIIPGQTGNRGPPGSRGSPGAPGPPGPPGSHVIGIKGDKGSMGHPGPKGPPGTAGDMGPPGRLGAPGTPGLPGPRGDPGFQGFPGVKGEKGNPGFLGSIGPPGPIGPKGPPGVRGDPGTLKIISLPGSPGPPGTPGEPGMQGEPGPPGPPGNLGPCGPRGKPGKDGKPGTPGPAGEKGNKGSKGEPGPAGSDGLPGLKGKRGDSGSPATWTTRGFVFTRHSQTTAIPSCPEGTVPLYSGFSFLFVQGNQRAHGQDLGTLGSCLQRFTTMPFLFCNVNDVCNFASRNDYSYWLSTPALMPMNMAPITGRALEPYISRCTVCEGPAIAIAVHSQTTDIPPCPHGWISLWKGFSFIMKAYSINCESWGIRKNNKSLSGVHEEKTLKLKKTCRTAIFHPKEQSNDRTCCYLGIFL

SEQ ID NO: 758148 - protein, 1494 aa, Homo sapiens
MSARTAPRPQVLLLPLLLVLLAAAPAASKGCVCKDKGQCFCDGAKGEKGEKGFPGPPGSPGQKGFTGPEGLPGPQGPKGFPGLPGLTGSKGVRGISGLPGFSGSPGLPGTPGNTGPYGLVGVPGCSGSKGEQGFPGLPGTPGYPGIPGAAGLKGQKGAPAKGEDIELDAKGDPGLPGAPGPQGLPGPPGFPGPVGPPGPPGFFGFPGAMGPRGPKGHMGERVIGHKGERGVKGLTGPPGPPGTVIVTLTGPDNRTDLKGEKGDKGAMGEPGPPGPSGLPGESYGSEKGAPGDPGLQGKPGKDGVPGFPGSEGVKGNRGFPGLMGEDGIKGQKGDIGPPGFRGPTEYYDTYQEKGDEGTPGPPGPRGARGPQGPSGPPGVPGSPGSSRPGLRGAPGWPGLKGSKGERGRPGKDAMGTPGSPGCAGSPGLPGSPGPPGPPGDIVFRKGPPGDHGLPGYLGSPGIPGVDGPKGEPGLLCTQCPYIPGPPGLPGLPGLHGVKGIPGRQGAAGLKGSPGSPGNTGLPGFPGFPGAQGDPGLKGEKGETLQPEGQVGVPGDPGLRGQPGRKGLDGIPGTLGVKGLPGPKGELALSGEKGDQGPPGDPGSPGSPGPAGPAGPPGYGPQGEPGLQGTQGVPGAPGPPGEAGPRGELSVSTPVPGPPGPPGPPGHPGPQGPPGIPGSLGKCGDPGLPGPDGEPGIPGIGFPGPPGPKGDQGFPGTKGSLGCPGKMGEPGLPGKPGLPGAKGEPAVAMPGGPGTPGFPGERGNSGEHGEIGLPGLPGLPGTPGNEGLDGPRGDPGQPGPPGEQGPPGRCIEGPRGAQGLPGLNGLKGQQGRRGKTGPKGDPGIPGLDRSGFPGETGSPGIPGHQGEMGPLGQRGYPGNPGILGPPGEDGVIGMMGFPGAIGPPGPPGNPGTPGQRGSPGIPGVKGQRGTPGAKGEQGDKGNPGPSEISHVIGDKGEPGLKGFAGNPGEKGNRGVPGMPGLKGLKGLPGPAGPPGPRGDLGSTGNPGEPGLRGIPGSMGNMGMPGSKGKRGTLGFPGRAGRPGLPGIHGLQGDKGEPGYSEGTRPGPPGPTGDPGLPGDMGKKGEMGQPGPPGHLGPAGPEGAPGSPGSPGLPGKPGPHGDLGFKGIKGLLGPPGIRGPPGLPGFPGSPGPMGIRGDQGRDGIPGPAGEKGETGLLRAPPGPRGNPGAQGAKGDRGAPGFPGLPGRKGAMGDAGPRGPTGIEGFPGPPGLPGAIIPGQTGNRGPPGSRGSPGAPGPPGPPGSHVIGIKGDKGSMGHPGPKGPPGTAGDMGPPGRLGAPGTPGLPGPRGDPGFQGFPGVKGEKGNPGFLGSIGPPGPIGPKGPPGVRGDPGTLKIISLPGSPGPPGTPGEPGMQGEPGPPGPPGNLGPCGPRGKPGKDGKPGTPGPAGEKGNKGSKGEPGPAGSDGLPGLKGKRGDSGSPATWTTRGFVFTRHSQTTAIPSCPEGTVPLYSGFSFLFVQGNQRAHGQDLESLFHQL

SEQ ID NO: 758149 - protein, 98 aa, Homo sapiens
SGSQSLTQTLDARCLVQKQPAQPNRVTLLKPQMSNSPANRGCFCSFPLALPPGMKPDTDYPEDELSTLQWAQHAAASETIFSALTTLAGSSLWWGNWA

SEQ ID NO: 758150 - protein, 104 aa, Homo sapiens
QVKRVSPGEYRQRDSIASRTRSRSQRPNNTITYESERGGFRRTFSRSEWAGVRTYVSSTRIPICRILNTGLCETTSVAIQTMLRQIMTGFGELSYFMYSDSDSE

SEQ ID NO: 758151 - protein, 132 aa, Homo sapiens
VATRSRLPLFQPSSPSPILRPPRPIPEVLRPPRLSFCRVAQGFHPSARGMASTPMGNEGEKKSSWPSQAAPSLRGGPASLSRSEEYLSQISAELMEEALCTACCHLNPVPIKKKQSQDQATQISKRAFFTKT

SEQ ID NO: 758152 - protein, 132 aa, Homo sapiens; identical to SEQ ID NO: 758151

SEQ ID NO: 758153 - protein, 107 aa, Homo sapiens
KGELLEDLQGSLSLAPSSLTLWLTKSSCICLPSLDPRLLHSSRPLCSLRGSPSTRGLCLQTQGVLRTQLICLFSLRNEQYATHCLVLETAAPDILPSFLVLHGGCKL

SEQ ID NO: 758154 - protein, 107 aa, Homo sapiens
PEPFLTGRRYWKINSNLWLPSQQSLLQHIWEPEALKFDNSKDRTISQGVEATFHSAHLTLLGKETFGEDHYYSPNFIRDPIPSLLMSVCEILNYVMGVYVQKQYIFK

SEQ ID NO: 758155 - protein, 105 aa, Homo sapiens
MKITIFLSIPSWIQKCLFPECDTSQNPLESQPKGHIRMGQITFWKSCLGDSNSPPTQVRPTAQKWGSWVSMISHLSPHLSIQQRPSAGKRVWEEIEFTRLTCSLH

SEQ ID NO: 758156 - protein, 466 aa, Homo sapiens
MRAPGMRSRPAGPALLLLLLFLGAAESVRRAQPPRRYTPDWPSLDSRPLPAWFDEAKFGVFIHWGVFSVPAWGSEWFWWHWQGEGRPQYQRFMRDNYPPGFSYADFGPQFTARFFHPEEWADLFQAAGAKYVVLTTKHHEGFTNWPSPVSWNWNSKDVGPHRDLVGELGTALRKRNIRYGLYHSLLEWFHPLYLLDKKNGFKTQHFVSAKTMPELYDLVNSYKPDLIWSDGEWECPDTYWNSTNFLSWLYNDSPVKDEVVVNDRWGQNCSCHHGGYYNCEDKFKPQSLPDHKWEMCTSIDKFSWGYRRDMALSDVTEESEIISELVQTVSLGGNYLLNIGPTKDGLIVPIFQERLLAVGKWLSINGEAIYASKPWRVQWEKNTTSVWYTSKGSAVYAIFLHWPENGVLNLESPITTSTTKITMLGIQGDLKWSTDPDKGLFISLPQLPPSAVPAEFAWTIKLTGVK

SEQ ID NO: 758157 - protein, 203 aa, Homo sapiens
MRAPGMRSRPAGPALLLLLLFLGAAESVRRAQPPRRYTPDWPSLDSRPLPAWFDEAKFGVFIHWGVFSVPAWGSEWFWWHWQGEGRPQYQRFMRDNYPPGFSYADFGPQFTARFFHPEEWADLFQAAGAKYVVLTTKHHEGFTNWPSPVSWNWNSKDVGPHRDLVGELGTALRKRNIRYGLYHSLLEWFHPLYLLDKKNGFKL

SEQ ID NO: 758158 - protein, 179 aa, Homo sapiens
MRAPGMRSRPAGPALLLLLLFLGAAESVRRAQPPRRYTPDWPSLDSRPLPAWFDEAKFGVFIHWGVFSVPAWGSEWFWWHWQGEGRPQYQRFMRDNYPPGFSYADFGPQFTARFFHPEEWADLFQAAGAKYVVLTTKHHEGFTNWPSPVSWNWNSKDVGPHRDLVGELGTSAMDYTTHS

SEQ ID NO: 758159 - protein, 212 aa, Homo sapiens
MRAPGMRSRPAGPALLLLLLFLGAAESVRRAQPPRRYTPDWPSLDSRPLPAWFDEAKFGVFIHWGVFSVPAWGSEWFWWHWQGEGRPQYQRFMRDNYPPGFSYADFGPQFTARFFHPEEWADLFQAAGAKYVVLTTKHHEGFTNWPSPVSWNVPVTMEDTITVKINSSHRACQITSGRCAPALTSFPGAIVVTWHCLMLQKNLKSFRNWFRQ

SEQ ID NO: 758160 - protein, 359 aa, Homo sapiens
MRAPGMRSRPAGPALLLLLLFLGAAESVRRAQPPRRYTPDWPSLDSRPLPAWFDEAKFGVFIHWGVFSVPAWGSEWFWWHWQGEGRPQYQRFMRDNYPPGFSYADFGPQFTARFFHPEEWADLFQAAGAKYVVLTTKHHEGFTNWPSPVSWNWNSKDVGPHRDLVGELGTALRKRNIRYGLYHSLLEWFHPLYLLDKKNGFKTQHFVSAKTMPELYDLVNSYKPDLIWSDGEWECPDTYWNSTNFLSWLYNDSPVKDEVVVNDRWGQNCSCHHGGYYNCEDKFKPQSLPDHKWEMCTSIDKFSWGYRRDMALSDVTEESEIISELVQTVSLGGNYLLNIGPTKDGLIVPIFQERLMLFS

SEQ ID NO: 758161 - protein, 524 aa, Homo sapiens
MRAPGMRSRPAGPALLLLLLFLGAAESVRRAQPPRRYTPDWPSLDSRPLPAWFDEAKFGVFIHWGVFSVPAWGSEWFWWHWQGEGRPQYQRFMRDNYPPGFSYADFGPQFTARFFHPEEWADLFQAAGAKWVWSRGAAPLPGSGGKQEVGLGGQLGRAAAGRPHDPGARVWPPAATGVSLAHLMRRRRYVVLTTKHHEGFTNWPSPVSWNWNSKDVGPHRDLVGELGTALRKRNIRYGLYHSLLEWFHPLYLLDKKNGFKTQHFVSAKTMPELYDLVNSYKPDLIWSDGEWECPDTYWNSTNFLSWLYNDSPVKDEVVVNDRWGQNCSCHHGGYYNCEDKFKPQSLPDHKWEMCTSIDKFSWGYRRDMALSDVTEESEIISELVQTVSLGGNYLLNIGPTKDGLIVPIFQERLLAVGKWLSINGEAIYASKPWRVQWEKNTTSVWYTSKGSAVYAIFLHWPENGVLNLESPITTSTTKITMLGIQGDLKWSTDPDKGLFISLPQLPPSAVPAEFAWTIKLTGVK

SEQ ID NO: 758162 - protein, 255 aa, Homo sapiens
MPELYDLVNSYKPDLIWSDGEWECPDTYWNSTNFLSWLYNDSPVKDEVVVNDRWGQNCSCHHGGYYNCEDKFKPQSLPDHKWEMCTSIDKFSWGYRRDMALSDVTEESEIISELVQTVSLGGNYLLNIGPTKDGLIVPIFQERLLAVGKWLSINGEAIYASKPWRVQWEKNTTSVWYTSKGSAVYAIFLHWPENGVLNLESPITTSTTKITMLGIQGDLKWSTDPDKGLFISLPQLPPSAVPAEFAWTIKLTGVK

SEQ ID NO: 758163 - protein, 444 aa, Homo sapiens
MRAPGMRSRPAGPALLLLLLFLGAAESVRRAQPPRRYTPDWPSLDSRPLPAWFDEAKFGVFIHWGVFSVPAWGSEWFWWHWQGEGRPQYQRFMRDNYPPGFSYADFGPQFTARFFHPEEWADLFQAAGAKYVVLTTKHHEGFTNWPSPVSWNWNSKDVGPHRDLVGELGTALRKRNIRYGLYHSLLEWFHPLYLLDKKNGFKTQHFVSAKTMPELYDLVNSYKPDLIWSDGEWECPDTYWNSTNFLSWLYNDSPVKDEVVVNDRWGQNCSCHHGGYYNCEDKFKPQSLPDHKWEMCTSIDKFSWGYRRDMALSDVTEESEIISELVQTVSLGGNYLLNIGPTKDGLIVPIFQERLLAVGKWLSINGEAIYASKPWRVQWEKNTTSVWYTSKGSAVYAIFLHWPENGVLNLESPITTSTTKIQCGIQGDLKWSTDLLEFPALLSL

SEQ ID NO: 758164 - protein, 222 aa, Homo sapiens
MRAPGMRSRPAGPALLLLLLFLGAAESVRRAQPPRRYTPDWPSLDSRPLPAWFDEAKFGVFIHWGVFSVPAWGSEWFWWHWQGEGRPQYQRFMRDNYPPGFSYADFGPQFTARFFHPEEWADLFQAAGAKYVVLTTKHHEGFTNWPSPVSWNWNSKDVGPHRDLVGELGTALRKRNIRYGLYHSLLEWFHPLYLLDKKNGFKTQHFVSAKTMPELYDLVNRK

SEQ ID NO: 758165 - protein, 191 aa, Homo sapiens
LAAEFISKPQNLEILEGEKAEFVCSISKESFPVQWKRDDKTLESGDKYDVIADGKKRVLVVKDATLQDMGTYVVMVGAARAAAHLTVIEKLRIVVPLKDTRVKEQQEVVFNCEVNTEGAKAKWFRNEEAIFDSSKYIILQKDLVYTLRIRDAHLDDQANYNVSLTNHRGENVKSAANLIVEEEDLRIVEPL

SEQ ID NO: 758166 - protein, 112 aa, Homo sapiens
RLKLKRLRVPPPRCCLGSASSPTLWQRRSSPRPPSHVQSRQERWGPVLARRGHRSGASVLPGVGETGAGPSLPAWGLGWALLICMGRKHMLVSTSFQASEYLSSPNVWVRLF

SEQ ID NO: 758167 - protein, 700 aa, Homo sapiens
PFLRRTAGRSDVLPVAGGEVRALQEGGCGDKMKIFVGNVDGADTTPEELAALFAPYGTVMSCAVMKQFAFVHMRENAGALRAIEALHGHELRPGRALVVEMSRPRPLNTWKIFVGNVSAACTSQELRSLFERRGRVIECDVVKDYAFVHMEKEADAKAAIAQLNGKEVKGKRINVELSTKGQKKGPGLAVQSGDKTKKPGAGDTAFPGTGGFSATFDYQQAFGNSTGGFDGQARQPTPPFFGRDRSPLRRSPPRASYVAPLTAQPATYRAQPSVSLGAAYRAQPSASLGVGYRTQPMTAQAASYRAQPSVSLGAPYRGQLASPSSQSAAASSLGPYGGAQPSASALSSYGGQAAAASSLNSYGAQGSSLASYGNQPSSYGAQAASSYGVRAAASSYNTQGAASSLGSYGAQAASYGAQSAASSLAYGAQAASYNAQPSASYNAQSAPYAAQQAASYSSQPAAYVAQPATAAAYASQPAAYAAQATTPMAGSYGAQPVVQTQLNSYGAQASMGLSGSYGAQSAAAATGSYGAAAAYGAQPSATLAAPYRTQSSASLAASYAAQQHPQAAASYRGQPGNAYDGAGQPSAAYLSMSQGAVANANSTPPPYERTRLSPPRASYDDPYKKAVAMSKRYGSDRRLAELSDYRRLSESQLSFRRSPTKSSLDYRRLPDAHSDYARYSGSYNDYLRAAQMHSGYQRRM

SEQ ID NO: 758168 - protein, 723 aa, Homo sapiens
PFLRRTAGRSDVLPVAGGEVRALQEGGCGDKMKIFVGNVDGADTTPEELAALFAPYGTVMSCAVMKQFAFVHMRENAGALRAIEALHGHELRPGRALVVEMSRPRPLNTWKIFVGNVSAACTSQELRSLFERRGRVIECDVVKEEMEDFYPVLQFIFAPSSLTRKLDYAFVHMEKEADAKAAIAQLNGKEVKGKRINVELSTKGQKKGPGLAVQSGDKTKKPGAGDTAFPGTGGFSATFDYQQAFGNSTGGFDGQARQPTPPFFGRDRSPLRRSPPRASYVAPLTAQPATYRAQPSVSLGAAYRAQPSASLGVGYRTQPMTAQAASYRAQPSVSLGAPYRGQLASPSSQSAAASSLGPYGGAQPSASALSSYGGQAAAASSLNSYGAQGSSLASYGNQPSSYGAQAASSYGVRAAASSYNTQGAASSLGSYGAQAASYGAQSAASSLAYGAQAASYNAQPSASYNAQSAPYAAQQAASYSSQPAAYVAQPATAAAYASQPAAYAAQATTPMAGSYGAQPVVQTQLNSYGAQASMGLSGSYGAQSAAAATGSYGAAAAYGAQPSATLAAPYRTQSSASLAASYAAQQHPQAAASYRGQPGNAYDGAGQPSAAYLSMSQGAVANANSTPPPYERTRLSPPRASYDDPYKKAVAMSKRYGSDRRLAELSDYRRLSESQLSFRRSPTKSSLDYRRLPDAHSDYARYSGSYNDYLRAAQMHSGYQRRM

SEQ ID NO: 758169 - protein, 374 aa, Homo sapiens
GWGEAGTLIGRRGAVGVGNGPLGHGQAAAASSLNSYGAQGSSLASYGNQPSSYGAQAASSYGVRAAASSYNTQGAASSLGSYGAQAASYGAQSAASSLAYGAQAASYNAQPSASYNAQSAPYAAQQAASYSSQPAAYVAQPATAAAYASQPAAYAAQATTPMAGSYGAQPVVQTQLNSYGAQASMGLSGSYGAQSAAAATGSYGAAAAYGAQPSATLAAPYRTQSSASLAASYAAQQHPQAAASYRGQPGNAYDGAGQPSAAYLSMSQGAVANANSTPPPYERTRLSPPRASYDDPYKKAVAMSKRYGSDRRLAELSDYRRLSESQLSFRRSPTKSSLDYRRLPDAHSDYARYSGSYNDYLRAAQMHSGYQRRM

SEQ ID NO: 758170 - protein, 187 aa, Homo sapiens
PFLRRTAGRSDVLPVAGGEVRALQEGGCGDKMKIFVGNVDGADTTPEELAALFAPYGTVMSCAVMKQFAFVHMRENAGALRAIEALHGHELRPGRALVVEMSRPRPLNTWKIFVGNVSAACTSQELRSLFERRGRVIECDVVKDYAFVHMEKEADAKAAIAQLNGKEVKGKRINVELSTKGMVPTGV

SEQ ID NO: 758171 - protein, 138 aa, Homo sapiens [sequence omitted]

SEQ ID NO: 758172 - protein, 138 aa, Homo sapiens [sequence omitted]

SEQ ID NO: 758173 - protein, 723 aa, Homo sapiens; identical to SEQ ID NO: 758168

SEQ ID NO: 758174 - protein, 672 aa, Homo sapiens
PFLRRTAGRSDVLPVAGGEVRALQEGGCGDKMKIFVGNVDGADTTPEELAALFAPYGTVMSCAVMKQFAFVHMRENAGALRAIEALHGHELRPGRALVVEMSRPRPLNTWKIFVGNVSAACTSQELRSLFERRGRVIECDVVKEEMEDFYPVLQFIFAPSSLTRKLDYAFVHMEKEADAKAAIAQLNGKEVKGKRINVELSTKGQKKGPGLAVQSGDKTKKPGAGDTAFPGTGGFSATFDYQQAFGNSTGGFDGQARQPTPPFFGRDRSPLRRSPPRASYVAPLTAQPATYRAQPSVSLGAAYRAQPSASLGVGYRTQPMTAQAASYRAQPSVSLGAPYRGQLASPSSQSAAASSLGPYGGAQPSASALSSYGGQAAAASSLNSYGAQGSSLASYGNQPSSYGAQAASSYGVRAAASSYNTQGAASSLGSYGAQAASYGAQSAASSLAYGAQAASYNAQPSASYNAQSAPYAAQQAASYSSQPAAYVAQPATAAAYASQPAAYAAQATTPMAGSYGAQPVVQTQLNSYGAQASMGLSGSYGAQSAAAATGSYGAAAAYGAQPSATLAAPYRTQSSASLAASYAAQQHPQAAASYRGQPGNAYDGAGQPSAAYLSMSQGAVANANSTPPPYERTRLSPPRASYDDPYKKAVAMSKRYCMPPRLCPQLGLRARG

SEQ ID NO: 758175 - protein, 286 aa, Homo sapiens
GRSHFRLVTIAYGAQAASYNAQPSASYNAQSAPYAAQQAASYSSQPAAYVAQPATAAAYASQPAAYAAQATTPMAGSYGAQPVVQTQLNSYGAQASMGLSGSYGAQSAAAATGSYGAAAAYGAQPSATLAAPYRTQSSASLAASYAAQQHPQAAASYRGQPGNAYDGAGQPSAAYLSMSQGAVANANSTPPPYERTRLSPPRASYDDPYKKAVAMSKRYGSDRRLAELSDYRRLSESQLSFRRSPTKSSLDYRRLPDAHSDYARYSGSYNDYLRAAQMHSGYQRRM

SEQ ID NO: 758176 - protein, 723 aa, Homo sapiens; identical to SEQ ID NO: 758168

SEQ ID NO: 758177 - protein, 723 aa, Homo sapiens; identical to SEQ ID NO: 758168

SEQ ID NO: 758178 - protein, 264 aa, Homo sapiens
RPALGSRQVVHNMTSEFFAAQLRAQISDDTTHPISYYKPEFYTPVDGGTAHLSVVAEDGSAVSATSTINLYFGSKVRSPVSEILFNDEMDDFSSPNITNEFGVPPSPANFIQPGKQPLSSMCPTIMVGQDGQVRMVVGAAGGTQITTATALICVTPFLPGRAHPAQPPSHADHTPMPQAIIYNLWFGYDVKRAVEEPRLHNQLLPNVTTVERNIDQAVTAALETRHHHTQIASTFIAVVQAIVRTAGGWAAASDSRKGGEPAGY

SEQ ID NO: 758179 - protein, 211 aa, Homo sapiens
RPALGSRQVVHNMTSEFFAAQLRAQISDDTTHPISYYKPEFYTPVDGGTAHLSVVAEDGSAVSATSTINLYFGSKVRSPVSEILFNDEMDDFSSPNITNEFGVPPSPANFSSQPPSHADHTPMPQAIIYNLWFGYDVKRAVEEPRLHNQLLPNVTTVERNIDQAVTAALETRHHHTQIASTFIAVVQAIVRTAGGWAAASDSRKGGEPAGY

SEQ ID NO: 758180 - protein, 174 aa, Homo sapiens
ITDCACESFNNLEKMTCLKEENCHITQSLRMGFLVCFSILSWPAAPAQALLTGVFLLQSVPQPVVCEQRRRHPGLPGSSRVQRAGGPVLPGLPRALHTPHPSGLGALFLGIPTVRRGGRGHRHRGQPVRRRSPRPPHSLMDTCVATFHVKQQGPGPERCSDFLSWQPVVTGLTY

SEQ ID NO: 758181 - protein, 436 aa, Homo sapiens [sequence omitted]

SEQ ID NO: 758182 - protein, 436 aa, Homo sapiens [sequence omitted]

SEQ ID NO: 758183 - protein, 372 aa, Homo sapiens
MSSPGTESAGKSLQYRVDHLLSAVENELQAGSEKGDPTERELRVGLEESDRSRRRPVAVYIHPDSPNFGAHWMKAPVSFSKVKLPNKLNGGAQIMLNSLHKYEPRIHIVRVGDPQRMITSHCFPETQFIAVTAYQNEEITALKIKYNPFAKAFLDAKERSDHKEMMEEPGDSQQPGYSQSGGWLLPGTSTLCPPANPHPQFGGALSLPSTHSCDRYPTLRSHRSSPYPSPYAHRNNSPTYSDNSPACLSMLQSHDNWSSLGMPAHPSMLPVSHNASPPTSSSQYPSLWSVSNGAVTPGSQAAAVSNGLGAQFFRGSPAHYTPLTHPVSAPSSSGSPLYEGAAAATDIVDSQYDAAAQGRLIASWTPVSPPSM

SEQ ID NO: 758184 - protein, 122 aa, Homo sapiens
MSSPGTESAGKSLQYRVDHLLSAVENELQAGSEKGDPTERELRVGLEESELWLRFKELTNEMIVTKNGRRMFPVLKVNVSGLHPSPIRSRRPLPRDPHCTKGRPRPQTSWTASTTPQPKAAS

SEQ ID NO: 758185 - protein, 98 aa, Homo sapiens
QRRVSSSSRGCPPAAPSLPTYYEEQLLPPAHKSQVHVTSSGSQPFPDPLRGSQRASLPDLTCSSFCMILEIAKHKRVNVKLRSETHPSLHSLYYALSQ

SEQ ID NO: 758186 - protein, 744 aa, Homo sapiens
MAVLPGPLQLLGVLLTISLSSIRLIQAGAYYGIKPLPPQIPPQMPPQIPQYQPLGQQVPHMPLAKDGLAMGKEMPHLQYGKEYPHLPQYMKEIQPAPRMGKEAVPKKGKEIPLASLRGEQGPRGEPGPRGPPGPPGLPGHGIPGIKGKPGPQGYPGVGKPGMPGMPGKPGAMGMPGAKGEIGQKGEIGPMGIPGPQGPPGPHGLPGIGKPGGPGLPGQPGPKGDRGPKGLPGPQGLRGPKGDKGFGMPGAPGVKGPPGMHGPPGPVGLPGVGKPGVTGFPGPQGPLGKPGAPGEPGPQGPIGVPGVQGPPGIPGIGKPGQDGIPGQPGFPGGKGEQGLPGLPGPPGLPGIGKPGFPGPKGDRGMGGVPGALGPRGEKGPIGAPGIGGPPGEPGLPGIPGPMGPPGAIGFPGPKGEGGIVGPQGPPGPKGEPGLQGFPGKPGFLGEVGPPGMRGLPGPIGPKGEAGQKGVPGLPGVPGLLGPKGEPGIPGDQGLQGPPGIPGIGGPSGPIGPPGIPGPKGEPGLPGPPGFPGIGKPGVAGLHGPPGKPGALGPQGQPGLPGPPGPPGPPGPPAVMPPTPPPQGEYLPDMGLGIDGVKPPHAYGAKKGKNGGPAYEMPAFTAELTAPFPPVGAPVKFNKLLYNGRQNYNPQTGIFTCEVPGVYYFAYHVHCKGGNVWVALFKNNEPVMYTYDEYKKGFLDQASGSAVLLLRPGDRVFLQMPSEQAAGLYAGQYVHSSFSGYLLYPM

SEQ ID NO: 758187 - protein, 744 aa, Homo sapiens; identical to SEQ ID NO: 758186

SEQ ID NO: 758188 - protein, 73 aa, Homo sapiens
QRRVSSSSRGCPPAAPSLPTYYEEQLLPPAHKSQVHVTSSGSQPFPDPLRGSQRASLPDLTCSRELTRSPTHP

SEQ ID NO: 758189 - protein, 744 aa, Homo sapiens; identical to SEQ ID NO: 758186

SEQ ID NO: 758190 - protein, 744 aa, Homo sapiens; identical to SEQ ID NO: 758186

SEQ ID NO: 758191 - protein, 101 aa, Homo sapiens
ARAPGEDACLRVVVLSAVIQQFVKLQLGGNVWVALFKNNEPVMYTYDEYKKGFLDQASGSAVLLLRPGDRVFLQMPSEQAAGLYAGQYVHSSFSGYLLYPM

SEQ ID NO: 758192 - protein, 736 aa, Homo sapiens [sequence omitted]

SEQ ID NO: 758193 - protein, 70 aa, Homo sapiens
EFGVQSPTRPGPFGAARERTKADGLGACAGHGGRAVSRDREAAGARARLGGGVFLFPQILVPTNKPAHVR

SEQ ID NO: 758194 - protein, 736 aa, Homo sapiens [sequence omitted]

SEQ ID NO: 758195 - protein, 110 aa, Homo sapiens
NRSVVIWLTVSRDRATALQPGPQSETPSQNKQTNYKPDHNTSVKKKNPRISHFFPRFYVICHSQDSACSCFADLAVLPTHQAHCRSFTFAVSSAWSIASRVFAGLCLLIL

SEQ ID NO: 758196 - protein, 480 aa, Homo sapiens
MNASEFRRRGKEMVDYVANYMEGIEGRQVYPDVEPGYLRPLIPAAAPQEPDTFEDIINDVEKIIMPGVTHWHSPYFFAYFPTASSYPAMLADMLCGAIGCIGFSWAASPACTELETVMMDWLGKMLELPKAFLNEKAGEGGGVIQGSASEATLVALLAARTKVIHRLQAASPELTQAAIMEKLVAYSSDQAHSSVERAGLIGGVKLKAIPSDGNFAMRASALQEALERDKAAGLIPFFMVATLGTTTCCSFDNLLEVGPICNKEDIWLHVDAAYAGSAFICPEFRHLLNGVEFADSFNFNPHKWLLVNFDCSAMWVKKRTDLTGAFRLDPTYLKHSHQDSGLITDYRHWQIPLGRRFRSLKMWFVFRMYGVKGLQAYIRKHVQLSHEFESLVRQDPRFEICVEVILGLVCFRLKGSNKVNEALLQRINSAKKIHLVPCHLRDKFVLRFAICSRTVESAHVQRAWEHIKELAADVLRAERE

SEQ ID NO: 758197 - protein, 480 aa, Homo sapiens; identical to SEQ ID NO: 758196

SEQ ID NO: 758198 - protein, 480 aa, Homo sapiens; identical to SEQ ID NO: 758196

SEQ ID NO: 758199 - protein, 480 aa, Homo sapiens; identical to SEQ ID NO: 758196

SEQ ID NO: 758200 - protein, 402 aa, Homo sapiens
MNASEFRRRGKEMVDYVANYMEGIEGRQVYPDVEPGYLRPLIPAAAPQEPDTFEDIINDVEKIIMPGGSASEATLVALLAARTKVIHRLQAASPELTQAAIMEKLVAYSSDQAHSSVERAGLIGGVKLKAIPSDGNFAMRASALQEALERDKAAGLIPFFMVATLGTTTCCSFDNLLEVGPICNKEDIWLHVDAAYAGSAFICPEFRHLLNGVEFADSFNFNPHKWLLVNFDCSAMWVKKRTDLTGAFRLDPTYLKHSHQDSGLITDYRHWQIPLGRRFRSLKMWFVFRMYGVKGLQAYIRKHVQLSHEFESLVRQDPRFEICVEVILGLVCFRLKGSNKVNEALLQRINSAKKIHLVPCHLRDKFVLRFAICSRTVESAHVQRAWEHIKELAADVLRAERE

SEQ ID NO: 758201 - protein, 442 aa, Homo sapiens
MNASEFRRRGKEMVDYVANYMEGIEGRQVYPDVEPGYLRPLIPAAAPQEPDTFEDIINDVEKIIMPGAASPACTELETVMMDWLGKMLELPKAFLNEKAGEGGGVIQGSASEATLVALLAARTKVIHRLQAASPELTQAAIMEKLVAYSSDQAHSSVERAGLIGGVKLKAIPSDGNFAMRASALQEALERDKAAGLIPFFMVATLGTTTCCSFDNLLEVGPICNKEDIWLHVDAAYAGSAFICPEFRHLLNGVEFADSFNFNPHKWLLVNFDCSAMWVKKRTDLTGAFRLDPTYLKHSHQDSGLITDYRHWQIPLGRRFRSLKMWFVFRMYGVKGLQAYIRKHVQLSHEFESLVRQDPRFEICVEVILGLVCFRLKGSNKVNEALLQRINSAKKIHLVPCHLRDKFVLRFAICSRTVESAHVQRAWEHIKELAADVLRAERE

SEQ ID NO: 758202 - protein, 435 aa, Homo sapiens
MRGKEMVDYVANYMEGIEGRQVYPDVEPGYLRPLIPAAAPQEPDTFEDIINDVEKIIMPGAASPACTELETVMMDWLGKMLELPKAFLNEKAGEGGGVIQGSASEATLVALLAARTKVIHRLQAASPELTQAAIMEKLVAYSSDQAHSSVERAGLIGGVKLKAIPSDGNFAMRASALQEALERDKAAGLIPFFMVATLGTTTCCSFDNLLEVGPICNKEDIWLHVDAAYAGSAFICPEFRHLLNGVEFADSFNFNPHKWLLVNFDCSAMWVKKRTDLTGAFRLDPTYLKHSHQDSGLITDYRHWQIPLGRRFRSLKMWFVFRMYGVKGLQAYIRKHVQLSHEFESLVRQDPRFEICVEVILGLVCFRLKGSNKVNEALLQRINSAKKIHLVPCHLRDKFVLRFAICSRTVESAHVQRAWEHIKELAADVLRAERE

SEQ ID NO: 758203 - protein, 119 aa, Homo sapiens
MWFVFRMYGVKGLQAYIRKHVQLSHEFESLVRQDPRFEICVEVILGLVCFRLKGSNKVNEALLQRINSAKKIHLVPCHLRDKFVLRFAICSRTVESAHVQRAWEHIKELAADVLRAERE

SEQ ID NO: 758204 - protein, 106 aa, Homo sapiens
MRSSEYIYVVGMYGVCWKAWELYLVYWNWKLYISSISKLGIIFGLHYFPAEEGILALREGEYLAQHETVLKPSSPKSKTQLGSSHHILPPLHVTCTTWMWPVHIQA

SEQ ID NO: 758205 - protein, 735 aa, Homo sapiens
MPLAQLKEPWPLMELVPLDPENGQTSGEEAGLQPSKDEGVLKEISITHHVKAGSEKADPSHFELLKVLGQGSFGKVFLVRKVTRPDSGHLYAMKVLKKATLKVRDRVRTKMERDILADVNHPFVVKLHYAFQTEGKLYLILDFLRGGDLFTRLSKEVMFTEEDVKFYLAELALGLDHLHSLGIIYRDLKPENILLDEEGHIKLTDFGLSKEAIDHEKKAYSFCGTVEYMAPEVVNRQGHSHSADWWSYGVLMFEMLTGSLPFQGKDRKETMTLILKAKLGMPQFLSTEAQSLLRALFKRNPANRLGSGPDGAEEIKRHVFYSTIDWNKLYRREIKPPFKPAVAQPDDTFYFDTEFTSRTPKDSPGIPPSAGAHQLFRGFSFVATGLMEDDGKPRAPQAPLHSVVQQLHGKNLVFSDGYVVKETIGVGSYSECKRCVHKATNMEYAVKVIDKSKRDPSEEIEILLRYGQHPNIITLKDVYDDGKHVYLVTELMRGGELLDKILRQKFFSEREASFVLHTIGKTVEYLHSQGVVHRDLKPSNILYVDESGNPECLRICDFGFAKQLRAENGLLMTPCYTANFVAPEVLKRQGYDEGCDIWSLGILLYTMLAGYTPFANGPSDTPEEILTRIGSGKFTLSGGNWNTVSETAKDLVSKMLHVDPHQRLTAKQVLQHPWVTQKDKLPQSQLSHQDLQLVKGAMAATYSALNSSKPTPQLKPIESSILAQRRVRKLPSTTL

SEQ ID NO: 758206 - protein, 693 aa, Homo sapiens
MPLAQLKEPWPLMELVPLDPENGQTSGEEAGLQPSKDEGVLKEISITHHVKAGSEKADPSHFELLKVLGQGSFGKVFLVRKVTRPDSGHLYAMKVLKKATLKVRDRVRTKMERDILADVNHPFVVKLHYAFQTEGKLYLILDFLRGGDLFTRLSKEVMFTEEDVKFYLAELALGLDHLHSLGIIYRDLKPENILLDEEGHIKLTDFGLSKEAIDHEKKAYSFCGTVEYMAPEVVNRQGHSHSADWWSYGVLMFEMLTGSLPFQGKDRKETMTLILKAKLGMPQFLSTEAQSLLRALFKRNPANRLGSGPDGAEEIKRHVFYSTIDWNKLYRREIKPPFKPAVAQPDDTFYFDTEFTSRTPKDSPGIPPSAGAHQLFRGFSFVATGLMEDDGKPRAPQAPLHSVVQVIDKSKRDPSEEIEILLRYGQHPNIITLKDVYDDGKHVYLVTELMRGGELLDKILRQKFFSEREASFVLHTIGKTVEYLHSQGVVHRDLKPSNILYVDESGNPECLRICDFGFAKQLRAENGLLMTPCYTANFVAPEVLKRQGYDEGCDIWSLGILLYTMLAGYTPFANGPSDTPEEILTRIGSGKFTLSGGNWNTVSETAKDLVSKMLHVDPHQRLTAKQVLQHPWVTQKDKLPQSQLSHQDLQLVKGAMAATYSALNSSKPTPQLKPIESSILAQRRVRKLPSTTL

SEQ ID NO: 758207 - protein, 434 aa, Homo sapiens
MPACSSGPDGAEEIKRHVFYSTIDWNKLYRREIKPPFKPAVAQPDDTFYFDTEFTSRTPKDSPGIPPSAGAHQLFRGFSFVATGLMEDDGKPRAPQAPLHSVVQQLHGKNLVFSDGYVVKETIGVGSYSECKRCVHKATNMEYAVKVIDKSKRDPSEEIEILLRYGQHPNIITLKDVYDDGKHVYLVTELMRGGELLDKILRQKFFSEREASFVLHTIGKTVEYLHSQGVVHRDLKPSNILYVDESGNPECLRICDFGFAKQLRAENGLLMTPCYTANFVAPEVLKRQGYDEGCDIWSLGILLYTMLAGYTPFANGPSDTPEEILTRIGSGKFTLSGGNWNTVSETAKDLVSKMLHVDPHQRLTAKQVLQHPWVTQKDKLPQSQLSHQDLQLVKGAMAATYSALNSSKPTPQLKPIESSILAQRRVRKLPSTTL

SEQ ID NO: 758208 - protein, 160 aa, Homo sapiens [sequence omitted]

SEQ ID NO: 758209 - protein, 713 aa, Homo sapiens
MPLAQLKEPWPLMELVPLDPENGQTSGEEAGLQPSKDEGVLKEISITHHVKAGSEKADPSHFELLKVLGQGSFGKVFLVRKVTRPDSGHLYAMKVLKKATLKVRDRVRTKMERDILADVNHPFVVKLHYAFQTEGKLYLILDFLRGGDLFTRLSKEVMFTEEDVKFYLAELALGLDHLHSLGIIYRDLKPENILLDEEGHIKLTDFGLSKEAIDHEKKAYSFCGTVEYMAPEVVNRQGHSHSADWWSYGVLMFEMLTGSLPFQGKDRKETMTLILKAKLGMPQFLSTEAQSLLRALFKRNPANRLGSGPDGAEEIKRHVFYSTIDWNKLYRREIKPPFKPAVAQPDDTFYFDTEFTSRTPKDSPGIPPSAGAHQLFRGFSFVATGLMEDDGKPRAPQAPLHSVVQQLHGKNLVFSDGYVVKETIGVGSYSECKRCVHKATNMEYAVKVIDKSKRDPSEEIEILLRYGQHPNIITLKDVYDDGKHVYLVTELMRGGELLDKILRQKFFSEREASFVLHTIGKTVEYLHSQGVVHRDLKPSNILYVDESGNPECLRICDFGFAKQLRAENGLLMTPCYTANFVAPEVLKRQGYDEGCDIWSLGILLYTMLAGYTPFANGPSDTPEEILTRIGSGKFTLSGGNWNTVSETAKVSLYGLRGLIWRREAGSHPRAFQQFMNSLISPSGCSTNPCCCISPSGRFPGRPPPPPHLVGVTW

SEQ ID NO: 758210 - protein, 192 aa, Homo sapiens
MPLAQLKEPWPLMELVPLDPENGQTSGEEAGLQPSKDEGVLKEISITHHVKAGSEKADPSHFELLKVLGQGSFGKVFLVRKVTRPDSGHLYAMKVLKKATLKVRDRVRTKMERDILADVNHPFVVKLHYAFQTEGKLYLILDFLRGGDLFTRLSKEVMFTEEDVKFYLAELALGLDHLHSLGIIYRDLKPEK

SEQ ID NO: 758211 - protein, 761 aa, Homo sapiens
SPGLCLLLPWCRGPAGRMEQDPKPPRLRLWALIPWLPRKQRPRISQTSLPVPGPGSGPQRDSDEGVLKEISITHHVKAGSEKADPSHFELLKVLGQGSFGKVFLVRKVTRPDSGHLYAMKVLKKATLKVRDRVRTKMERDILADVNHPFVVKLHYAFQTEGKLYLILDFLRGGDLFTRLSKEVMFTEEDVKFYLAELALGLDHLHSLGIIYRDLKPENILLDEEGHIKLTDFGLSKEAIDHEKKAYSFCGTVEYMAPEVVNRQGHSHSADWWSYGVLMFEMLTGSLPFQGKDRKETMTLILKAKLGMPQFLSTEAQSLLRALFKRNPANRLGSGPDGAEEIKRHVFYSTIDWNKLYRREIKPPFKPAVAQPDDTFYFDTEFTSRTPKDSPGIPPSAGAHQLFRGFSFVATGLMEDDGKPRAPQAPLHSVVQQLHGKNLVFSDGYVVKETIGVGSYSECKRCVHKATNMEYAVKVIDKSKRDPSEEIEILLRYGQHPNIITLKDVYDDGKHVYLVTELMRGGELLDKILRQKFFSEREASFVLHTIGKTVEYLHSQGVVHRDLKPSNILYVDESGNPECLRICDFGFAKQLRAENGLLMTPCYTANFVAPEVLKRQGYDEGCDIWSLGILLYTMLAGYTPFANGPSDTPEEILTRIGSGKFTLSGGNWNTVSETAKDLVSKMLHVDPHQRLTAKQVLQHPWVTQKDKLPQSQLSHQDLQLVKGAMAATYSALNSSKPTPQLKPIESSILAQRRVRKLPSTTL

SEQ ID NO: 758212 - protein, 735 aa, Homo sapiens; identical to SEQ ID NO: 758205

SEQ ID NO: 758213 - protein, 544 aa, Homo sapiens
MPLAQLKEPWPLMELVPLDPENGQTSGEEAGLQPSKDEGVLKEISITHHVKAGSEKADPSHFELLKVLGQGSFGKVFLVRKVTRPDSGHLYAMKVLKKATLKVRDRVRTKMERDILADVNHPFVVKLHYAFQTEGKLYLILDFLRGGDLFTRLSKEVMFTEEDVKFYLAELALGLDHLHSLGIIYRDLKPENILLDEEGHIKLTDFGLSKEAIDHEKKAYSFCGTVEYMAPEVVNRQGHSHSADWWSYGVLMFEMLTGSLPFQGKDRKETMTLILKAKLGMPQFLSTEAQSLLRALFKRNPANRLGSGPDGAEEIKRHVFYSTIDWNKLYRREIKPPFKPAVAQPDDTFYFDTEFTSRTPKDSPGIPPSAGAHQLFRGFSFVATGLMEDDGKPRAPQAPLHSVVQQLHGKNLVFSDGYVVKETIGVGSYSECKRCVHKATNMEYAVKVIDKSKRDPSEEIEILLRYGQHPNIITLKDVYDDGKHVYLVTELMRGGELLDKILMEDDGKPRAPQAPLHSVVQQLHGKNLVFSDGYVVKETIAGAL

SEQ ID NO: 758214 - protein, 67 aa, Homo sapiens
RARYPDVSADVTVDVPGSSMAQALLVESDSLYKLFFMKKMASTTMDFYKIHLPFWEQKQPLRPQEGN

SEQ ID NO: 758215 - protein, 69 aa, Homo sapiens
PWPSRGAGGPRDRTRCPRSPELRPVAVDPAPETPSRRSKTKTEPNTKLGEAVACRSQGDALCPGLPGSC

SEQ ID NO: 758216 - protein, 49 aa, Homo sapiens
TPPSISTPPSISTPPSISTPPSITGITCLPACFLFRSNPIITAVFKHCL

SEQ ID NO: 758217 - protein, 446 aa, Homo sapiens
ISLLRRCCCRHTRSPCLVMAENDVDNELLDYEDDEVETAAGGDGAEAPAKKDVKGSYVSIHSSGFRDFLLKPELLRAIVDCGFEHPSEVQHECIPQAILGMDVLCQAKSGMGKTAVFVLATLQQLEPVTGQVSVLVMCHTRELAFQISKEYERFSKYMPNVKVAVFFGGLSIKKDEEVLKKNCPHIVVGTPGRILALARNKSLNLKHIKHFILDECDKMLEQLDMRRDVQEIFRMTPHEKQVMMFSATLSKEIRPVCRKFMQDPMEIFVDDETKLTLHGLQQYYVKLKDNEKNRKLFDLLDVLEFNQVVIFVKSVQRCIALAQLLVEQNFPAIAIHRGMPQEERLSRYQQFKDFQRRILVATNLFGRGMDIERVNIAFNYDMPEDSDTYLHRVARAGRFGTKGLAITFVSDENDAKILNDVQDRFEVNISELPDEIDISSYIEQTR

SEQ ID NO: 758218 - protein, 489 aa, Homo sapiens
ISLLRRCCCRHTRSPCLALLLEIVSCFPLLFLNPLLFTPCFHLFGENPSRSPFPSSPASPVMAENDVDNELLDYEDDEVETAAGGDGAEAPAKKDVKGSYVSIHSSGFRDFLLKPELLRAIVDCGFEHPSEVQHECIPQAILGMDVLCQAKSGMGKTAVFVLATLQQLEPVTGQVSVLVMCHTRELAFQISKEYERFSKYMPNVKVAVFFGGLSIKKDEEVLKKNCPHIVVGTPGRILALARNKSLNLKHIKHFILDECDKMLEQLDMRRDVQEIFRMTPHEKQVMMFSATLSKEIRPVCRKFMQDPMEIFVDDETKLTLHGLQQYYVKLKDNEKNRKLFDLLDVLEFNQVVIFVKSVQRCIALAQLLVEQNFPAIAIHRGMPQEERLSRYQQFKDFQRRILVATNLFGRGMDIERVNIAFNYDMPEDSDTYLHRVARAGRFGTKGLAITFVSDENDAKILNDVQDRFEVNISELPDEIDISSYIEQTR

SEQ ID NO: 758219 - protein, 446 aa, Homo sapiens
DFPPSSLLLPPYALSLFSSSVRNSVFVFLCCSSIPYSSPLVFTYFAENPSRSPFPSSPASPSSGFRDFLLKPELLRAIVDCGFEHPSEVQHECIPQAILGMDVLCQAKSGMGKTAVFVLATLQQLEPVTGQVSVLVMCHTRELAFQISKEYERFSKYMPNVKVAVFFGGLSIKKDEEVLKKNCPHIVVGTPGRILALARNKSLNLKHIKHFILDECDKMLEQLDMRRDVQEIFRMTPHEKQVMMFSATLSKEIRPVCRKFMQDPMEIFVDDETKLTLHGLQQYYVKLKDNEKNRKLFDLLDVLEFNQVVIFVKSVQRCIALAQLLVEQNFPAIAIHRGMPQEERLSRYQQFKDFQRRILVATNLFGRGMDIERVNIAFNYDMPEDSDTYLHRVARAGRFGTKGLAITFVSDENDAKILNDVQDRFEVNISELPDEIDISSYIEQTR

SEQ ID NO: 758220 - protein, 342 aa, Homo sapiens
MKMMRWRQQLGEMGLRPLPRRMSRAPMSPSTALAFVTSCSSQSCSGPLSTVALSIRQKVAVFFGGLSIKKDEEVLKKNCPHIVVGTPGRILALARNKSLNLKHIKHFILDECDKMLEQLDMRRDVQEIFRMTPHEKQVMMFSATLSKEIRPVCRKFMQDPMEIFVDDETKLTLHGLQQYYVKLKDNEKNRKLFDLLDVLEFNQVVIFVKSVQRCIALAQLLVEQNFPAIAIHRGMPQEERLSRYQQFKDFQRRILVATNLFGRGMDIERVNIAFNYDMPEDSDTYLHRVARAGRFGTKGLAITFVSDENDAKILNDVQDRFEVNISELPDEIDISSYIEQTR

SEQ ID NO: 758221 - protein, 321 aa, Homo sapiens
ISLLRRCCCRHTRSPCLALLLEIVSCFPLLFLNPLLFTPCFHLFGENPSRSPFPSSPASPVMAENDVDNELLDYEDDEVETAAGGDGAEAPAKKDVKGSYVSIHSSGFRDFLLKPELLRAIVDCGFEHPSEVQHECIPQAILGMDVLCQAKSGMGKTAVFVLATLQQLEPVTGQVSVLVMCHTRELAFQISKEYERFSKYMPNVKVAVFFGGLSIKKDEEVLKKNCPHIVVGTPGRILALARNKSLNLKHIKHFILDECDKMLEQLDMRRDVQEIFRMTPHEKQVMMFSATLSKEIRPVCRKFMQDVNTLLPSLPPLPARC

SEQ ID NO: 758222 - protein, 158 aa, Homo sapiens
MALLLCLVCLTAALAHGCLHCHSNFSKKFSFYRHHVNFKSWWVGDIPVSGALLTDWSDDTMKELHLAIPAKITREKLDQVATAVYQMMDQLYQGKMYFPGYFPNELRNIFREQVHLIQNAIIESRIDCQHRCGIFQYETISCNNCTDSHVACFGYNCE

SEQ ID NO: 758223 - protein, 190 aa, Homo sapiens
MALLLCLVCLTAALAHGCLHCHSNFSKKFSFYRHHVNFKSWWVGDIPVSGALLTDWSDDTMKELHLAIPAKITREKLDQVATAVYQMMDQLYQGKMYFPGYFPNELRNIFREQVHLIQNAIIESRIDCQHRCGKQGSVQAEGRAGGSSGPWRLRGALAALVRVSGIFQYETISCNNCTDSHVACFGYNCE

SEQ ID NO: 758224 - protein, 190 aa, Homo sapiens; identical to SEQ ID NO: 758223

SEQ ID NO: 758225 - protein, 179 aa, Homo sapiens
MALLLCLVCLTAALAHGCLHCHSNFSKKFSFYRHHVNFKSWWVGDIPVSGALLTDWSDDTMKELHLAIPAKITREKLDQVATAVYQMMDQLYQGKMYFPGYFPNELRNIFREQVHLIQNAIIESRIDCQHRCGIFQYETISCNNCTDSHVACFGYNCESSAQWKSAVQGLLNYINNWHK

SEQ ID NO: 758226 - protein, 184 aa, Homo sapiens
MALLLCLVCLTAALAHGCLHCHSNFSKKFSFYRHHVNFKSWWVGDIPVSGALLTDWSDDTMKELHLAIPAKITREKLDQVATAVYQMMDQLYQGKMYFPGKGRETEAGPPHPGTPRPPPEPDLLLPRRLRVFPQRAAKHLPGAGAPHPERHHRKPHRLSAPLWSSAQWKSAVQGLLNYINNWHK

SEQ ID NO: 758227 - protein, 233 aa, Homo sapiens
MALLLCLVCLTAALAHGCLHCHSNFSKKFSFYRHHVNFKSWWVGDIPVSGALLTDWSDDTMKELHLAIPAKITREKLDQVATAVYQMMDQLYQGKMYFPGYFPNELRNIFREQVHLIQNAIIESRIDCQHRCGIFQYETISCNNCTDSHVACFGYNCESSAQWKSAVQGLLNYINNWHKQDTSMRDHAPLPSPGLGHTEPPRPYLVSPALRCLEPPHLANLTLEDAAECLKQH

SEQ ID NO: 758228 - protein, 208 aa, Homo sapiens
MALLLCLVCLTAALAHGCLHCHSNFSKKFSFYRHHVNFKSWWVGDIPVSGALLTDWSDDTMKELHLAIPAKITREKLDQVATAVYQMMDQLYQGKMYFPGYFPNELRNIFREQVHLIQNAIIESRIDCQHRCGIFQYETISCNNCTDSHVACFGYNCESSAQWKSAVQGLLNYINNWHKQDTSMRPGIASLKVSGAPTLGQPDLGRCC

SEQ ID NO: 758229 - protein, 197 aa, Homo sapiens
MALLLCLVCLTAALAHGCLHCHSNFSKKFSFYRHHVNFKSWWVGDIPVSGALLTDWSDDTMKELHLAIPAKITREKLDQVATAVYQMMDQLYQGKMYFPGYFPNELRNIFREQVHLIQNAIIESRIDCQHRCGIFQYETISCNNCTDSHVACFGYNCESSAQWKSAVQGLLNYMPGIASLKVSGAPTLGQPDLGRCC

SEQ ID NO: 758230 - protein, 190 aa, Homo sapiens; identical to SEQ ID NO: 758223

SEQ ID NO: 758231 - protein, 209 aa, Homo sapiens
MALLLCLVCLTAALAHGCLHCHSNFSKKFSFYRHHVNFKSWWVGDIPVSGALLTDWSDDTMKELHLAIPAKITREKLDQVATAVYQMMDQLYQGKMYFPGKGRETEAGPPHPGTPRPRLSLTFSCLDDSGYFPNELRNIFREQVHLIQNAIIESRIDCQHRCGIFQYETISCNNCTDSHVACFGYNCESSAQWKSAVQGLLNYINNWHK

SEQ ID NO: 758232 - protein, 205 aa, Homo sapiens
MALLLCLVCLTAALAHGCLHCHSNFSKKFSFYRHHVNFKSWWVGDIPVSGALLTDWSDDTMKELHLAIPAKITREKLDQVATAVYQMMDQLYQGKMYFPGYFPNELRNIFREQVHLIQNAIIESRIDCQHRCGIFQYETISCNNCTDSHVACFGYNCESSAQWKSAVQGLLNYINNWHKQDTSMRDHAPLPSPGLGHTEPPRPCE

SEQ ID NO: 758233 - protein, 192 aa, Homo sapiens
NVRAVRVVLGAHNLSRREPTRQVFAVQRIFENGYDPVNLLNDIVILQLNGSATINANVQVAQLPAQGRRLGNGVQCLAMGWGLLGRNRGIASVLQELNVTVVTSLCRRSNVCTLVRGRQAGVCFGDSGSPLVCNGLIHGIASFVRGGCASGLYPDAFAPVAQFVNWIDSIIQRSEDNPCPHPRDPDPASRTH

SEQ ID NO: 758234 - protein, 1023 aa, Homo sapiens
NPVAKRHFVQSAKEVANSTANLVKTIKALDGDFSEDNRNKCRIATAPLIEAVENLTAFASNPEFVSIPAQISSEGSQAQEPILVSAKTMLESSSYLIRTARSLAINPKDPPTWSVLAGHSHTVSDSIKSLITSIRDKAPGQRECDYSIDGINRCIRDIEQASLAAVSQSLATRDDISVEALQEQLTSVVQEIGHLIDPIATAARGEAAQLGHKVTQLASYFEPLILAAVGVASKILDHQQQMTVLDQTKTLAESALQMLYAAKEGGGNPKAQHTHDAITEAAQLMKEAVDDIMVTLNEAASEVGLVGGMVDAIAEAMSKLDEGTPPEPKGTFVDYQTTVVKYSKAIAVTAQEMMTKSVTNPEELGGLASQMTSDYGHLAFQGQMAAATAEPEEIGFQIRTRVQDLGHGCIFLVQKAGALQVCPTDSYTKRELIECARAVTEKVSLVLSALQAGNKGTQACITAATAVSGIIADLDTTIMFATAGTLNAENSETFADHRENILKTAKALVEDTKLLVSGAASTPDKLAQAAQSSAATITQLAEVVKLGAASLGSDDPETQVVLINAIKDVAKALSDLISATKGAASKPVDDPSMYQLKGAAKVMVTNVTSLLKTVKAVEDEATRGTRALEATIECIKQELTVFQSKDVPEKTSSPEESIRMTKGITMATAKAVAAGNSCRQEDVIATANLSRKAVSDMLTACKQASFHPDVSDEVRTRALRFGTECTLGYLDLLEHVLVILQKPTPEFKQQLAAFSKRVAGAVTELIQAAEAMKGTEWVDPEDPTVIAETELLGAAASIEAAAKKLEQLKPRAKPKQADETLDFEEQILEAAKSIAAATSALVKSASAAQRELVAQGKVGSIPANAADDGQWSQGLISAARMVAAATSSLCEAANASVQGHASEEKLISSAKQVAASTAQLLVACKVKADQDSEAMRRLQAAGNAVKRASDNLVRAAQKAAFGKADDDDVVVKTKFVGGIAQIIAAQEEMLKKERELEEARKKLAQIRQQQYKFLPTELREDEG

SEQ ID NO: 758235 - protein, 221 aa, Homo sapiens
PRAESARGGTRPKQADETLDFEEQILEAAKSIAAATSALVKSASAAQRELVAQGKVGSIPANAADDGQWSQGLISAARMVAAATSSLCEAANASVQGHASEEKLISSAKQVAASTAQLLVACKVKADQDSEAMRRLQAAGNAVKRASDNLVRAAQKAAFGKADDDDVVVKTKFVGGIAQIIAAQEEMLKKERELEEARKKLAQIRQQQYKFLPTELREDEG

SEQ ID NO: 758236 - protein, 1013 aa, Homo sapiens
VYHRHPIQLSLIEFDLAALDGDFSEDNRNKCRIATAPLIEAVENLTAFASNPEFVSIPAQISSEGSQAQEPILVSAKTMLESSSYLIRTARSLAINPKDPPTWSVLAGHSHTVSDSIKSLITSIRDKAPGQRECDYSIDGINRCIRDIEQASLAAVSQSLATRDDISVEALQEQLTSVVQEIGHLIDPIATAARGEAAQLGHKVTQLASYFEPLILAAVGVASKILDHQQQMTVLDQTKTLAESALQMLYAAKEGGGNPKAQHTHDAITEAAQLMKEAVDDIMVTLNEAASEVGLVGGMVDAIAEAMSKLDEGTPPEPKGTFVDYQTTVVKYSKAIAVTAQEMMTKSVTNPEELGGLASQMTSDYGHLAFQGQMAAATAEPEEIGFQIRTRVQDLGHGCIFLVQKAGALQVCPTDSYTKRELIECARAVTEKVSLVLSALQAGNKGTQACITAATAVSGIIADLDTTIMFATAGTLNAENSETFADHRENILKTAKALVEDTKLLVSGAASTPDKLAQAAQSSAATITQLAEVVKLGAASLGSDDPETQVVLINAIKDVAKALSDLISATKGAASKPVDDPSMYQLKGAAKVMVTNVTSLLKTVKAVEDEATRGTRALEATIECIKQELTVFQSKDVPEKTSSPEESIRMTKGITMATAKAVAAGNSCRQEDVIATANLSRKAVSDMLTACKQASFHPDVSDEVRTRALRFGTECTLGYLDLLEHVLVILQKPTPEFKQQLAAFSKRVAGAVTELIQAAEAMKGTEWVDPEDPTVIAETELLGAAASIEAAAKKLEQLKPRAKPKQADETLDFEEQILEAAKSIAAATSALVKSASAAQRELVAQGKVGSIPANAADDGQWSQGLISAARMVAAATSSLCEAANASVQGHASEEKLISSAKQVAASTAQLLVACKVKADQDSEAMRRLQAAGNAVKRASDNLVRAAQKAAFGKADDDDVVVKTKFVGGIAQIIAAQEEMLKKERELEEARKKLAQIRQQQYKFLPTELREDEG

SEQ ID NO: 758237 - protein, 1013 aa, Homo sapiens; identical to SEQ ID NO: 758236

SEQ ID NO: 758238 - protein, 408 aa, Homo sapiens
VYHRHPIQLSLIEFDLAALDGDFSEDNRNKCRIATAPLIEAVENLTAFASNPEFVSIPAQISSEGSQAQEPILVSAKTMLESSSYLIRTARSLAINPKDPPTWSVLAGHSHTVSDSIKSLITSIRDKAPGQRECDYSIDGINRCIRDIEQASLAAVSQSLATRDDISVEALQEQLTSVVQEIGHLIDPIATAARGEAAQLGHKVTQLASYFEPLILAAVGVASKILDHQQQMTVLDQTKTLAESALQMLYAAKEGGGNPKAQHTHDAITEAAQLMKEAVDDIMVTLNEAASEVGLVGGMVDAIAEAMSKLDEGTPPEPKGTFVDYQTTVVKYSKAIAVTAQEMMTKSVTNPEELGGLASQMTSDYGHLAFQGQMAAATAEPEEVCHLKTPILRCTHTLVPTPGYFFIA

SEQ ID NO: 758239 - protein, 1013 aa, Homo sapiens; identical to SEQ ID NO: 758236

SEQ ID NO: 758240 - protein, 155 aa, Homo sapiens
LSLSCSFWLPPPGMSSVTVAGDVALEKAASCWLNSGVGFCRITKTCSRRSKLLVACKVKADQDSEAMRRLQAAGNAVKRASDNLVRAAQKAAFGKADDDDVVVKTKFVGGIAQIIAAQEEMLKKERELEEARKKLAQIRQQQYKFLPTELREDEG

SEQ ID NO: 758241 - protein, 1013 aa, Homo sapiens; identical to SEQ ID NO: 758236

SEQ ID NO: 758242 - protein, 1062 aa, Homo sapiens
VYHRHPIQLSLIEFDLAALDGDFSEDNRNKCRIATAPLIEAVENLTAFASNPEFVSIPAQISSEGSQAQEPILVSAKTMLESSSYLIRTARSLAINPKDPPTWSVLAGHSHTVSDSIKSLITSIRDKAPGQRECDYSIDGINRCIRDIEQASLAAVSQSLATRDDISVEALQEQLTSVVQEIGHLIDPIATAARGEAAQLGHKVTQLASYFEPLILAAVGVASKILDHQQQMTVLDQTKTLAESALQMLYAAKEGGGNPKAQHTHDAITEAAQLMKEAVDDIMVTLNEAASEVGLVGGMVDAIAEAMSKLDEGTPPEPKGTFVDYQTTVVKYSKAIAVTAQEMMTKSVTNPEELGGLASQMTSDYGHLAFQGQMAAATAEPEEIGFQIRTRVQDLGHGCIFLVQKAGALQVCPTDSYTKRELIECARAVTEKVSLVLSALQAGNKGTQACITAATAVSGIIADLDTTIMFATAGTLNAENSETFADHRENILKTAKALVEDTKLLVSGAASTPDKLAQAAQSSAATITQLAEVVKLGAASLGSDDPETQVVLINAIKDVAKALSDLISATKGAASKPVDDPSMYQLKGAAKVMVTNVTSLLKTVKAVEDEATRGTRALEATIECIKQELTVFQSKDVPEKTSSPEESIRMTKGITMATAKAVAAGNSCRQEDVIATANLSRKAVSDMLTACKQASFHPDVSDEVRTRALRFGTECTLGYLDLLEHVLVILQKPTPEFKQQLAAFSKRVAGAVTELIQAAEAMKGTEWVDPEDPTVIAETELLGAAASIEAAAKKLEQLKPRAKPKQADETLDFEEQILEAAKSIAAATSALVKSASAAQRELVAQGKVGSIPANAADDGQWSQGLISAARMVAAATSSLCEAANASVQGHASEEKLISSAKQVAASTAQLLVACKVKADQDSEAMRRLQAAGNAVKRASDNLVRAAQKAAFGKADDDDVVVKTKFVGGIAQIIAAQEEMLKKERELEEARKKLAQIRQQQYKFLPHPGGEKFPPLFARFLASVCKLLVQPRPILYFVAQKTERLFCSSVVQRAELRKAVGAW

SEQ ID NO: 758243 - protein, 159 aa, Homo sapiens
MQRVGNTFSNESRVASRCPSVGLAERNRVATMPVRLLRDSPAAQEDNDHARDGFQMKLDAHGFAPEELVVQVDGQWLMVTGQQQLDVRDPERVSYRMSQKVHRKMLPSNLSPTAMTCCLTPSGQLWVRGQCVALALPEAQTGPSPRLGSLGSKASNLTR

SEQ ID NO: 758244 - protein, 822 aa, Homo sapiens
MGFSSELCSPQGHGVLQQMQEAELRLLEGMRKWMAQRVKSDREYAGLLHHMSLQDSGGQSRAISPDSPISQSWAEITSQTEGLSRLLRQHAEDLNSGPLSKLSLLIRERQQLRKTYSEQWQQLQQELTKTHSQDIEKLKSQYRALARDSAQAKRKYQEASKDKDRDKAKDKYVRSLWKLFAHHNRYVLGVRAAQLHHQHHHQLLLPGLLRSLQDLHEEMACILKEILQEYLEISSLVQDEVVAIHREMAAAAARIQPEAEYQGFLRQYGSAPDVPPCVTFDESLLEEGEPLEPGELQLNELTVESVQHTLTSVTDELAVATEMVFRRQEMVTQLQQELRNEEENTHPRERVQLLGKRQVLQEALQGLQVALCSQAKLQAQQELLQTKLEHLGPGEPPPVLLLQDDRHSTSSSEQEREGGRTPTLEILKSHISGIFRPKFSLPPPLQLIPEVQKPLHEQLWYHGAIPRAEVAELLVHSGDFLVRESQGKQEYVLSVLWDGLPRHFIIQSLDNLYRLEGEGFPSIPLLIDHLLSTQQPLTKKSGVVLHRAVPKDKWVLNHEDLVLGEQIGRGNFGEVFSGRLRADNTLVAVKSCRETLPPDLKAKFLQEARILKQYSHPNIVRLIGVCTQKQPIYIVMELVQGGDFLTFLRTEGARLRVKTLLQMVGDAAAGMEYLESKCCIHRDLAARNCLVTEKNVLKISDFGMSREEADGVYAASGGLRQVPVKWTAPEALNYGRYSSESDVWSFGILLWETFSLGASPYPNLSNQQTREFVEKGGRLPCPELCPDAVFRLMEQCWAYEPGQRPSFSTIYQELQSIRKRHR

SEQ ID NO: 758245 - protein, 822 aa, Homo sapiens; identical to SEQ ID NO: 758244

SEQ ID NO: 758246 - protein, 89 aa, Homo sapiens
GGLSAPGPGQALSPLLLSLSPSQGSRPLRMEAADPGSPALQNLYRLEGEGFPSIPLLIDHLLSTQQPLTKKSGVVLHRAVPKVSLHPAW

SEQ ID NO: 758247 - protein, 65 aa, Homo sapiens
MSPCPVSPRDLAARNCLVTEKNVLKISDFGMSREEADGVYAASGGLRCGPLHGDLSEATLMLGYR

SEQ ID NO: 758248 - protein, 778 aa, Homo sapiens
TRGVQEQLPVRNSTMGFSSELCSPQGHGVLQQMQEAELRLLEGMRKWMAQRVKSDREYAGLLHHMSLQDSGGQSRAISPDSPISQTHSQDIEKLKSQYRALARDSAQAKRKYQEASKDKDRDKAKDKYVRSLWKLFAHHNRYVLGVRAAQLHHQHHHQLLLPGLLRSLQDLHEEMACILKEILQEYLEISSLVQDEVVAIHREMAAAAARIQPEAEYQGFLRQYGSAPDVPPCVTFDESLLEEGEPLEPGELQLNELTVESVQHTLTSVTDELAVATEMVFRRQEMVTQLQQELRNEEENTHPRERVQLLGKRQVLQEALQGLQVALCSQAKLQAQQELLQTKLEHLGPGEPPPVLLLQDDRHSTSSSEQEREGGRTPTLEILKSHISGIFRPKFSLPPPLQLIPEVQKPLHEQLWYHGAIPRAEVAELLVHSGDFLVRESQGKQEYVLSVLWDGLPRHFIIQSLDNLYRLEGEGFPSIPLLIDHLLSTQQPLTKKSGVVLHRAVPKDKWVLNHEDLVLGEQIGRGNFGEVFSGRLRADNTLVAVKSCRETLPPDLKAKFLQEARILKQYSHPNIVRLIGVCTQKQPIYIVMELVQGGDFLTFLRTEGARLRVKTLLQMVGDAAAGMEYLESKCCIHRDLAARNCLVTEKNVLKISDFGMSREEADGVYAASGGLRQVPVKWTAPEALNYGRYSSESDVWSFGILLWETFSLGASPYPNLSNQQTREFVEKGGRLPCPELCPDAVFRLMEQCWAYEPGQRPSFSTIYQELQSIRKRHR

SEQ ID NO: 758249 - protein, 107 aa, Homo sapiens [sequence omitted]

SEQ ID NO: 758250 - protein, 106 aa, Homo sapiens [sequence omitted]

SEQ ID NO: 758251 - protein, 494 aa, Homo sapiens
MARAAPLLAALTALLAAAAAGGDAPPGKIAVVGAGIGGSAVAHFLQQHFGPRVQIDVYEKGTVGGRLATISVNKQHYESGAASFHSLSLHMQDFVKLLGLRHRREVVGRSAIFGGEHFMLEETDWYLLNLFRLWWHYGISFLRLQMWVEEVMEKFMRIYKYQAHGYAFSGVEELLYSLGESTFVNMTQHSVAESLLQVGVTQRFIDDVVSAVLRASYGQSAAMPAFAGAMSLAGAQGSLWSVEGGNKLVCSGLLKLTKANVIHATVTSVTLHSTEGKALYQVAYENEVGNSSDFYDIVVIATPLHLDNSSSNLTFAGFHPPIDDVQGSFQPTVVSLVHGYLNSSYFGFPDPKLFPFANILTTDFPSFFCTLDNICPVNISASFRRKQPQEAAVWRVQSPKPLFRTQLKTLFRSYYSVQTAEWQAHPLYGSRPTLPRFALHDQLFYLNALEWAASSVEVMAVAAKNVALLAYNRWYQDLDKIDQKDLMHKVKTEL

SEQ ID NO: 758252 - protein, 494 aa, Homo sapiens; identical to SEQ ID NO: 758251

SEQ ID NO: 758253 - protein, 435 aa, Homo sapiens
MARAAPLLAALTALLAAAAAGGDAPPGKIAVVGAGIGGSAVAHFLQQHFGPRVQIDVYEKGTVGGRLATISVNKQHYESGAASFHSLSLHMQDFVKLLGLRHRREVVGRSAIFGGEHFMLEETDWYLLNLFRLWWHYGISFLRLQMWVEEVMEKFMSYGQSAAMPAFAGAMSLAGAQGSLWSVEGGNKLVCSGLLKLTKANVIHATVTSVTLHSTEGKALYQVAYENEVGNSSDFYDIVVIATPLHLDNSSSNLTFAGFHPPIDDVQGSFQPTVVSLVHGYLNSSYFGFPDPKLFPFANILTTDFPSFFCTLDNICPVNISASFRRKQPQEAAVWRVQSPKPLFRTQLKTLFRSYYSVQTAEWQAHPLYGSRPTLPRFALHDQLFYLNALEWAASSVEVMAVAAKNVALLAYNRWYQDLDKIDQKDLMHKVKTEL

SEQ ID NO: 758254 - protein, 309 aa, Homo sapiens [sequence omitted]

SEQ ID NO: 758255 - protein, 114 aa, Homo sapiens
MKSLRPCLLPREPECPQMLVLPLHPLLQTPQWLHPKPLNFASLSPNPQFHPTSKTALPPIPISAEGTIIHPVATSRNVCITWALRMTSALLSQQNVGSVLKVSSDKEIFKALLP

SEQ ID NO: 758256 - protein, 114 aa, Homo sapiens; identical to SEQ ID NO: 758255

SEQ ID NO: 758257 - protein, 128 aa, Homo sapiens
MNVGTAHSEVNPNTRVMNSRGIWLSYVLAIGLLHIVLLSIPFVSVPVVWTLTNLIHNMGMYIFLHTVKGTPFETPDQGKARLLTHWEQMDYGVQFTASRKFLTITPIVLSIHIHTENTGVKRRIFCTN

SEQ ID NO: 758258 - protein, 153 aa, Homo sapiens
MNVGTAHSEVNPNTRVMNSRGIWLSYVLAIGLLHIVLLSIPFVSVPVVWTLTNLIHNMGMYIFLHTVKGTPFETPDQGKARLLTHWEQMDYGVQFTASRKFLTITPIVLYFLTSFYTKYDQIHFVLNTVSLMSVLIPKLPQLHGVRIFGINKY

SEQ ID NO: 758259 - protein, 112 aa, Homo sapiens
SQPSYLVWTLTNLIHNMGMYIFLHTVKGTPFETPDQGKARLLTHWEQMDYGVQFTASRKFLTITPIVLYFLTSFYTKYDQIHFVLNTVSLMSVLIPKLPQLHGVRIFGINKY

SEQ ID NO: 758260 - protein, 153 aa, Homo sapiens; identical to SEQ ID NO: 758258

SEQ ID NO: 758261 - protein, 153 aa, Homo sapiens; identical to SEQ ID NO: 758258

SEQ ID NO: 758262 - protein, 153 aa, Homo sapiens; identical to SEQ ID NO: 758258

SEQ ID NO: 758263 - protein, 153 aa, Homo sapiens; identical to SEQ ID NO: 758258

SEQ ID NO: 758264 - protein, 153 aa, Homo sapiens; identical to SEQ ID NO: 758258

SEQ ID NO: 758265 - protein, 207 aa, Homo sapiens
MNVGTAHSEVNPNTRVMNSRGIWLSYVLAIGLLHIVLLSIPFVSVPVVWTLTNLIHNMGMYIFLHTVKGTPFETPDQGKARLLTHWEQMDYGVQFTASRKFLTITPIVLARPGARADVGTVHVGVKRNTRVMNSRGIWLSYGCWPSVSSHIVLLSIPFVSVPVVWTLTNLIHNMGMYIFLHTVTVDTLETRTGKGGVTMGARYGPVR

SEQ ID NO: 758266 - protein, 90 aa, Homo sapiens
  misc_feature (78)..(79): Xaa can be any naturally occurring amino acid
TAERGSRMNVGTAHSEVNPNTRVMNSRGIWLSYVLAIGLLHIVLLSIPFVSVPVVWTLTNLIHNMVRACLLPAPAPAXXPCGLPFGRAEG

SEQ ID NO: 758267 - protein, 188 aa, Homo sapiens
MNGDDTFAKRPRDDAKASEKRSKAFDDIATYFSKKEWKKMKYSEKISYVYMKRNYKAMTKLGFKVTLPPFMCNKQATDFQGNDFDNDHNRRIQVEHPQMTFGRLHRIIPKIMPKKPAEDENDSKGVSEASGPQNDGKQLHPPGKANISEKINKRSGPKRGKHAWTHRLRERKQLVIYEEISDPEEDDE

SEQ ID NO: 758268 - protein, 158 aa, Homo sapiens
QQQDAYQGPPPQQGYPPQQQQYPGQQGYPGQQQGYGPSQGGPGPQYPNYPQGQGQQYGGYRPTQPGPPQPPQQRPYGYDQIMPKKPAEDENDSKGVSEASGPQNDGKQLHPPGKANISEKINKRSGPKRGKHAWTHRLRERKQLVIYEEISDPEEDDE

SEQ ID NO: 758269 - protein, 188 aa, Homo sapiens; identical to SEQ ID NO: 758267

SEQ ID NO: 758270 - protein, 188 aa, Homo sapiens; identical to SEQ ID NO: 758267

SEQ ID NO: 758271 - protein, 188 aa, Homo sapiens; identical to SEQ ID NO: 758267

SEQ ID NO: 758272 - protein, 351 aa, Homo sapiens
METNFSTPLNEYEEVSYESAGYTVLRILPLVVLGVTFVLGVLGNGLVIWVAGFRMTRTVTTICYLNLALADFSFTATLPFLIVSMAMGEKWPFGWFLCKLIHIVVDINLFGSVFLIGFIALDRCICVLHPVWAQNHRTVSLAMKVIVGPWILALVLTLPVFLFLTTVTIPNGDTYCTFNFASWGGTPEERLKVAITMLTARGIIRFVIGFSLPMSIVAICYGLIAAKIHKKGMIKSSRPLRVLTAVVASFFICWFPFQLVALLGTVWLKEMLFYGKYKIIDILVNPTSSLAFFNSCLNPMLYVFVGQDFRERLIHSLPTSLERALSEDSAPTNDTAANSASPPAETELQAM

SEQ ID NO: 758273 - protein, 351 aa, Homo sapiens; identical to SEQ ID NO: 758272

SEQ ID NO: 758274 - protein, 351 aa, Homo sapiens; identical to SEQ ID NO: 758272

SEQ ID NO: 758275 - protein, 138 aa, Homo sapiens
VLVAWLASSLLLLQDPPGQRRPSREIHTILCAGFGPNASWAFLALGDQCMSWDCLTLRIAGTPRSLGPLWLWGAQAPCFFLLCYSEGSSGSQDTVIVLHLQPQSRQGQATHLHRESKTQQLWSTSACSLLARGRSRDH

SEQ ID NO: 758276 - protein, 143 aa, Homo sapiens
NEHLQALLTPDEPDKSQGQDLQEQLAEGCRLAQHLVQKLSPENDEDEDEDVQVEEDEKVLESSSPREMQKAEESKVPEDSLEECAITCSNSHGPCDSNQPHKNIKITFEEDKVNSSLVVDREYSHDECQDALNILPGSLYFPC

SEQ ID NO: 758277 - protein, 381 aa, Homo sapiens [sequence omitted]

SEQ ID NO: 758278 - protein, 111 aa, Homo sapiens
MWVFSEEGYKKYNINEFMFLAKKNQEILWILHTHSFTFFTSTWEVIRSAAVKLTDAVVLNLTSQYVELLDREQLTTRLQALRQDPCISVQRAAEAALQTLLRRCKETSIPL

SEQ ID NO: 758279 - protein, 448 aa, Homo sapiens
SPQVACAMYEVISMGTSVTGLYPELFTLLLKLVSCTLGQKMLTCPWSHRRHVMQQGEQQQIPDPCRLSTATLKCLQAQAMREGLAKESDEGDNLWTLLSSPSTHHIGVCSLARSMAVWQHGVILDIMEQLLSSLTSSSENYRITGAAFFSELMKEPILWKHGNLRNVLILMDQSAWDSNATLRQMAIRGLGNTASGAPHKVKKHKQLMLESIIRGLYHLARTEVVCESLKALKKILELLTDRDVSFYFKEIVLQTRTFFEDEQDDVRLTAIFLFEDLAPLTGRRWKIFFAEEIKKSLISFLLHLWDPNPKIGVACRDVLMVCIPFLGLQELYGVLDRLLDQDLPRARDFYRQFCVKLAKKNQEILWILHTHSFTFFTSTWEVIRSAAVKLTDAVVLNLTSQYVELLDREQLTTRLQALRQDPCISVQRAAEAALQTLLRRCKETSIPL

SEQ ID NO: 758280 - protein, 444 aa, Homo sapiens
SPQVACAMYEVISMGTSVTGLYPELFTLLLKLVSCTLGQKMLTCPWSHRRHVMQQGEQQQIPDPCRLSTATLKCLQAQAMREGLAKESDEGDNLWTLLSSPSTHHIGVCSLARSMAVWQHGVILDIMEQLLSSLTSSSENYRITGAAFFSELMKEPILWKHGNLRNVLILMDQSAWDSNATLRQMAIRGLGNTASGAPHKVKKHKQLMLESIIRGLYHLARTEVVCESLKALKKILELLTDRDVSFYFKEIVLQTRTFFEDEQDDVRLTAIFLFEDLAPLTGRRWKIFFAEEIKKSLISFLLHLWDPNPKIGVACRDVLMVCIPFLGLQELYGVLDRLLDQDLPRARDFYRQFCVKLAKKNQEILWILHTHSFTFFTSTWEVIRSAAVKLTDAVVLNLTSQYVELLDREQLTTHTRISPGYKAISSSSPLQASETPIDYDFPIA

SEQ ID NO: 758281 - protein, 188 aa, Homo sapiens
  misc_feature (5)..(5): Xaa can be any naturally occurring amino acid
HRARXVEIRLFSLNGSCITHFLLKRRIFFAEEIKKSLISFLLHLWDPNPKIGVACRDVLMVCIPFLGLQELYGVLDRLLDQDLPRARDFYRQFCVKLAKKNQEILWILHTHSFTFFTSTWEVIRSAAVKLTDAVVLNLTSQYVELLDREQLTTRLQALRQDPCISVQRAAEAALQTLLRRCKETSIPL

SEQ ID NO: 758282 - protein, 1233 aa, Homo sapiens
KEQDLKTNKILSEIEKEEFMRSKTDCATPDFVPEPSPHDLPMDEHVLPDDADINFGYCEVEEKCRQSFEAWQEKQKELEDKEKQTLKAQRDREEKQFQEEEEKRHCWMKQFKVEKKKLENIQKQEQDKMNDELYKEEKIWKEKFKQHEEYIRNLHLQMEEERTRFKDQQEKEKNSLLKQQNNAAVKIQAKYKAFVAYQKYGPIIKEQIESKKRKAQEWKEKEAKIRQKEEENRKRLEEEQRIKEERKKQKEEERKRREKEYEEKKNIVKQEREQLISKEKIILREDASQQLIISSALKKSGYNNKHLSLEDISNDKGDIAKNLVDENSKKQEDVLLWLVEESNMKENVDRQTILKESIQVKLKESISSQTILADFKMEEKNENLAKKRCSEELVKQERKYENTDNKTELGNSDLKGNLKEQFPLQELKSDAQKEEKIMKHVINENTGQKTQIILGHNQEISEVKTNEEQKIIKDNQQKKIQKVEKEEIQEQNGLLYKDKDTLVISVKQRSLSLTSENSKDVRENVILQEKEIYSKSKEIEENPKDNAWNSGIVIFNTTDTMINIEGKRNDQDYVLGRHAPCEGLSNYNAESSMVSKEVNSLKSEIRNISEKCHENAPEPDSMTCCVSESTLLYSIEERRLAWIKSFKPWLEIFKQNQQKKIVRRKRPVKCPANMTPALDKLEILRCGPWDTLQQVTTVTFQDLPGCVLSTLAECTNLQFLSLRRCGLTSLHSLSNCKKLKYIDAQENHIEAIECENLENLCVVLLNKNQLTSLHGLDGCTNIQCLELSYNKITRIGYSFFLEEKLVDNAGFCHHLGTSTSYLSLAQVWIPTGLCWSWIPITSLTKNSDCNFLISHLYWNCGLESLKNLQQLILDHNQLINTKGLCDTPTIVYLDCSHNHLTDVEGVENCGLLQILKLQGNYLSELPSLENLVLLRELHLDDNSISTVEAFSSYWLPLLQNITISQNSLTKIVPLFHFVSLEKLDVSHNCLSDLKSAIKWFDACYSLHELSLTGNPLLQETNWRDSLLKVLPALRILNGNILNSNSESRTEEHNQLGSAGFLALCQSQIREFNLLIENYITGKGDVFTLDTAENLCHYFKKLMILSTEYRHAHERGDVTITKKDESEAQKNHLAPTNSDSTLQNGVFYSCAREGEPDSPDIPEKWMDSVSSHSPLSKSATCENMEGRHQEILVCQKREDSKASSIPTIRIPFKEVVMTNSLLRNHQNIEPSEKM

SEQ ID NO: 758283 - protein, 242 aa, Homo sapiens
MDDDDAKLKAEIEAELDKLSISSLEKEDIESDAKSETQSDDSDTDSVELPESVLHCINIIKNRSKAVEELILQDLEDTDILSCSYGAVSNNHMHLRTGLSTEYEESSEQLIKILSEIEKEEFMRSKTDCATPDFVPEPSPHDLPMDEHVLPDDADINFGYCEVEEKCRQSFEAWQEKQKELEDKEKQTLKAQRDREEKQFQEEEEKRHCWMKQFKVEKKKLENIQKVFCFCFSCIFKISSYL

SEQ ID NO: 758284 - protein, 1336 aa, Homo sapiens
MDDDDAKLKAEIEAELDKLSISSLEKEDIESDAKSETQSDDSDTDSVELPESVLHCINIIKNRSKAVEELILQDLEDTDILSCSYGAVSNNHMHLRTGLSTEYEESSEQLIKILSEIEKEEFMRSKTDCATPDFVPEPSPHDLPMDEHVLPDDADINFGYCEVEEKCRQSFEAWQEKQKELEDKEKQTLKAQRDREEKQFQEEEEKRHCWMKQFKVEKKKLENIQKQEQDKMNDELYKEEKIWKEKFKQHEEYIRNLHLQMEEERTRFKDQQEKEKNSLLKQQNNAAVKIQAKYKAFVAYQKYGPIIKEQIESKKRKAQEWKEKEAKIRQKEEENRKRLEEEQRIKEERKKQKEEERKRREKEYEEKKNIVKQEREQLISKEKIILREDASQQLIISSALKKSGYNNKHLSLEDISNDKGDIAKNLVDENSKKQEDVLLWLVEESNMKENVDRQTILKESIQVKLKESISSQTILADFKMEEKNENLAKKRCSEELVKQERKYENTDNKTELGNSDLKGNLKEQFPLQELKSDAQKEEKIMKHVINENTGQKTQIILGHNQEISEVKTNEEQKIIKDNQQKKIQKVEKEEIQEQNGLLYKDKDTLVISVKQRSLSLTSENSKDVRENVILQEKEIYSKSKEIEENPKDNAWNSGIVIFNTTDTMINIEGKRNDQDYVLGRHAPCEGLSNYNAESSMVSKEVNSLKSEIRNISEKCHENAPEPDSMTCCVSESTLLYSIEERRLAWIKSFKPWLEIFKQNQQKKIVRRKRPVKCPANMTPALDKLEILRCGPWDTLQQVTTVTFQDLPGCVLSTLAECTNLQFLSLRRCGLTSLHSLSNCKKLKYIDAQENHIEAIECENLENLCVVLLNKNQLTSLHGLDGCTNIQCLELSYNKITRIGYSFFLEEKLVDNAGFCHHLGTSTSYLSLAQVWIPTGLCWSWIPITSLTKNSDCNFLISHLYWNCGLESLKNLQQLILDHNQLINTKGLCDTPTIVYLDCSHNHLTDVEGVENCGLLQILKLQGNYLSELPSLENLVLLRELHLDDNSISTVEAFSSYWLPLLQNITISQNSLTKIVPLFHFVSLEKLDVSHNCLSDLKSAIKWFDACYSLHELSLTGNPLLQETNWRDSLLKVLPALRILNGNILNSNSESRTEEHNQLGSAGFLALCQSQIREFNLLIENYITGKGDVFTLDTAENLCHYFKKLMILSTEYRHAHERGDVTITKKDESEAQKNHLAPTNSDSTLQNGVFYSCAREGEPDSPDIPEKWMDSVSSHSPLSKSATCENMEGRHQEILVCQKREDSKASSIPTIRIPFKEVVMTNSLLRNHQNIEPSEKM

SEQ ID NO: 758285 - protein, 1537 aa, Homo sapiens
MDDDDAKLKAEIEAELDKLSISSLEKEDIESDAKSETQSDDSDTDSVELPESVLHCINIIKNRSKAVEELILQDLEDTDILSCSYGAVSNNHMHLRTGLSTEYEESSEQLIKILSEIEKEEFMRSKTDCATPDFVPEPSPHDLPMDEHVLPDDADINFGYCEVEEKCRQSFEAWQEKQKELEDKEKQTLKAQRDREEKQFQEEEEKRHCWMKQFKVEKKKLENIQKQEQDKMNDELYKEEKIWKEKFKQHEEYIRNLHLQMEEERTRFKDQQEKEKNSLLKQQNNAAVKIQAKYKAFVAYQKYGPIIKEQIESKKRKAQEWKEKEAKIRQKEEENRKRLEEEQRIKEERKKQKEEERKRREKEYEEKKNIVKQEREQLISKEKIILREDASQQLIISSALKKSGYNNKHLSLEDISNDKGDIAKNLVDENSKKQEDVLLWLVEESNMKENVDRQTILKESIQVKLKESISSQTILADFKMEEKNENLAKKRCSEELVKQERKYENTDNKTELGNSDLKGNLKEQFPLQELKSDAQKEEKIMKHVINENTGQKTQIILGHNQEISEVKTNEEQKIIKDNQQKKIQKVEKEEIQEQNGLLYKDKDTLVISVKQRSLSLTSENSKDVRENVILQEKEIYSKSKEIEENPKDNAWNSGIVIFNTTDTMINIEGKRNDQDYVLGRHAPCEGLSNYNAESSMVSKEVNSLKSEIRNISEKCHENAPEPDSMTCCVSESTLLYSIEERRLAWIKSFKPWLEIFKQNQQKKIVRRKRPVKCPANMTPALDKLEILRCGPWDTLQQVTTVTFQDLPGCVLSTLAECTNLQFLSLRRCGLTSLHSLSNCKKLKYIDAQENHIEAIECENLENLCVVLLNKNQLTSLHGLDGCTNIQCLELSYNKITRIGYSFFLEEKLVDNAGFCHHLGTSTSYLSLAQVWIPTGLCWSWIPITSLTKNSDCNFLISHLYWNCGLESLKNLQQLILDHNQLINTKGLCDTPTIVYLDCSHNHLTDVEGVENCGLLQILKLQGNYLSELPSLENLVLLRELHLDDNSISTVEAFSSYWLPLLQNITISQNSLTKIVPLFHFVSLEKLDVSHNCLSDLKSAIKWFDACYSLHELSLTGNPLLQETNWRDSLLKVLPALRILNGNILNSNSESRTEEHNQLGSAGFLALCQSQIREFNLLIENYITGKGDVFTLDTAENLCHYFKKLMILSTEYRHAHERGDVTITKKDESEAQKNHLAPTNSDSTLQNGVFYSCAREGEPDSPDIPEKWMDSVSSHSPLSKSATCENMEGRHQEILVCQKREDSKASSIPTIRIPFKEVVMTNSLLRNHQNIEPSEKIMAAVVIQSYWRGYLMRRQTHFSTRLHTAATEGLPNSSIKNQTILKKGKRENIVNIRKQREKAAILIQAVWKGFILRKKLTTALEAIKNEESDEEYREIDLEDFIFDEAALEEEWLALDSTRFPSQTLLLSNQLHWPKIPGNLKWDDTSFNLPSNPAQAWLCNDKENLSSSEHTQFNSRSENKTSSWTPESKTSRKSLLKSE

SEQ ID NO: 758286 - protein, 1311 aa, Homo sapiens
MDDDDAKLKAEIEAELDKLSISSLEKEDIESDAKSETQSDDSDTDSVELPESVLHCINIIKNRSKAVEELILQDLEDTDILSCSYGAVSNNHMHLRTGLSTEYEESSEQLIKILSEIEKEEFMRSKTDCATPDFVPEPSPHDLPMDEHVLPDDADINFGYCEVEEKCRQSFEAWQEKQKELEDKEKQTLKAQRDREEKQFQEEEEKRHCWMKQFKVEKKKLENIQKEYIRNLHLQMEEERTRFKDQQEKEKNSLLKQQNNAAVKIQAKYKAFVAYQKYGPIIKEQIESKKRKAQEWKEKEAKIRQKEEENRKRLEEEQRIKEERKKQKEEERKRREKEYEEKKNIVKQEREQLISKEKIILREDASQQLIISSALKKSGYNNKHLSLEDISNDKGDIAKNLVDENSKKQEDVLLWLVEESNMKENVDRQTILKESIQVKLKESISSQTILADFKMEEKNENLAKKRCSEELVKQERKYENTDNKTELGNSDLKGNLKEQFPLQELKSDAQKEEKIMKHVINENTGQKTQIILGHNQEISEVKTNEEQKIIKDNQQKKIQKVEKEEIQEQNGLLYKDKDTLVISVKQRSLSLTSENSKDVRENVILQEKEIYSKSKEIEENPKDNAWNSGIVIFNTTDTMINIEGKRNDQDYVLGRHAPCEGLSNYNAESSMVSKEVNSLKSEIRNISEKCHENAPEPDSMTCCVSESTLLYSIEERRLAWIKSFKPWLEIFKQNQQKKIVRRKRPVKCPANMTPALDKLEILRCGPWDTLQQVTTVTFQDLPGCVLSTLAECTNLQFLSLRRCGLTSLHSLSNCKKLKYIDAQENHIEAIECENLENLCVVLLNKNQLTSLHGLDGCTNIQCLELSYNKITRIGYSFFLEEKLVDNAGFCHHLGTSTSYLSLAQVWIPTGLCWSWIPITSLTKNSDCNFLISHLYWNCGLESLKNLQQLILDHNQLINTKGLCDTPTIVYLDCSHNHLTDVEGVENCGLLQILKLQGNYLSELPSLENLVLLRELHLDDNSISTVEAFSSYWLPLLQNITISQNSLTKIVPLFHFVSLEKLDVSHNCLSDLKSAIKWFDACYSLHELSLTGNPLLQETNWRDSLLKVLPALRILNGNILNSNSESRTEEHNQLGSAGFLALCQSQIREFNLLIENYITGKGDVFTLDTAENLCHYFKKLMILSTEYRHAHERGDVTITKKDESEAQKNHLAPTNSDSTLQNGVFYSCAREGEPDSPDIPEKWMDSVSSHSPLSKSATCENMEGRHQEILVCQKREDSKASSIPTIRIPFKEVVMTNSLLRNHQNIEPSEKM

SEQ ID NO: 758287 - protein, 1155 aa, Homo sapiens
LSELPSLENLVLLRELHLDDNSISTVEAFSSYWLPLLQNITISQNSLTKIVPLFHFVSLEKQMSATIVFLEYIRNLHLQMEEERTRFKDQQEKEKNSLLKQQNNAAVKIQAKYKAFVAYQKYGPIIKEQIESKKRKAQEWKEKEAKIRQKEEENRKRLEEEQRIKEERKKQKEEERKRREKEYEEKKNIVKQEREQLISKEKIILREDASQQLIISSALKKSGYNNKHLSLEDISNDKGDIAKNLVDENSKKQEDVLLWLVEESNMKENVDRQTILKESIQVKLKESISSQTILADFKMEEKNENLAKKRCSEELVKQERKYENTDNKTELGNSDLKGNLKEQFPLQELKSDAQKEEKIMKHVINENTGQKTQIILGHNQEISEVKTNEEQKIIKDNQQKKIQKVEKEEIQEQNGLLYKDKDTLVISVKQRSLSLTSENSKDVRENVILQEKEIYSKSKEIEENPKDNAWNSGIVIFNTTDTMINIEGKRNDQDYVLGRHAPCEGLSNYNAESSMVSKEVNSLKSEIRNISEKCHENAPEPDSMTCCVSESTLLYSIEERRLAWIKSFKPWLEIFKQNQQKKIVRRKRPVKCPANMTPALDKLEILRCGPWDTLQQVTTVTFQDLPGCVLSTLAECTNLQFLSLRRCGLTSLHSLSNCKKLKYIDAQENHIEAIECENLENLCVVLLNKNQLTSLHGLDGCTNIQCLELSYNKITRIGYSFFLEEKLVDNAGFCHHLGTSTSYLSLAQVWIPTGLCWSWIPITSLTKNSDCNFLISHLYWNCGLESLKNLQQLILDHNQLINTKGLCDTPTIVYLDCSHNHLTDVEGVENCGLLQILKLQGNYLSELPSLENLVLLRELHLDDNSISTVEAFSSYWLPLLQNITISQNSLTKIVPLFHFVSLEKLDVSHNCLSDLKSAIKWFDACYSLHELSLTGNPLLQETNWRDSLLKVLPALRILNGNILNSNSESRTEEHNQLGSAGFLALCQSQIREFNLLIENYITGKGDVFTLDTAENLCHYFKKLMILSTEYRHAHERGDVTITKKDESEAQKNHLAPTNSDSTLQNGVFYSCAREGEPDSPDIPEKWMDSVSSHSPLSKSATCENMEGRHQEILVCQKREDSKASSIPTIRIPFKEVVMTNSLLRNHQNIEPSEKM

SEQ ID NO: 758288 - protein, 186 aa, Homo sapiens
HLGARVFVTGTHGQTVVFRDRTDFGGGGEANKPRNVRNKSRMKYSDLCISFFFFFFVKFDFNSCFFLMVWCLFFPPPLAAELRCFVVLFFFFFFFIFFLNSEARPSFLTAPRLHLRGHASFPWLPELLLPSPAWASPWCTRSRNRASAPCERRTCWRSSGRGLLPRSWARGLGGQGEAAEDLGWDG

SEQ ID NO: 758289 - protein, 111 aa, Homo sapiens
MSLKSATKWGRRCNYYYQHLESIMNLLEYFLALTSFILRCSYWIFPSANNMEVPIQGQIIPGFIWSCLKVKSLEFLMIPFLYGLQFDRWEFSTLKKYPQVTTDVLTPSMFR

SEQ ID NO: 758290 - protein, 120 aa, Homo sapiens
RHSVESSGKLVGGHTSKLRSIICNLTIFSRPNLMHIFMQPLSETAFKKEDTLKKWLKWFFFFFFGDRISKSWSLTLLPLSPVVPATQEAETGESLELGGGCSELVIVPLHFSQGNKARPL

SEQ ID NO: 758291 - protein, 111 aa, Homo sapiens; identical to SEQ ID NO: 758289

SEQ ID NO: 758292 - protein, 186 aa, Homo sapiens; identical to SEQ ID NO: 758288

SEQ ID NO: 758293 - protein, 186 aa, Homo sapiens; identical to SEQ ID NO: 758288

SEQ ID NO: 758294 - protein, 111 aa, Homo sapiens; identical to SEQ ID NO: 758289

SEQ ID NO: 758295 - protein, 111 aa, Homo sapiens; identical to SEQ ID NO: 758289

SEQ ID NO: 758296 - protein, 111 aa, Homo sapiens; identical to SEQ ID NO: 758289

SEQ ID NO: 758297 - protein, 111 aa, Homo sapiens; identical to SEQ ID NO: 758289

SEQ ID NO: 758298 - protein, 111 aa, Homo sapiens; identical to SEQ ID NO: 758289

SEQ ID NO: 758299 - protein, 158 aa, Homo sapiens
MSLKSATKWGRRCNYYYQHLESIMNLLEYFLALTSFILRCSYWIFPSANNMEVPIQGQIIPGFIWSCLKVKSLEFLMIPFLYGLQFDRWEFSTLKKTLLLSGNPCPPLTSTQNCFPHSLTARVVKNWDVLLRWAVECHTESRSLGVSLCCHEYEVAVN

SEQ ID NO: 758300 - protein, 430 aa, Homo sapiens
MDEQPRLMHSHAGVGMAGHPGLSQHLQDGAGGTEGEGGRKQDIGDILQQIMTITDQSLDEAQARKHALNCHRMKPALFNVLCEIKEKTVLSIRGAQEEEPTDPQLMRLDNMLLAEGVAGPEKGGGSAAAAAAAAASGGAGSDNSVEHSDYRAKLSQIRQIYHTELEKYEQACNEFTTHVMNLLREQSRTRPISPKEIERMVSIIHRKFSSIQMQLKQSTCEAVMILRSRFLDARRKRRNFNKQATEILNEYFYSHLSNPYPSEEAKEELAKKCGITVSQVSNWFGNKRIRYKKNIGKFQEEANIYAAKTAVTATNVSAHGSQANSPSTPNSAGSSSSFNMSNSGDLFMSVQSLNGDSYQGAQVGANVQSQVDTLRHVISQTGGYSDGLAASQMYSPQGISANGGWQDATTPSSVTSPTEGPGSVHSDTSN

SEQ ID NO: 758301 - protein, 550 aa, Homo sapiens
GYQLHGAEVNGGLPSASSFSSAPGATYGVSSHTPPVSGADSLLGSRGTTAGSSGDALGKALASIYSPDHSSNNFSSSPSTPVGSPQGLAGTSQWPRAGAPGALSPSYDGGLHGLQSKIEDHLDEAIHVLRSHAVGTAGDMHTLLPGHGALASGFTGPMSLGGRHAGLVGGSHPEDGLAGSTSLMHNHAALPSQPGTLPDLSRPPDSYSVLSIRGAQEEEPTDPQLMRLDNMLLAEGVAGPEKGGGSAAAAAAAAASGGAGSDNSVEHSDYRAKLSQIRQIYHTELEKYEQACNEFTTHVMNLLREQSRTRPISPKEIERMVSIIHRKFSSIQMQLKQSTCEAVMILRSRFLDARRKRRNFNKQATEILNEYFYSHLSNPYPSEEAKEELAKKCGITVSQVSNWFGNKRIRYKKNIGKFQEEANIYAAKTAVTATNVSAHGSQANSPSTPNSAGSSSSFNMSNSGDLFMSVQSLNGDSYQGAQVGANVQSQVDTLRHVISQTGGYSDGLAASQMYSPQGISANGGWQDATTPSSVTSPTEGPGSVHSDTSN

SEQ ID NO: 758302 - protein, 320 aa, Homo sapiens
MLLAEGVAGPEKGGGSAAAAAAAAASGGAGSDNSVEHSDYRAKLSQIRQIYHTELEKYEQACNEFTTHVMNLLREQSRTRPISPKEIERMVSIIHRKFSSIQMQLKQSTCEAVMILRSRFLDARRKRRNFNKQATEILNEYFYSHLSNPYPSEEAKEELAKKCGITVSQVSNWFGNKRIRYKKNIGKFQEEANIYAAKTAVTATNVSAHGSQANSPSTPNSAGSSSSFNMSNSGDLFMSVQSLNGDSYQGAQVGANVQSQVDTLRHVISQTGGYSDGLAASQMYSPQGISANGGWQDATTPSSVTSPTEGPGSVHSDTSN

SEQ ID NO: 758303 - protein, 37 aa, Homo sapiens
MPKILPTDPKAALGTFYCFKKVSEKAELSSFEQHSMP

SEQ ID NO: 758304 - protein, 86 aa, Homo sapiens
YEAWCDSDEGLTGLLEFAETRRRREPVLCLPLRLGEIWLLQQPTPFEITLARSGGGGQRGVGGESLHCNPPAFLSFLPINAYLQKD

SEQ ID NO: 758305 - protein, 430 aa, Homo sapiens; identical to SEQ ID NO: 758300

SEQ ID NO: 758306 - protein, 347 aa, Homo sapiens
MDEQPRLMHSHAGVGMAGHPGLSQHLQDGAGGTEGEGGRKQDIGDILQQIMTITDQSLDEAQARKHALNCHRMKPALFNVLCEIKEKTVLSIRGAQEEEPTDPQLMRLDNMLLAEGVAGPEKGGGSAAAAAAAAASGGAGSDNSVEHSDYRAKLSQIRQIYHTELEKYEQACNEFTTHVMNLLREQSRTRPISPKEIERMVSIIHRKFSSIQMQLKQSTCEAVMILRSRFLDARRKRRNFNKQATEILNEYFYSHLSNPYPSEEAKEELAKKCGITVSQVSNWFGNKRIRYKKNIGKFQEEANIYAAKTAVTATNVSAHGSQANSPSTPNSAGGYPSPCYQPDRRIQ

SEQ ID NO: 758307 - protein, 320 aa, Homo sapiens; identical to SEQ ID NO: 758302

SEQ ID NO: 758308 - protein, 333 aa, Homo sapiens
MDEQPRLMHSHAGVGMAGHPGLSQHLQDGAGGTEGEGGRKQDIGDILQQIMTITDQSLDEAQARKHALNCHRMKPALFNVLCEIKEKTVLSIRGAQEEEPTDPQLMRLDNMLLAEGVAGPEKGGGSAAAAAAAAASGGAGSDNSVEHSDYRAKLSQIRQIYHTELEKYEQACNEFTTHVMNLLREQSRTRPISPKEIERMVSIIHRKFSSIQMQLKQSTCEAVMILRSRFLDARRKRRNFNKQATEILNEYFYSHLSNPYPSEEAKEELAKKCGITVSQVSNWFGNKRIRYKKNIGKFQEEANIYAAKTAVTATNVSAHGSQANSPSTPNSAG

SEQ ID NO: 758309 - protein, 343 aa, Homo sapiens
MDEQPRLMHSHAGVGMAGHPGLSQHLQDGAGGTEGEGGRKQDIGDILQQIMTITDQSLDEAQARKHALNCHRMKPALFNVLCEIKEKTVLSIRGAQEEEPTDPQLMRLDNMLLAEGVAGPEKGGGSAAAAAAAAASGGAGSDNSVEHSDYRAKLSQIRQIYHTELEKYEQACNEFTTHVMNLLREQSRTRPISPKEIERMVSIIHRKFSSIQMQLKQSTCEAVMILRSRFLDARRKRRNFNKQATEILNEYFYSHLSNPYPSEEAKEELAKKCGITVSQVSNWFGNKRIRYKKNIGKFQEEANIYAAKTAVTATNVSAHGSQANSPSTPNSAGIPFCRLLTVL

SEQ ID NO: 758310 - protein, 347 aa, Homo sapiens; identical to SEQ ID NO: 758306

SEQ ID NO: 758311 - protein, 86 aa, Homo sapiens; identical to SEQ ID NO: 758304

SEQ ID NO: 758312 - protein, 86 aa, Homo sapiens; identical to SEQ ID NO: 758304

SEQ ID NO: 758313 - protein, 122 aa, Homo sapiens
MWYRTRPAASLERGNITLLLTITDRTTKQPCKLILEDLKENPLITEWHSQLAGSETPLSHATCMENDFWSVILSKEKQSKFSTFKIKGHSVYIKTSRYKEVSYCWIKNIQDNGHNLKAHGKT

SEQ ID NO: 758314 - protein, 122 aa, Homo sapiens; identical to SEQ ID NO: 758313

SEQ ID NO: 758315 - protein, 81 aa, Homo sapiens
CPRTKFWTRNHDSKFMFWVCRSLANDFARSELVRGLGFLVSEVNACKVLSSLRIWTLPVHLTGLFKMKNSEHVMFYVEKYT

SEQ ID NO: 758316 - protein, 697 aa, Homo sapiens
GPDSRAAGARVGGWGCPQGLASGVLGGQWVQGVWFVSAGRQANATHAVGEAASVVDRAAWPCGSRAMVSKLSQLQTELLAALLESGLSKEALIQALGEPGPYLLAGEGPLDKGESCGGGRGELAELPNGLGETRGSEDETDDDGEDFTPPILKELENLSPEEAAHQKAVVETLLQEDPWRVAKMVKSYLQQHNIPQREVVDTTGLNQSHLSQHLNKGTPMKTQKRAALYTWYVRKQREVAQQFTHAGQGGLIEEPTGDELPTKKGRRNRFKWGPASQQILFQAYERQKNPSKEERETLVEECNRAECIQRGVSPSQAQGLGSNLVTEVRVYNWFANRRKEEAFRHKLAMDTYSGPPPGPGPGPALPAHSSPGLPPPALSPSKVHGVRYGQPATSETAEVPSSSGGPLVTVSTPLHQVSPTGLEPSHSLLSTEAKLVSAAGGPLPPVSTLTALHSLEQTSPGLNQQPQNLIMASLPGVMTIGPGEPASLGPTFTNTGASTLVIGLASTQAQSVPVINSMGSSLTTLQPVQFSQPLHPSYQQPLMPPVQSHVTQSPFMATMAQLQSPHALYSHKPEVAQYTHTGLLPQTMLITDTTNLSALASLTPTKQVFTSDTEASSESGLHTPASQATTLHVPSQDPASIQHLQPAHRLSASPTVSSSSLVLYQSSDSSNGQSHLLPSNHSVIETFISTQMASSSQ

SEQ ID NO: 758317 - protein, 608 aa, Homo sapiens
GPDSRAAGARVGGWGCPQGLASGVLGGQWVQGVWFVSAGRQANATHAVGEAASVVDRAAWPCGSRAMVSKLSQLQTELLAALLESGLSKEALIQALGEPGPYLLAGEGPLDKGESCGGGRGELAELPNGLGETRGSEDETDDDGEDFTPPILKELENLSPEEAAHQKAVVETLLQEDPWRVAKMVKSYLQQHNIPQREVVDTTGLNQSHLSQHLNKGTPMKTQKRAALYTWYVRKQREVAQQFTHAGQGGLIEEPTGDELPTKKGRRNRFKWGPASQQILFQAYERQKNPSKEERETLVEECNRAECIQRGVSPSQAQGLGSNLVTEVRVYNWFANRRKEEAFRHKLAMDTYSGPPPGPGPGPALPAHSSPGLPPPALSPSKVHGVRYGQPATSETAEVPSSSGGPLVTVSTPLHQVSPTGLEPSHSLLSTEAKLVSAAGGPLPPVSTLTALHSLEQTSPGLNQQPQNLIMASLPGVMTIGPGEPASLGPTFTNTGASTLVIGLASTQAQSVPVINSMGSSLTTLQPVQFSQPLHPSYQQPLMPPVQSHVTQSPFMATMAQLQSPHGERPVPHTAGDDDRGWLSMDAGERGAWQALQSACVSGTSVFP

SEQ ID NO: 758318 - protein, 1508 aa, Homo sapiens
MGQEPRTLPPSPNWYCARCSDAVPGGLFGFAARTSVFLVRVGPGAGESPGTPPFRVIGELVGHTERVSGFTFSHHPGQYNLCATSSDDGTVKIWDVETKTVVTEHALHQHTISTLHWSPRVKDLIVSGDEKGVVFCYWFNRNDSQHLFIEPRTIFCLTCSPHHEDLVAIGYKDGIVVIIDISKKGEVIHRLRGHDDEIHSIAWCPLPGEDCLSINQEETSEEAEITNGNAVAQAPVTKGCYLATGSKDQTIRIWSCSRGRGVMILKLPFLKRRGGGIDPTVKERLWLTLHWPSNQPTQLVSSCFGGELLQWDLTQSWRRKYTLFSASSEGQNHSRIVFNLCPLQTEDDKQLLLSTSMDRDVKCWDIATLECSWTLPSLGGFAYSLAFSSVDIGSLAIGVGDGMIRVWNTLSIKNNYDVKNFWQGVKSKVTALCWHPTKEGCLAFGTDDGKVGLYDTYSNKPPQISSTYHKKTVYTLAWGPPVPPMSLGGEGDRPSLALYSCGGEGIVLQHNPWKLSGEAFDINKLIRDTNSIKYKLPVHTEISWKADGKIMALGNEDGSIEIFQIPNLKLICTIQQHHKLVNTISWHHEHGSQPELSYLMASGSNNAVIYVHNLKTVIESSPESPVTITEPYRTLSGHTAKITSVAWSPHHDGRLVSASYDGTAQVWDALREEPLCNFRGHQGRLLCVAWSPLDPDCIYSGADDFCVHKWLTSMQDHSRPPQGKKSIELEKKRLSQPKAKPKKKKKPTLRTPVKLESIDGNEEESMKENSGPVENGVSDQEGEEQAREPELPCGLAPAVSREPVICTPVSSGFEKSKVTINNKVILLKKEPPKEKPETLIKKRKARSLLPLSTSLDHRSKEELHQDCLVLATAKHSRELNEDVSADVEERFHLGLFTDRATLYRMIDIEGKGHLENGHPELFHQLMLWKGDLKGVLQTAAERGELTDNLVAMAPAAGYHVWLWAVEAFAKQLCFQDQYVKAASHLLSIHKVYEAVELLKSNHFYREAIAIAKARLRPEDPVLKDLYLSWGTVLERDGHYAVAAKCYLGATCAYDAAKVLAKKGDAASLRTAAELAAIVGEDELSASLALRCAQELLLANNWVGAQEALQLHESLQGQRLVFCLLELLSRHLEEKQLSEGKSSSSYHTWNTGTEGPFVERVTAVWKSIFSLDTPEQYQEAFQKLQNIKYPSATNNTPAKQLLLHICHDLTLAVLSQQMASWDEAVQALLRAVVRSYDSGSFTIMQEVYSAFLPDGCDHLRDKLGDHQSPATPAFKSLEAFFLYGRLYEFWWSLSRPCPNSSVWVRAGHRTLSVEPSQQLDTASTEETDPETSQPEPNRPSELDLRLTEEGERMLSTFKELFSEKHASLQNSQRTVAEVQETLAEMIRQHQKSQLCKSTANGPDKNEPEVEAEQPLCSSQSQCKEEKNEPLSLPELTKRLTEANQRMAKFPESIKAWPFPDVLECCLVLLLIRSHFPGCLAQEMQQQAQELLQKYGNTKTYRRHCQTFCM

SEQ ID NO: 758319 - protein, 1508 aa, Homo sapiens; identical to SEQ ID NO: 758318

SEQ ID NO: 758320 - protein, 1508 aa, Homo sapiens; identical to SEQ ID NO: 758318

SEQ ID NO: 758321 - protein, 1421 aa, Homo sapiens
MGQEPRTLPPSPNWYCARCSDAVPGGLFGFAARTSVFLVRVGPGAGESPGTPPFRVIGELVGHTERVSGFTFSHHPGQYNLCATSSDDGTVKIWDVETKTVVTEHALHQHTISTLHWSPRVKDLIVSGDEKGVVFCYWFNRNDSQHLFIEPRTIFCLTCSPHHEDLVAIGYKDGIVVIIDISKKGEVIHRLRGHDDEIHSIAWCPLPGEDCLSINQEETSEEAEITNGNAVAQAPVTKGCYLATGSKDQTIRIWSCSRGRGVMILKLPFLKRRGGGIDPTVKERLWLTLHWPSNQPTQLVSSCFGGELLQWDLTQSWRRKYTLFSASSEGQNHSRIVFNLCPLQTEDDKQLLLSTSMDRDVKCWDIATLECSWTLPSLGGFAYSLAFSSVDIGSLAIGVGDGMIRVWNTLSIKNNYDVKNFWQGVKSKVTALCWHPTKEGCLAFGTDDGKVGLYDTYSNKPPQISSTYHKKTVYTLAWGPPVPPMSLGGEGDRPSLALYSCGGEGIVLQHNPWKLSGEAFDINKLIRDTNSIKYKLPVHTEISWKADGKIMALGNEDGSIEIFQIPNLKLICTIQQHHKLVNTISWHHEHGSQPELSYLMASGSNNAVIYVHNLKTVIESSPESPVTITEPYRTLSGHTAKITSVAWSPHHDGRLVSASYDGTAQVWDALREEPLCNFRGHQGRLLCVAWSPLDPDCIYSGADDFCVHKWLTSMQDHSRPPQGKKSIELEKKRLSQPKAKPKKKKKPTLRTPVKLESIDGNEEESMKENSGPVENGVSDQEGEEQAREPELPCGLAPAVSREPVICTPVSSGFEKSKVTINNKVILLKKEPPKEKPETLIKKRKARSLLPLSTSLDHRSKEELHQDCLVLATAKHSRELNEDVSADVEERFHLGLFTDRATLYRMIDIEGKGHLENGHPELFHQLMLWKGDLKGVLQTAAERGELTDNLVAMAPAAGYHVWLWAVEAFAKQLCFQDQYVKAASHLLSIHKVYEAVELLKSNHFYREAIAIAKARLRPEDPVLKDLYLSWGTVLERDGHYAVAAKCYLGATCAYDAAKVLAKKGDAASLRTAAELAAIVGEDELSASLALRCAQELLLANNWVGAQEALQLHESLQGQRLVFCLLELLSRHLEEKQLSEGKSSSSYHTWNTGTEGPFVERVTAVWKSIFSLDTPEQYQEAFQKLQNIKYPSATNNTPAKQLLLHICHDLTLAVLSQQMASWDEAVQALLRAVVRSYDSGSFTIMQEVYSAFLPDGCDHLRDKLGDHQSPATPAFKSLEAFFLYGRLYEFWWSLSRPCPNSSVWVRAGHRTLSVEPSQQLDTASTEETDPETSQPEPNRPSELDLRLTEEGERMLSTFKELFSEKHASLQNSQRTVAEVQETLAEMIRQHQKSQLCKSTANGPDKNEPEVEAEQPLCSSQSQW

SEQ ID NO: 758322 - protein, 77 aa, Homo sapiens
KMSFRPCAFGFRCGMLSGKSPCAISEDIKVDCFVWHGLLWIQTASIQGQMTFVCTSGSLPCKIIPGLLKVSQNLELI

SEQ ID NO: 758323 - protein, 1508 aa, Homo sapiens; identical to SEQ ID NO: 758318

SEQ ID NO: 758324 - protein, 800 aa, Homo sapiens
MMEGWYLLPMMVQPSKKSIELEKKRLSQPKAKPKKKKKPTLRTPVKLESIDGNEEESMKENSGPVENGVSDQEGEEQAREPELPCGLAPAVSREPVICTPVSSGFEKSKVTINNKVILLKKEPPKEKPETLIKKRKARSLLPLSTSLDHRSKEELHQDCLVLATAKHSRELNEDVSADVEERFHLGLFTDRATLYRMIDIEGKGHLENGHPELFHQLMLWKGDLKGVLQTAAERGELTDNLVAMAPAAGYHVWLWAVEAFAKQLCFQDQYVKAASHLLSIHKVYEAVELLKSNHFYREAIAIAKARLRPEDPVLKDLYLSWGTVLERDGHYAVAAKCYLGATCAYDAAKVLAKKGDAASLRTAAELAAIVGEDELSASLALRCAQELLLANNWVGAQEALQLHESLQGQRLVFCLLELLSRHLEEKQLSEGKSSSSYHTWNTGTEGPFVERVTAVWKSIFSLDTPEQYQEAFQKLQNIKYPSATNNTPAKQLLLHICHDLTLAVLSQQMASWDEAVQALLRAVVRSYDSGSFTIMQEVYSAFLPDGCDHLRDKLGDHQSPATPAFKSLEAFFLYGRLYEFWWSLSRPCPNSSVWVRAGHRTLSVEPSQQLDTASTEETDPETSQPEPNRPSELDLRLTEEGERMLSTFKELFSEKHASLQNSQRTVAEVQETLAEMIRQHQKSQLCKSTANGPDKNEPEVEAEQPLCSSQSQCKEEKNEPLSLPELTKRLTEANQRMAKFPESIKAWPFPDVLECCLVLLLIRSHFPGCLAQEMQQQAQELLQKYGNTKTYRRHCQTFCM

SEQ ID NO: 758325 - protein, 416 aa, Homo sapiens
AGPHQQSHQESTRGRSAGRSGRSGSFLYQVSTHEQSESAHGRTGTSTGGRQGSHHKQARDSSRHSTSQEGQDTIHGHPGSSSGGRQGSHYEQLVDRSGHSGSHHSHTTSQGRSDASHGHSGSRSASRQTRNDEQSGDGSRHSGSRHHEASSRADSSGHSQVGQGQSEGPRTSRNWGSSFSQDSDSQGHSEDSERWSGSASRNHHGSAQEQLRDGSRHPRSHQEDRAGHGHSADSSRQSGTRHTQTSSGGQAASSHEQARSSAGERHGSHHQQSADSSRHSGIGHGQASSAVRDSGHRGYSGSQASDNEGHSEDSDTQSVSAHGQAGSHQQSHQESARGRSGETSGHSGSFLYQVSTHEQSESSHGWTGPSTRGRQGSRHEQAQDSSRHSASQDGQDTIRGHPGSSRGGRQGYHHEH

SEQ ID NO: 758326 - protein, 162 aa, Homo sapiens
RHRLDKGRWTGQPAVQQPHRTQLPDREHQLTLIPPAPGNATAEESLQDGPDPLLQHGCWEPAQARHFSTGAIENSLRQKGLCQPTEVTSPSADQASGPVALQNSKSHLCRSQPILLPPVFISCPEQVQNRGPSMGEKSLCLQAVFFTVTSHYFCARSHFSGS

SEQ ID NO: 758327 - protein, 34 aa, Homo sapiens
PKCKTILSSQATQNQATGRSGCETLELEQEAGGV

SEQ ID NO: 758328 - protein, 148 aa, Homo sapiens
MESRSGAQVGVQWRDLGSLQLSSPRFKRLSCLSLLSSWYYRCPPPQPANFCVFTRDRVSLYWPGRSRTPDLRHSARLGLPKCRDYRCEPPCPAIRLLFMFAAPWGNAMATALAIQGSRACGLCVSVCVYTYSCPPAAFQVTLSHPKPC

SEQ ID NO: 758329 - protein, 242 aa, Homo sapiens
MGEASPPAPARRHLLVLLLLLSTLVIPSAAAPIHDADAQESSLGLTGLQSLLQGFSRLFLKGNLLRGIDSLFSAPMDFRGLPGNYHKEENQEHQLGNNTLSSHLQIDKMTDNKTGEVLISENVVASIQPAEGSFEGDLKVPRMEEKEALVPIQKATDSFHTELHPRVAFWIIKLPRRRSHQDALEGGHWLSEKRHRLQAIRDGLRKGTHKDVLEEGTESSSHSRLSPRKTHLLYILRPSRQL

SEQ ID NO: 758330 - protein, 167 aa, Homo sapiens
MDFRGLPGNYHKEENQEHQLGNNTLSSHLQIDKMTDNKTGEVLISENVVASIQPAEGSFEGDLKVPRMEEKEALVPIQKATDSFHTELHPRVAFWIIKLPRRRSHQDALEGGHWLSEKRHRLQAIRDGLRKGTHKDVLEEGTESSSHSRLSPRKTHLLYILRPSRQL

SEQ ID NO: 758331 - protein, 277 aa, Homo sapiens
ADSSSTGASGLETAGGCPGTGKRALVPEGRWLRARSLKASPPAPARRHLLVLLLLLSTLVIPSAAAPIHDADAQESSLGLTGLQSLLQGFSRLFLKGNLLRGIDSLFSAPMDFRGLPGNYHKEENQEHQLGNNTLSSHLQIDKMTDNKTGEVLISENVVASIQPAEGSFEGDLKVPRMEEKEALVPIQKATDSFHTELHPRVAFWIIKLPRRRSHQDALEGGHWLSEKRHRLQAIRDGLRKGTHKDVLEEGTESSSHSRLSPRKTHLLYILRPSRQL

SEQ ID NO: 758332 - protein, 242 aa, Homo sapiens; identical to SEQ ID NO: 758329

SEQ ID NO: 758333 - protein, 164 aa, Homo sapiens
MGEASPPAPARRHLLVLLLLLSTLVIPSAAAPIHDADAQESSLGLTGLQSLLQGFSRLFLKVPRMEEKEALVPIQKATDSFHTELHPRVAFWIIKLPRRRSHQDALEGGHWLSEKRHRLQAIRDGLRKGTHKDVLEEGTESSSHSRLSPRKTHLLYILRPSRQL

SEQ ID NO: 758334 - protein, 211 aa, Homo sapiens
MGEASPPAPARRHLLVLLLLLSTLVIPSAAAPIHDADAQESSLGLTGLQSLLQGFSRLFLKGNLLRGIDSLFSAPMDFRGLPGNYHKEENQEHQLGNNTLSSHLQIDKVPRMEEKEALVPIQKATDSFHTELHPRVAFWIIKLPRRRSHQDALEGGHWLSEKRHRLQAIRDGLRKGTHKDVLEEGTESSSHSRLSPRKTHLLYILRPSRQL

SEQ ID NO: 758335 - protein, 125 aa, Homo sapiens
  misc_feature (15)..(15): Xaa can be any naturally occurring amino acid
QAGKGEVFRRAAFEXDTPAYGWEEGGPPGNPIPVRSPTSTSFHTELHPRVAFWIIKLPRRRSHQDALEGGHWLSEKRHRLQAIRDGLRKGTHKDVLEEGTESSSHSRLSPRKTHLLYILRPSRQL

SEQ ID NO: 758336 - protein, 126 aa, Homo sapiens
AGGCEASSVGTMATRGGAGVAMAVWSLLSARAVTAFLLLFLPRFLQAQTFSFPFQQPEKCDNNQYFDISALSCVPCGANQRQDARGTSCVCLPGFQMISNNGGPAIICKKCPENMVRIIYFKITYL

SEQ ID NO: 758337 - protein, 1006 aa, Homo sapiens
AGGCEASSVGTMATRGGAGVAMAVWSLLSARAVTAFLLLFLPRFLQAQTFSFPFQQPEKCDNNQYFDISALSCVPCGANQRQDARGTSCVCLPGFQMISNNGGPAIICKKCPENMKGVTEDGWNCISCPSDLTAEGKCHCPIGHILVERDINGTLLSQATCELCDGNENSFMVVNALGDRCVRCEPTFVNTSRSCACSEPNILTGGLCFSSTGNFPLRRISAARYGEVGMSLTSEWFAKYLQSSAAACWVYANLTSCQALGNMCVMNMNSYDFATFDACGLFQFIFENTAGLSTVHSISFWRQNLPWLFYGDQLGLAPQVLSSTSLPTNFSFKGENQNTKLKFVAASYDIRGNFLKWQTLEGGVLQLCPDTETRLNAAYSFGTTYQQNCEIPISKILIDFPTPIFYDVYLEYTDENQHQYILAVPVLNLNLQHNKIFVNQDSNSGKWLLTRRIFLVDAVSGRENDLGTQPRVIRVATQISLSVHLVPNTINGNIYPPLITIAYSDIDIKDANSQSVKVSFSVTYEMDHGEAHVQTDIALGVLGGLAVLASLLKTAGWKRRIGSPMIDLQTVVKFLVYYAGDLANVFFIITVGTGLYWLIFFKAQKSVSVLLPMPIQEERFVTYVGCAFALKALQFLHKLISQITIDVFFIDWERPKGKVLKAVEGEGGVRSATVPVSIWRTYFVANEWNEIQTVRKINSLFQVLTVLFFLEVVGFKNLALMDSSSSLSRNPPSYIAPYSCILRYAVSAALWLAIGIIQVVFFAVFYERFIEDKIRQFVDLCSMSNISVFLLSHKCFGYYIHGRSVHGHADTNMEEMNMNLKREAENLCSQRGLVPNTDGQTFEIAISNQMRQHYDRIHETLIRKNGPARLLSSSASTFEQSIKAYHMMNKFLGSFIDHVHKEMDYFIKDKLLLERILGMEFMEPMEKSIFYNDEGYSFSSVLYYGNEATLLIFDLLFFCVVDLACQNFILASFLTYLQQEIFRYIRNTVGQKNLASKTLVDQRFLI

SEQ ID NO: 758338 - protein, 467 aa, Homo sapiens
AGGCEASSVGTMATRGGAGVAMAVWSLLSARAVTAFLLLFLPRFLQAQTFSFPFQQPEKCDNNQYFDISALSCVPCGANQRQDARGTSCVCLPGFQMISNNGGPAIICKKCPENMKGVTEDGWNCISCPSDLTAEGKCHCPIGHILVERDINGTLLSQATCELCDGNENSFMVVNALGDRCVRCEPTFVNTSRSCACSEPNILTGGLCFSSTGNFPLRRISAARYGEVGMSLTSEWFAKYLQSSAAACWVYANLTSCQALGNMCVMNMNSYDFATFDACGLFQFIFENTAGLSTVHSISFWRQNLPWLFYGDQLGLAPQVLSSTSLPTNFSFKGENQNTKLKFVAASYDIRGNFLKWQTLEGGVLQLCPDTETRLNAAYSFGTTYQQNCEIPISKILIDFPTPIFYDVYLEYTDENQHQYILAVPVLNLNLQHNKIFVNQGNLQGKAFQIYEKFNQKTFKSKARWLT

SEQ ID NO: 758339 - protein, 149 aa, Homo sapiens
AGGCEASSVGTMATRGGAGVAMAVWSLLSARAVTAFLLLFLPRFLQAQTFSFPFQQPEKCDNNQYFDISALSCVPCGANQRQDARGTSCVCLPGFQMISNNGGPAIICKKCPENMKGVTEDGWNCISCPSDLTAEGKCHCPIGHILGKN

SEQ ID NO: 758340 - protein, 1006 aa, Homo sapiens; identical to SEQ ID NO: 758337

SEQ ID NO: 758341 - protein, 394 aa, Homo sapiens
MPIQEERFVTYVGCAFALKALQFLHKLISQITIDVFFIDWERPKGKVLKAVEGEGGVRSATVPVSIWRTYFVANEWNEIQTVRKINSLFQVLTVLFFLEVVGFKNLALMDSSSSLSRNPPSYIAPYSCILRYAVSAALWLAIGIIQVVFFAVFYERFIEDKIRQFVDLCSMSNISVFLLSHKCFGYYIHGRSVHGHADTNMEEMNMNLKREAENLCSQRGLVPNTDGQTFEIAISNQMRQHYDRIHETLIRKNGPARLLSSSASTFEQSIKAYHMMNKFLGSFIDHVHKEMDYFIKDKLLLERILGMEFMEPMEKSIFYNDEGYSFSSVLYYGNEATLLIFDLLFFCVVDLACQNFILASFLTYLQQEIFRYIRNTVGQKNLASKTLVDQRFLI

SEQ ID NO: 758342 - protein, 136 aa, Homo sapiens; identical to SEQ ID NO: 741065

SEQ ID NO: 758343 - protein, 136 aa, Homo sapiens; identical to SEQ ID NO: 741065

SEQ ID NO: 758344 - protein, 136 aa, Homo sapiens; identical to SEQ ID NO: 741065

SEQ ID NO: 758345 - protein, 126 aa, Homo sapiens
RTATPLSGTAAMNAFLLSALCLLGAWAALAGGVTVQDGNFSFSLESVKKLKDLQEPQEPRVGKLRNFAPIPGEPVVPILCSNPNFPEELKPLCKEPNAQEILQRLEEIAEDPGTCEICAYAACTGC

SEQ ID NO: 758346 - protein, 515 aa, Homo sapiens
MAWPYFLDCHRYFTREDEGCYDPLEKLRGGLEADEALPSGLPPTFIRFSHHSYAQMVRVLRRTASRCAHVARTYSIGRSFDGRELLVIEFSSRPGQHELMEPEVKLIGNIHGNEVAGREMLIYLAQYLCSEYLLGNPRIQRLLNTTRIHLLPSMNPDGYEVAAAEGAGYNGWTSGRQNAQNLDLNRNFPDLTSEYYRLAETRGARSDHIPIPQHYWWGKVAPETKAIMKWMQTIPFVLSASLHGGDLVVSYPFDFSKHPQEEKMFSPTPDEKMFKLLSRAYADVHPMMMDRSENRCGGNFLKRGSIINGADWYSFTGGMSDFNYLHTNCFEITVELGCVKFPPEEALYTLWQHNKESLLNFVETVHRGIKGVVTDKFGKPVKNARISVKGIRHDITTAPDGDYWRLLPPGIHIVIAQAPGYAKVIKKVIIPARMKRAGRVDFILQPLGMGPKNFIHGLRRTGPHDPLGGASSLGEATEPDPLRARRQPSADGSKPWWWSYFTSLSTHRPRWLLKY

SEQ ID NO: 758347 - protein, 677 aa, Homo sapiens
APSLRRGREPSERRAPAPRGPSATSLRWPSKVRRPTMPPPPPLLLLTVLVVAAARPGCEFERNPAATCVDLQLRTCSDAAYNHTTFPNLLQHRSWEVVEASSEYILLSVLHQLLEGQCNPDLRLLGCAVLAPRCEGGWVRRPCRHICEGLREVCQPAFDAIDMAWPYFLDCHRYFTREDEGCYDPLEKLRGGLEADEALPSGLPPTFIRFSHHSYAQMVRVLRRTASRCAHVARTYSIGRSFDGRELLVIEFSSRPGQHELMEPEVKLIGNIHGNEVAGREMLIYLAQYLCSEYLLGNPRIQRLLNTTRIHLLPSMNPDGYEVAAAEGAGYNGWTSGRQNAQNLDLNRNFPDLTSEYYRLAETRGARSDHIPIPQHYWWGKVAPETKAIMKWMQTIPFVLSASLHGGDLVVSYPFDFSKHPQEEKMFSPTPDEKMFKLLSRAYADVHPMMMDRSENRCGGNFLKRGSIINGADWYSFTGGMSDFNYLHTNCFEITVELGCVKFPPEEALYTLWQHNKESLLNFVETVHRGIKGVVTDKFGKPVKNARISVKGIRHDITTAPDGDYWRLLPPGIHIVIAQAPGYAKVIKKVIIPARMKRAGRVDFILQPLGMGPKNFIHGLRRTGPHDPLGGASSLGEATEPDPLRARRQPSADGSKPWWWSYFTSLSTHRPRWLLKY

SEQ ID NO: 758348 - protein, 688 aa, Homo sapiens
APSLRRGREPSERRAPAPRGPSATSLRWPSKVRRPTMPPPPPLLLLTVLVVAAARPGCEFERNPAGECHRPPAADSATCVDLQLRTCSDAAYNHTTFPNLLQHRSWEVVEASSEYILLSVLHQLLEGQCNPDLRLLGCAVLAPRCEGGWVRRPCRHICEGLREVCQPAFDAIDMAWPYFLDCHRYFTREDEGCYDPLEKLRGGLEADEALPSGLPPTFIRFSHHSYAQMVRVLRRTASRCAHVARTYSIGRSFDGRELLVIEFSSRPGQHELMEPEVKLIGNIHGNEVAGREMLIYLAQYLCSEYLLGNPRIQRLLNTTRIHLLPSMNPDGYEVAAAEGAGYNGWTSGRQNAQNLDLNRNFPDLTSEYYRLAETRGARSDHIPIPQHYWWGKVAPETKAIMKWMQTIPFVLSASLHGGDLVVSYPFDFSKHPQEEKMFSPTPDEKMFKLLSRAYADVHPMMMDRSENRCGGNFLKRGSIINGADWYSFTGGMSDFNYLHTNCFEITVELGCVKFPPEEALYTLWQHNKESLLNFVETVHRGIKGVVTDKFGKPVKNARISVKGIRHDITTAPDGDYWRLLPPGIHIVIAQAPGYAKVIKKVIIPARMKRAGRVDFILQPLGMGPKNFIHGLRRTGPHDPLGGASSLGEATEPDPLRARRQPSADGSKPWWWSYFTSLSTHRPRWLLKY

SEQ ID NO: 758349 - protein, 523 aa, Homo sapiens
MAWPYFLDCHRYFTREDEGCYDPLEKLRGGLEADEALPSGLPPTFIRFSHHSYAQMVRVLRRTASRCAHVARTYSIGRSFDGRELLVIEFSSRPGQHELMEPEVKLIGNIHGNEVAGREMLIYLAQYLCSEYLLGNPRIQRLLNTTRIHLLPSMNPDGYEVAAAESGVGHVLQGAGYNGWTSGRQNAQNLDLNRNFPDLTSEYYRLAETRGARSDHIPIPQHYWWGKVAPETKAIMKWMQTIPFVLSASLHGGDLVVSYPFDFSKHPQEEKMFSPTPDEKMFKLLSRAYADVHPMMMDRSENRCGGNFLKRGSIINGADWYSFTGGMSDFNYLHTNCFEITVELGCVKFPPEEALYTLWQHNKESLLNFVETVHRGIKGVVTDKFGKPVKNARISVKGIRHDITTAPDGDYWRLLPPGIHIVIAQAPGYAKVIKKVIIPARMKRAGRVDFILQPLGMGPKNFIHGLRRTGPHDPLGGASSLGEATEPDPLRARRQPSADGSKPWWWSYFTSLSTHRPRWLLKY

SEQ ID NO: 758350 - protein, 523 aa, Homo sapiens; identical to SEQ ID NO: 758349

SEQ ID NO: 758351 - protein, 523 aa, Homo sapiens; identical to SEQ ID NO: 758349

SEQ ID NO: 758352 - protein, 724 aa, Homo sapiens
APSLRRGREPSERRAPAPRGPSATSLRWPSKVRRPTMPPPPPLLLLTVLVVAAARPGCEFERNPAGECHRPPAADSATCVDLQLRTCSDAAYNHTTFPNLLQHRSWEVVEASSEYILLSVLHQLLEGQCNPDLRLLGCAVLAPRCEGGWVRRPCRHICEGLREVCQPAFDAIDMAWPYFLDCHRYFTREDEGCYDPLEKLRGGLEADEALPSGLPPTFIRFSHHSYAQMVRVLRRTASRCAHVARTYSIGRSFDGRELLVIEFSSRPGQHELMEPEVKLIGNIHGNEVAGREMLIYLAQYLCSEYLLGNPRIQRLLNTTRIHLLPSMNPDGYEVAAAEGAGYNGWTSGRQNAQNLDLNRNFPDLTSEYYRLAETRGARSDHIPIPQHYWWGKVAPETKAIMKWMQTIPFVLSASLHGGDLVVSYPFDFSKHPQEEKMFSPTPDEKKGAPSSAQTCPAWWGPDELMQGEPFACLTHQEPLPKMFKLLSRAYADVHPMMMDRSENRCGGNFLKRGSIINGADWYSFTGGMSDFNYLHTNCFEITVELGCVKFPPEEALYTLWQHNKESLLNFVETVHRGIKGVVTDKFGKPVKNARISVKGIRHDITTAPDGDYWRLLPPGIHIVIAQAPGYAKVIKKVIIPARMKRAGRVDFILQPLGMGPKNFIHGLRRTGPHDPLGGASSLGEATEPDPLRARRQPSADGSKPWWWSYFTSLSTHRPRWLLKY

SEQ ID NO: 758353 - protein, 688 aa, Homo sapiens; identical to SEQ ID NO: 758348

SEQ ID NO: 758354 - protein, 86 aa, Homo sapiens
MSDFNYLHTNCFEITVELGCVKFPPEEALYTLWQHNKESLLNFVETVSSDGLRALVQLWPGWGGSHSGPQGSPRSLTAPYTHAPFA

SEQ ID NO: 758355 - protein, 109 aa, Homo sapiens
PRESGRSRIRSVANQVAGDMLPNSTERAITIAGVPQSVTECVKQICLVMLETLSQSPQGRVMTIPYQPMPASSPVICAGGQDRCSGPRYPAILSSYSGTVADTKLVSLV

SEQ ID NO: 758356 - protein, 387 aa, Homo sapiens
MTLVRRCPRRVVDQRRDTYRAQSNGPARELAMDAGVTESGLNVTLTIRLLMHGKEVGSIIGKKGESVKRIREESGARINISEGNCPERIITLTGPTNAIFKAFAMIIDKLEEDINSSMTNSTAASRPPVTLRLVVPATQCGSLIGKGGCKIKEIRESTGAQVQVAGDMLPNSTERAITIAGVPQSVTECVKQICLVMLETLSQSPQGRVMTIPYQPMPASSPVICAGGQDRCSDAAGYPHATHDLEGPPLDAYSIQGQHTISPLDLAKLNQVARQQSHFAMMHGGTGFAGIDSSSPEVKGYWASLDASTQTTHELTIPNNLIGCIIGRQGANINEIRQMSGAQIKIANPVEGSSGRQVTITGSAASISLAQYLINARLSSEKGMGCS

SEQ ID NO: 758357 - protein, 356 aa, Homo sapiens
MDAGVTESGLNVTLTIRLLMHGKEVGSIIGKKGESVKRIREESGARINISEGNCPERIITLTGPTNAIFKAFAMIIDKLEEDINSSMTNSTAASRPPVTLRLVVPATQCGSLIGKGGCKIKEIRESTGAQVQVAGDMLPNSTERAITIAGVPQSVTECVKQICLVMLETLSQSPQGRVMTIPYQPMPASSPVICAGGQDRCSDAAGYPHATHDLEGPPLDAYSIQGQHTISPLDLAKLNQVARQQSHFAMMHGGTGFAGIDSSSPEVKGYWASLDASTQTTHELTIPNNLIGCIIGRQGANINEIRQMSGAQIKIANPVEGSSGRQVTITGSAASISLAQYLINARLSSEKGMGCS

SEQ ID NO: 758358 - protein, 324 aa, Homo sapiens
SVRRTFSREESGARINISEGNCPERIITLTGPTNAIFKAFAMIIDKLEEDINSSMTNSTAASRPPVTLRLVVPATQCGSLIGKGGCKIKEIRESTGAQVQVAGDMLPNSTERAITIAGVPQSVTECVKQICLVMLETLSQSPQGRVMTIPYQPMPASSPVICAGGQDRCSDAAGYPHATHDLEGPPLDAYSIQGQHTISPLDLAKLNQVARQQSHFAMMHGGTGFAGIDSSSPEVKGYWASLDASTQTTHELTIPNNLIGCIIGRQGANINEIRQMSGAQIKIANPVEGSSGRQVTITGSAASISLAQYLINARLSSEKGMGCS

SEQ ID NO: 758359 - protein, 283 aa, Homo sapiens
MIIDKLEEDINSSMTNSTAASRPPVTLRLVVPATQCGSLIGKGGCKIKEIRESTGAQVQVAGDMLPNSTERAITIAGVPQSVTECVKQICLVMLETLSQSPQGRVMTIPYQPMPASSPVICAGGQDRCSDAAGYPHATHDLEGPPLDAYSIQGQHTISPLDLAKLNQVARQQSHFAMMHGGTGFAGIDSSSPEVKGYWASLDASTQTTHELTIPNNLIGCIIGRQGANINEIRQMSGAQIKIANPVEGSSGRQVTITGSAASISLAQYLINARLSSEKGMGCS

SEQ ID NO: 758360 - protein, 283 aa, Homo sapiens; identical to SEQ ID NO: 758359

SEQ ID NO: 758361 - protein, 250 aa, Homo sapiens
TSDSGRNGWCGCKIKEIRESTGAQVQVAGDMLPNSTERAITIAGVPQSVTECVKQICLVMLETLSQSPQGRVMTIPYQPMPASSPVICAGGQDRCSDAAGYPHATHDLEGPPLDAYSIQGQHTISPLDLAKLNQVARQQSHFAMMHGGTGFAGIDSSSPEVKGYWASLDASTQTTHELTIPNNLIGCIIGRQGANINEIRQMSGAQIKIANPVEGSSGRQVTITGSAASISLAQYLINARLSSEKGMGCS

SEQ ID NO: 758362 - protein, 243 aa, Homo sapiens
QHIPATWTCARSVELGSISPAPGPAPNSTERAITIAGVPQSVTECVKQICLVMLETLSQSPQGRVMTIPYQPMPASSPVICAGGQDRCSDAAGYPHATHDLEGPPLDAYSIQGQHTISPLDLAKLNQVARQQSHFAMMHGGTGFAGIDSSSPEVKGYWASLDASTQTTHELTIPNNLIGCIIGRQGANINEIRQMSGAQIKIANPVEGSSGRQVTITGSAASISLAQYLINARLSSEKGMGCS

SEQ ID NO: 758363 - protein, 356 aa, Homo sapiens; identical to SEQ ID NO: 758357

SEQ ID NO: 758364 - protein, 356 aa, Homo sapiens; identical to SEQ ID NO: 758357

SEQ ID NO: 758365 - protein, 215 aa, Homo sapiens
MDAGVTESGLNVTLTECVKQICLVMLETLSQSPQGRVMTIPYQPMPASSPVICAGGQDRCSDAAGYPHATHDLEGPPLDAYSIQGQHTISPLDLAKLNQVARQQSHFAMMHGGTGFAGIDSSSPEVKGYWASLDASTQTTHELTIPNNLIGCIIGRQGANINEIRQMSGAQIKIANPVEGSSGRQVTITGSAASISLAQYLINARLSSEKGMGCS

SEQ ID NO: 758366 - protein, 107 aa, Homo sapiens
MMHGGTGFAGIDSSSPEVKGYWASLDASTQTTHELTIPNNLIGCIIGRQGANINEIRQMSGAQIKIANPVEGSSGRQVTITGSAASISLAQYLINARLSSEKGMGCS

SEQ ID NO: 758367 - protein, 208 aa, Homo sapiens
ASSPDDLRELAGMGWYGMVMTLPCGDWESVSSMTRKSVPASSPVICAGGQDRCSDAAGYPHATHDLEGPPLDAYSIQGQHTISPLDLAKLNQVARQQSHFAMMHGGTGFAGIDSSSPEVKGYWASLDASTQTTHELTIPNNLIGCIIGRQGANINEIRQMSGAQIKIANPVEGSSGRQVTITGSAASISLAQYLINARLSSEKGMGCS

SEQ ID NO: 758368 - protein, 204 aa, Homo sapiens
ASSPRSSAGAGRHGLVRNGHDSPLRRLGERLQHDQANLLDTLGDRLRHASDAAGYPHATHDLEGPPLDAYSIQGQHTISPLDLAKLNQVARQQSHFAMMHGGTGFAGIDSSSPEVKGYWASLDASTQTTHELTIPNNLIGCIIGRQGANINEIRQMSGAQIKIANPVEGSSGRQVTITGSAASISLAQYLINARLSSEKGMGCS

SEQ ID NO: 758369 - protein, 356 aa, Homo sapiens; identical to SEQ ID NO: 758357

SEQ ID NO: 758370 - protein, 339 aa, Homo sapiens
MDAGVTESGLNVTLTIRLLMHGKEVGSIIGKKGESVKRIREESGARINISEGNCPERIITLTGPTNAIFKAFAMIIDKLEEDINSSMTNSTAASRPPVTLRLVVPATQCGSLIGKGGCKIKEIRESTGAQVQVAGDMLPNSTERAITIAGVPQSVTECVKQICLVMLETLSQSPQGRVMTIPYQPMPASSPVICAGGQDRCSDAAGYPHATHDLEGPPLDAYSIQGQQSHFAMMHGGTGFAGIDSSSPEVKGYWASLDASTQTTHELTIPNNLIGCIIGRQGANINEIRQMSGAQIKIANPVEGSSGRQVTITGSAASISLAQYLINARLSSEKGMGCS

SEQ ID NO: 758371 - protein, 156 aa, Homo sapiens
CRTAQIPSGQLGWEVGPPLDAYSIQGQHTISPLDLAKLNQVARQQSHFAMMHGGTGFAGIDSSSPEVKGYWASLDASTQTTHELTIPNNLIGCIIGRQGANINEIRQMSGAQIKIANPVEGSSGRQVTITGSAASISLAQYLINARLSSEKGMGCS

SEQ ID NO: 758372 - protein, 183 aa, Homo sapiens
MYTWQVNLCCLYSDLELAYLAQRLICLFLTSMLDVAIEKFSAAPPLDAYSIQGQHTISPLDLAKLNQVARQQSHFAMMHGGTGFAGIDSSSPEVKGYWASLDASTQTTHELTIPNNLIGCIIGRQGANINEIRQMSGAQIKIANPVEGSSGRQVTITGSAASISLAQYLINARLSSEKGMGCS

SEQ ID NO: 758373 - protein, 413 aa, Homo sapiens
  misc_feature (4)..(4): Xaa can be any naturally occurring amino acid
  misc_feature (9)..(9): Xaa can be any naturally occurring amino acid
  misc_feature (11)..(12): Xaa can be any naturally occurring amino acid
  misc_feature (16)..(17): Xaa can be any naturally occurring amino acid
  misc_feature (19)..(19): Xaa can be any naturally occurring amino acid
EAAXGSGEXGXXGGGXXGXPATTLRPPARSRSLPRPSLASRRQFWAYTSPPPASRQRLDHVMRVLIAASVMDLAMDAGVTESGLNVTLTIRLLMHGKEVGSIIGKKGESVKRIREESGARINISEGNCPERIITLTGPTNAIFKAFAMIIDKLEEDINSSMTNSTAASRPPVTLRLVVPATQCGSLIGKGGCKIKEIRESTGAQVQVAGDMLPNSTERAITIAGVPQSVTECVKQICLVMLETLSQSPQGRVMTIPYQPMPASSPVICAGGQDRCSDAAGYPHATHDLEGPPLDAYSIQGQQSHFAMMHGGTGFAGIDSSSPEVKGYWASLDASTQTTHELTIPNNLIGCIIGRQGANINEIRQMSGAQIKIANPVEGSSGRQVTITGSAASISLAQYLINARLSSEKGMGCS

SEQ ID NO: 758374 - protein, 356 aa, Homo sapiens; identical to SEQ ID NO: 758357

SEQ ID NO: 758375 - protein, 356 aa, Homo sapiens; identical to SEQ ID NO: 758357

SEQ ID NO: 758376 - protein, 338 aa, Homo sapiens
MDAGVTESGLNVTLTIRLLMHGKEVGSIIGKKGESVKRIREESGARINISEGNCPERIITLTGPTNAIFKAFAMIIDKLEEDINSSMTNSTAASRPPVTLRLVVPATQCGSLIGKGGCKIKEIRESTGAQVQVAGDMLPNSTERAITIAGVPQSVTECVKQICLVMLETLSQSPQGRVMTIPYQPMPASSPVICAGGQDRCSDAAGYPHATHDLEGPPLDAYSIQGQHTISPLDLAKLNQVARQQSHFAMMHGGTGFAGIDSSSPEVKGYWASLDASTQTTHELTIPNNLIGCIIGRQGANINEIRQMSGAQISAASISLAQYLINARLSSEKGMGCS

SEQ ID NO: 758377 - protein, 356 aa, Homo sapiens; identical to SEQ ID NO: 758357

SEQ ID NO: 758378 - protein, 304 aa, Homo sapiens
MDAGVTESGLNVTLTIRLLMHGKEVGSIIGKKGESVKRIREESGARINISEGNCPERIITLTGPTNAIFKAFAMIIDKLEEDINSSMTNSTAASRPPVTLRLVVPATQCGSLIGKGGCKIKEIRESTGAQVQVAGDMLPNSTERAITIAGVPQSVTECVKQICLVMLETLSQSPQGRVMTIPYQPMPASSPVICAGGQDRCSDAAGYPHATHDLEGPPLDAYSIQGQHTISPLDLAKLNQVARQQSHFAMMHGGTGFAGIDSSSPEVKGYWASLDASTQTTHELTIPNNLIGLIEGTELDSYSH

SEQ ID NO: 758379 - protein, 205 aa, Homo sapiens
MDAGVTESGLNVTLTIRLLMHGKEVGSIIGKKGESVKRIREESGARINISEGNCPERIITLTGPTNAIFKAFAMIIDKLEEDINSSMTNSTAASRPPVTLRLVVPATQCGSLIGKGGCKIKEIRESTGAQVQVAGDMLPNSTERAITIAGVPQSVTECVKQICLVMLETLSQSPQGRVMTIPYQPMPASSPVICAGGQDRCTRTV

SEQ ID NO: 758380 - protein, 223 aa, Homo sapiens
MDAGVTESGLNVTLTIRLLMHGKEVGSIIGKKGESVKRIREESGARINISEGNCPERIITLTGPTNAIFKAFAMIIDKLEEDINSSMTNSTAASRPPVTLRLVVPATQCGSLIGKGGCKIKEIRESTGAQVQVAGDMLPNSTERAITIAGVPQSVTECVKQICLVMLETLSQSPQGRVMTIPYQPRYSALPSWLPSSTNTISQGSPRRPAPPHRDDRADVACS

SEQ ID NO: 758381 - protein, 87 aa, Homo sapiens
MDAGVTESGLNVTLTIRLLMHGKEVGSIIGKKGESVKRIREESGARINISEGNCPERIITLTGPTNAIFKAFAMIIDKLVWPRGPGS

SEQ ID NO: 758382 - protein, 412 aa, Homo sapiens
GSGACGGSGKEVGSIIGKKGESVKRIREESGARINISEGNCPERIITLTGPTNAIFKAFAMIIDKLEEDINSSMTNSTAASRPPVTLRLVVPATQCGSLIGKGGCKIKEIRESTGAQVQVAGDMLPNSTERAITIAGVPQSVTECVKQICLVMLETLSQSPQGKKKKKKKKKKKTNQRGGLIMTTSEGEIKARQNISRTQGGPQIEPTPKRPPPPERAAQKTHESRKEEKQTATRGPETKRPTTHARSHTLGAPPTETTKHTQEANIRTTEAIVRAQQKDRPRTNKHNNTKTTKRTTINHGRNQSKIRGENHANTQHEHKQPNRRRKHSETHSNKKETTTKKPERQRRAEQEDLASAGEQREGAERSNETSERTTRGAPQGDRTQKYCDARETNTQARERTARRRARRDVTR

SEQ ID NO: 758383 - protein, 356 aa, Homo sapiens; identical to SEQ ID NO: 758357

SEQ ID NO: 758384 - protein, 112 aa, Homo sapiens
TLCGLSCAVFFMYFVFRSGCFVFGCWVFVLFVLCPPLVLFLVFLVWISCRVCCSRICVVFFFLFAAFVFFFVFFCLAFVVSRVLGSVSWLVSVCACDFGVLSLGLCWSSVGS

SEQ ID NO: 758385 - protein, 90 aa, Homo sapiens
KQWYQRRGPITAGERVGTSGFGAGVFVVPATKERELNMGDVEKGKKIFIMKCSQCHTVEKGGKHKTGPNLHGLLWAEDRSGPWILLHSRQ

SEQ ID NO: 758386 - protein, 103 aa, Homo sapiens
TSGRGSAERVWLHLHRYLSADRRVLGLREWGRPASERECSLCQRLKREVRAGRGGRTWLEAELWEARTCERPKPKRGAFEWSPRWVGGRGVKTLDCGQTELGE

SEQ ID NO: 758387 - protein, 102 aa, Homo sapiens
MVSCGRKTGQAPGYSYTAANKNKEGHPILGGRKGITTGIGKVNFGKNSHKKGYLSWVTNNTCTPQARADYKATEREKNKGADLTLTPLFLRQKRSNLTWTLT

SEQ ID NO: 758388 - protein, 370 aa, Homo sapiens
MPTETLQTGSMVKPVSPAGTFTSAVPLRILNKGPDYFRRQAEPNPKRLSAVERLEADKAKYVKSQEVINAKQEPVKPAVLAKPPVCPAAKRALGSPTLKVFGNHAKTESGVQRENLKLEILKNIINSSEGSSSGSGHKHSSRNWPPHRSEATDLHRHSFAESLKVYPTQGRRSPQEGGSHVGRRLLEQSAESFLHVSHSSSDIRKVTSVKPLKAIPCSSSAPPLPPKPKIAAIASMKSPEADPVEPACGVSRRPSLQRSKSDLSDRYFRVDADVERFFNYCGLDPEELENLGMENFARANSDIISLNFRSASMISSDCEQSQDSNSDLRNDDSANDRVPYGISAIERNARIIKWLYSIKQARESQKVSHV

SEQ ID NO: 758389 - protein, 114 aa, Homo sapiens
LTLRRSLPEPSHSVQTEPSRPPPAGPFAAARPGPVPPAPSALYPRPRGGDREHSAAPTARSRPFVPRGPRLSLLAVPRSLAPGSGRTARDWGERPRNLQIGHPEQHSCSVYVLN

SEQ ID NO: 758390 - protein, 114 aa, Homo sapiens; identical to SEQ ID NO: 758389

SEQ ID NO: 758391 - protein, 370 aa, Homo sapiens; identical to SEQ ID NO: 758388

SEQ ID NO: 758392 - protein, 370 aa, Homo sapiens; identical to SEQ ID NO: 758388

SEQ ID NO: 758393 - protein, 370 aa, Homo sapiens; identical to SEQ ID NO: 758388

SEQ ID NO: 758394 - protein, 370 aa, Homo sapiens; identical to SEQ ID NO: 758388

SEQ ID NO: 758395 - protein, 370 aa, Homo sapiens; identical to SEQ ID NO: 758388

SEQ ID NO: 758396 - protein, 370 aa, Homo sapiens; identical to SEQ ID NO: 758388

SEQ ID NO: 758397 - protein, 370 aa, Homo sapiens; identical to SEQ ID NO: 758388

SEQ ID NO: 758398 - protein, 370 aa, Homo sapiens; identical to SEQ ID NO: 758388

SEQ ID NO: 758399 - protein, 164 aa, Homo sapiens
QQEKFGQEGAVGADQASSGNTQGSATLDSSSPLGGSASLFPPGTKTQPGHSQGFRENKHCVWGVKKGQVLGMWLQACLTGQRQPPQPRTGLPITLFCLECPCAGLPPATSPLQKNRDAFLELPLSIPPSKSGTDGVAGVGSILICFLSLLPLCPDIKTWESCLF

SEQ ID NO: 758400 - protein, 260 aa, Homo sapiens
KDAVEKKLEAFPLGTEVGTDIYADDETVRNLQEQLQLANQEKTQAVELWQTVSQELDRLHKLYQEHMTEAQIHVFESQKQKDQLFDFQQLTKQLHVTNENMEVTNQQFLKTVTEQSVIIEQLRKKLRQAKLELRVAVAKVEELTNVTEDLQGQMKKKEKDVVSAHGREEASDRRLQQLQSSIKQLEIRLCVTIQEANQLRTENTHLEKQTRELQAKCNELENERYEAIVRARNSMQLLEEANLQKSQALLEEKQKEEDIE

SEQ ID NO: 758401 - protein, 256 aa, Homo sapiens
MPREDRATWKSNYFLKIIQLLDDYPKCFIVGADNVGSKQMQQIRMSLRGKNNPALEKLLPHIRGNVGFVFTKEDLTEIRDMLLANKVPAAARAGAIAPCEVTVPAQNTGLGPEKTSFFQALGITTKISRGTIEILSDVQLIKTGDKVGASEATLLNMLNISPFSFGLVIQQVFDNGSIYNPEVLDKTEETLHSRFLEGVRNVASVCLQTGYPTVASVPHSIINGYKRVLALSVETDYTFPLAENVKAFLADPSAFV

SEQ ID NO: 758402 - protein, 276 aa, Homo sapiens
MPREDRATWKSNYFLKIIQLLDDYPKCFIVGADNVGSKQMQQIRMSLRGKVVVLMGKNTMMRKAIRGHLENNPALEKLLPHIRGNVGFVFTKEDLTEIRDMLLANKVPAAARAGAIAPCEVTVPAQNTGLGPEKTSFFQALGITTKISRGTIEILSDVQLIKTGDKVGASEATLLNMLNISPFSFGLVIQQVFDNGSIYNPEVLDKTEETLHSRFLEGVRNVASVCLQTGYPTVASVPHSIINGYKRVLALSVETDYTFPLAENVKAFLADPSAFV

SEQ ID NO: 758403 - protein, 276 aa, Homo sapiens
MPREDRATWKSNYFLKIIQLLDDYPKCFIVGADNVGSKQMQQIRMSLRGKVVVLMGKNTMMRKAIRGHLENNPALEKLLPHIRGNVGFVFTKEDLTEIRDMLLANKVPAAARAGAIAPCEVTVPAQNTGLGPEKTSFFQALGITTKISRGTIEILSDVQLIKTGDKVGASEATLLNMLNISPFSFGLVIQQVFDNWQHLQPEVLDKTEETLHSRFLEGVRNVASVCLQTGYPTVASVPHSIINGYKRVLALSVETDYTFPLAENVKAFLADPSAFV

SEQ ID NO: 758404 - protein, 1690 aa, Homo sapiens
MWSLHIVLMRCSFRLTKSLATGPWSLILILFSVQYVYGSGKKYIGPCGGRDCSVCHCVPEKGSRGPPGPPGPQGPIGPLGAPGPIGLSGEKGMRGDRGPPGAAGDKGDKGPTGVPGFPGLDGIPGHPGPPGPRGKPGMSGHNGSRGDPGFPGGRGALGPGGPLGHPGEKGEKGNSVFILGAVKGIQGDRGDPGLPGLPGSWGAGGPAGPTGYPGEPGLVGPPGQPGRPGLKGNPGVGVKGQMGDPGEVGQQGSPGPTLLVEPPDFCLYKGEKGIKGIPGMVGLPGPPGRKGESGIGAKGEKGIPGFPGPRGDPGSYGSPGFPGLKGELGLVGDPGLFGLIGPKGDPGNRGHPGPPGVLVTPPLPLKGPPGDPGFPGRYGETGDVGPPGPPGLLGRPGEACAGMIGPPGPQGFPGLPGLPGEAGIPGRPDSAPGKPGKPGSPGLPGAPGLQGLPGSSVIYCSVGNPGPQGIKGKVGPPGGRGPKGEKGNEGLCACEPGPMGPPGPPGLPGRQGSKGDLGLPGWLGTKGDPGPPGAEGPPGLPGKHGASGPPGNKGAKGDMVVSRVKGHKGERGPDGPPGFPGQPGSHGRDGHAGEKGDPGPPGDHEDATPGGKGFPGPLGPPGKAGPVGPPGLGFPGPPGERGHPGVPGHPGVRGPDGLKGQKGDTISCNVTYPGRHGPPGFDGPPGPKGFPGPQGAPGLSGSDGHKGRPGTPGTAEIPGPPGFRGDMGDPGFGGEKGSSPVGPPGPPGSPGVNGQKGIPGDPAFGHLGPPGKRGLSGVPGIKGPRGDPGCPGAEGPAGIPGFLGLKGPKGREGHAGFPGVPGPPGHSCERGAPGIPGQPGLPGYPGSPGAPGGKGQPGDVGPPGPAGMKGLPGLPGRPGAHGPPGLPGIPGPFGDDGLPGPPGPKGPRGLPGFPGFPGERGKPGAEGCPGAKGEPGEKGMSGLPGDRGLRGAKGAIGPPGDEGEMAIISQKGTPGEPGPPGDDGFPGERGDKGTPGMQGRRGELGRYGPPGFHRGEPGEKGQPGPPGPPGPPGSTGLRGFIGFPGLPGDQGEPGSPGPPGFSGIDGARGPKGNKGDPASHFGPPGPKGEPGSPGCPGHFGASGEQGLPGIQGPRGSPGRPGPPGSSGPPGCPGDHGMPGLRGQPGEMGDPGPRGLQGDPGIPGPPGIKGPSGSPGLNGLHGLKGQKGTKGASGLHDVGPPGPVGIPGLKGERGDPGSPGISPPGPRGKKGPPGPPGSSGPPGPAGATGRAPKDIPDPGPPGDQGPPGPDGPRGAPGPPGLPGSVDLLRGEPGDCGLPGPPGPPGPPGPPGYKGFPGCDGKDGQKGPMGFPGPQGPHGFPGPPGEKGLPGPPGRKGPTGLPGPRGEPGPPADVDDCPRIPGLPGAPGMRGPEGAMGLPGMRGPPGPGCKGEPGLDGRRGVDGVPGSPGPPGRKGDTGEDGYPGGPGPPGPIGDPGPKGFGPGYLGGFLLVLHSQTDQEPTCPLGMPRLWTGYSLLYLEGQEKAHNQDLGLAGSCLPVFSTLPFAYCNIHQVCHYAQRNDRSYWLASAAPLPMMPLSEEAIRPYVSRCAVCEAPAQAVAVHSQDQSIPPCPQTWRSLWIGYSFLMHTGAGDQGGGQALMSPGSCLEDFRAAPFLECQGRQGTCHFFANKYSFWLTTVKADLQFSSAPAPDTLKESQAQRQKISRCQVCVKYS

SEQ ID NO: 758405 - protein, 316 aa, Homo sapiens
MWSLHIVLMRCSFRLTKSLATGPWSLILILFSVQYVYGSGKKYIGPCGGRDCSVCHCVPEKGSRGPPGPPGPQGPIGPLGAPGPIGLSGEKGMRGDRGPPGAAGDKGDKGPTGVPGFPGLDGIPGHPGPPGPRGKPGMSGHNGSRGDPGFPGGRGALGPGGPLGHPGEKGEKGNSVFILGAVKGIQGDRGDPGLPGLPGSWGAGGPAGPTGYPGEPGLVGPPGQPGRPGLKGNPGVGVKGQMGDPGEVGQQGSPGPTLLVEPPDFCLYKGEKGIKGIPGMVGLPGPPGRKGESGIGAKGEKGIPGFPGPRVSIICC

SEQ ID NO: 758406 - protein, 121 aa, Homo sapiens
RSYWLASAAPLPMMPLSEEAIRPYVSRCAVCEAPAQAVAVHSQDQSIPPCPQTWRSLWIGYSFLMVSPVPLKTLAHSPFPNTFSRHFSLDWTVILSTLRLGHKVTGTVANHSLLGCRAIIF

SEQ ID NO: 758407 - protein, 123 aa, Homo sapiens
FQNTYLQRPDGGRKGLGTPTWGVWTRGVSSSLPKGLAGSCLPVFSTLPFAYCNIHQVCHYAQRNDRSYWLASAAPLPMMPLSEEAIRPYVSRCAVCEAPAQAVAVHSQDQSIPPCPQTWRSLW

SEQ ID NO: 758408 - protein, 326 aa, Homo sapiens
MDLSAASHRIPLSDGNSIPIIGLGTYSEPKSTPKGACATSVKVAIDTGYRHIDGAYIYQNEHEVGEAIREKIAEGKVRREDIFYCGKLWATNHVPEMVRPTLERTLRVLQLDYVDLYIIEVPMAFKPGDEIYPRDENGKWLYHKSNLCATWEAMEACKDAGLVKSLGVSNFNRRQLELILNKPGLKHKPVSNQVECHPYFTQPKLLKFCQQHDIVITAYSPLGTSRNPIWVNVSSPPLLKDALLNSLGKRYNKTAAQIVLRFNIQRGVVVIPKSFNLERIKENFQIFDFSLTEEEMKDIEALNKNVRFVELLMWRDHPEYPFHDEY

SEQ ID NO: 758409 - protein, 194 aa, Homo sapiens
MVRPTLERTLRVLQLDYVDLYIIEVPMAFKPGDEIYPRDENGKWLYHKSNLCATWEAMEACKDAGLVKSLGVSNFNRRQLELILNKPGLKHKPVSNQVECHPYFTQPKLLKFCQQHDIVITAYSPLGTSRNPIWVNVSSPPLLKDALLNSLGKRYNKTAAQIVLRFNIQRGVVVIPKSFNLERIKENFQVARSS

SEQ ID NO: 758410 - protein, 194 aa, Homo sapiens; identical to SEQ ID NO: 758409

SEQ ID NO: 758411 - protein, 220 aa, Homo sapiens
MGPTSTVRREDIFYCGKLWATNHVPEMVRPTLERTLRVLQLDYVDLYIIEVPMAFKPGDEIYPRDENGKWLYHKSNLCATWEAMEACKDAGLVKSLGVSNFNRRQLELILNKPGLKHKPVSNQVECHPYFTQPKLLKFCQQHDIVITAYSPLGTSRNPIWVNVSSPPLLKDALLNSLGKRYNKTAAQIVLRFNIQRGVVVIPKSFNLERIKENFQVARSS

SEQ ID NO: 758412 - protein, 64 aa, Homo sapiens
GQGRQCTRGSASTGQSWVRGPPDAGGKLETPQEPGLASFLIPCTCDGQQRPPVPTGQFQAGPRD

SEQ ID NO: 758413 - protein, 484 aa, Homo sapiens
VSWAPGSRRDRTRRVAAWPGVDAVAEPARRWKRVAERRDLGGLAMEEEDDQKCVETVELGSYEKCQDLRALLKRKHRFILLRSPGNKVSDIKFQAPTGEEKESWIKALNEGINRGKNKAFDEVKVDKSCALEHVTRDRVRGGQRRRPPTRVHLKEVASAASDGLLRLDLDVPDSGPPVFAPSNHVSEAQPRETPRPLMPPTKPFLAPETTSPGDRVETPVGERAPTPVSASSEVSPESQEDSETPAEEDSGSEQPPNSVLPDKLKVSWENPSPQEAPAAESAEPSQAPCSETSEAAPREGGKPPKPPPKILSEKLKASMGEMQASGPPAPGTVQVSVNGMDDSPEPAKPSQAEGTPGTPPKDATTSTALPPWDLPPQFHPRCSSLGDLLGEGPRHPLQPRERLYRAQLEVKVASEQTEKLLNKVLGSEPAPVSAETLLSQAVEQLRQATQVLQEMRDLGELSQEAPGLREKRKELVTLYRRSAP

SEQ ID NO: 758414 - protein, 132 aa, Homo sapiens
WEEGEHQARNHVGRVALHWAAGAGHEQAVRLLLEHEAAVDEEDAVGALTEEGNTALHLAAGRGHMAVLQRLVDIGLDLEEQNAEGLTALHSAAGGSHPDCVQLLLRAGSTVNALTQVARPSQDCGRLLAAEP

SEQ ID NO: 758415 - protein, 534 aa, Homo sapiens
VSWAPGSRRDRTRRVAAWPGVDAVAEPARRWKRVAERRDLGGLAMEEEGVKEAGEKPRGAQMVDKAGWIKKSSGGLLGFWKDRYLLLCQAQLLVYENEDDQKCVETVELGSYEKCQDLRALLKRKHRFILLRSPGNKVSDIKFQAPTGEEKESWIKALNEGINRGKNKAFDEVKVDKSCALEHVTRDRVRGGQRRRPPTRVHLKEVASAASDGLLRLDLDVPDSGPPVFAPSNHVSEAQPRETPRPLMPPTKPFLAPETTSPGDRVETPVGERAPTPVSASSEVSPESQEDSETPAEEDSGSEQPPNSVLPDKLKVSWENPSPQEAPAAESAEPSQAPCSETSEAAPREGGKPPKPPPKILSEKLKASMGEMQASGPPAPGTVQVSVNGMDDSPEPAKPSQAEGTPGTPPKDATTSTALPPWDLPPQFHPRCSSLGDLLGEGPRHPLQPRERLYRAQLEVKVASEQTEKLLNKVLGSEPAPVSAETLLSQAVEQLRQATQVLQEMRDLGELSQEAPGLREKRKELVTLYRRSAP

SEQ ID NO: 758416 - protein, 274 aa, Homo sapiens
VSWAPGSRRDRTRRVAAWPGVDAVAEPARRWKRVAERRDLGGLAMEEEGVKEAGEKPRGAQMVDKAPAAESAEPSQAPCSETSEAAPREGGKPPKPPPKILSEKLKASMGEMQASGPPAPGTVQVSVNGMDDSPEPAKPSQAEGTPGTPPKDATTSTALPPWDLPPQFHPRCSSLGDLLGEGPRHPLQPRERLYRAQLEVKVASEQTEKLLNKVLGSEPAPVSAETLLSQAVEQLRQATQVLQEMRDLGELSQEAPGLREKRKELVTLYRRSAP

SEQ ID NO: 758417 - protein, 534 aa, Homo sapiens; identical to SEQ ID NO: 758415

SEQ ID NO: 758418 - protein, 534 aa, Homo sapiens; identical to SEQ ID NO: 758415

SEQ ID NO: 758419 - protein, 320 aa, Homo sapiens
VSWAPGSRRDRTRRVAAWPGVDAVAEPARRWKRVAERRDLGGLAMEEEGVKEAGEKPRGAQMVDKAGWIKKSSGGLLGFWKDRYLLLCQAQLLVYENEDDQKCVETVELGSYEKCQDLRALLKRKHRFILLRSPGNKVSDIKFQAPTGEEKESWIKALNEGINRGKNKAFDEVKVDKSCALEHVTRDRVRGGQRRRPPTRVHLKEFGMNALLLSAWFGHLRILQILVNSGAKIHCESKEGNTALHLAAGRGHMAVLQRLVDIGLDLEEQNAEGLTALHSAAGGSHPDCVQLLLRAGSTVNALTQVARPSQDCGRLLAAEP

SEQ ID NO: 758420 - protein, 388 aa, Homo sapiens
VSWAPGSRRDRTRRVAAWPGVDAVAEPARRWKRVAERRDLGGLAMEEEGVKEAGEKPRGAQMVDKAGWIKKSSGGLLGFWKDRYLLLCQAQLLVYENEDDQKCVETVELGSYEKCQDLRALLKRKHRFILLRSPGNKVSDIKFQAPTGEEKESWIKALNEGINRGKNKAFDEVKVDKSCALEHVTRDRVRGGQRRRPPTRVHLKEFGMNALLLSAWFGHLRILQILVNSGAKIHCESKDGLTLLHCAAQKGHVPVLAFIMEDLEDVALDHVDKLGRTAFHRAAEHGQLDALDFLVGSGCDHNVKDKEGNTALHLAAGRGHMAVLQRLVDIGLDLEEQNAEGLTALHSAAGGSHPDCVQLLLRAGSTVNALTQVARPSQDCGRLLAAEP

SEQ ID NO: 758421 - protein, 437 aa, Homo sapiens
VSWAPGSRRDRTRRVAAWPGVDAVAEPARRWKRVAERRDLGGLAMEEEGVKEAGEKPRGAQMVDKAGWIKKSSGGLLGFWKDRYLLLCQAQLLVYENEDDQKCVETVELGSYEKCQDLRALLKRKHRFILLRSPGNKVSDIKFQAPTGEEKESWIKALNEGINRGKNKAFDEVKVDKSCALEHVTRDRVRGGQRRRPPTRVHLKEFGMNALLLSAWFGHLRILQILVNSGAKIHCESKDGLTLLHCAAQKGHVPVLAFIMEDLEDVALDHVDKLGRTAFHRAAEHGQLDALDFLVGSGCDHNVKDKEGNTALHLAAGRGHMAVLQRLVDIGLDLEEQNAEGLTALHSAAGGSHPDCVQLLLRAGSTVNALTQKNLSCLHYAALSGSEDVSRVLIHAGGCANVVDHQGASPLHLAVRHNFPALVRLLINSDSDVNAVD

SEQ ID NO: 758422 - protein, 81 aa, Homo sapiens
EVVSEDDRAGSNCSRVMMLGCVEEAPGVREGDSGGLSSAVMGTACAQAQHTWGLPQALEGTEQGSTRNAPFSQFIPTEIRG

SEQ ID NO: 758423 - protein, 122 aa, Homo sapiens
SCANHHQYQLCELGCLWGKRLQYSILGVWAANLACSGFPPCALGWAQPQEGTPDTAPTSRLKADALPAPPVFCVAALTHVCLSRPVPRRLSDPKKGFPDTRTEAGGLGLREGGGPAGTFLLC

SEQ ID NO: 758424 - protein, 108 aa, Homo sapiens
ERLIWQGMLSQEKMPAGGRCPGLWLFPAPFTLSGPVTGWGPASRSLYAHQSPRCGVGTWRAPCCMERSCHQQMPQWLCGNTRLTPPKDQQPGTSPSSPRFCFQEALRA

SEQ ID NO: 758425 - protein, 101 aa, Homo sapiens
YLFITQECHYYTRNPHQISRKTTLRTIRPSCLWPISLSTASCAFQQSNSMNDLPVGKMGTSQCADPKICLPKANHHCILRSFKCRCLFEYIKNNIKVIIYV

SEQ ID NO: 758426 - protein, 109 aa, Homo sapiens
LAGLPGWPDPPPSGQRTSAAWKRPCHGALRPREGSRGPQKHHRARLPEPAPAQTRGRPEAVAGQAPGQRFRLPRLQPSVSCGSAAPGGNKWRISGLRAMQPPSEAPKAR

SEQ ID NO: 758427 - protein, 925 aa, Homo sapiens
MPHKIGFVVVSSSGHEDGFSARELMIHAPTVSGWRSPRFCQFPQEIVLQMVERCRIRKLQLLAHQYMISSKIEFYISESLPEYFAPYQAERFRRLGYVSLCDNEKTGCKARELKSVYVDAVGQFLKLIFHQNHVNKYNIYNQVALVAINIIGDPADFSDESNTASREKLIDHYLGHNSEDPALEGTYARKSDYISPLDDLAFDMYQDPEVAQIIRKLDERKREAVQKERYDYAKKLKQAIADLQKVGERLGRYEVEKRCAVEKEDYDLAKEKKQQMEQYRAEVYEQLELHSLLDAELMRRPFDLPLQPLARSGSPCHQKPMPSLPQLEERGTENQFAEPFLQEKPSSYSLTISPQHSAVDPLLPATDPHPKINAESLPYDERPLPAIRKHYGEAVVEPEMSNADISDARRGGMLGEPEPLTEKALREASSAIDVLGETLVAEAYCKTWSYREDALLALSKKLMEMPVGTPKEDLKNTLRASVFLVRRAIKDIVTSVFQASLKLLKMIITQYIPKHKLSKLETAHCVERTIPVLLTRTGDSSARLRVTAANFIQEMALFKEVKSLQIIPSYLVQPLKANSSVHLAMSQMGLLARLLKDLGTGSSGFTIDNVMKFSVSALEHRVYEVRETAVRIILDMYRQHQASILEYLPPDDSNTRRNILYKTIFEGFAKIDGRATDAEMRARRKAATEEAEKQKKEEIKALQGQLAALKEIQAEVQEKESDAVKPKNQDIQGGKAAPAEALGIPDEHYLDNLCIFCGERSESFTEEGLDLHYWKHCLMLTRCDHCKQVVEISSLTEHLLTECDKKDGFGKCYRCSEAVFKEELPRHIKHKDCNPAKPEKLANRCPLCHENFSPGEEAWKAHLMGPAGCTMNLRKTHILQKAPALQPGKSSAVAASGPLGSKAGSKIPTPKGGLSKSSSRTYAKR

SEQ ID NO: 758428 - protein, 127 aa, Homo sapiens
MSLLSSIRVGSSFIEQHIFKFFSCVLFFSYVSLCDNEKTGCKARELKSVYVDAVGQFLKLIFHQNHVNKYNIYNQVALVAINIIGDPADFSDESNTASREKLIDHYLGHNSEDPALEGTYARKESCS

SEQ ID NO: 758429 - protein, 925 aa, Homo sapiens; identical to SEQ ID NO: 758427

SEQ ID NO: 758430 - protein, 893 aa, Homo sapiens
MPHKIGFVVVSSSGHEDGFSARELMIHAPTVSGWRSPRFCQFPQEIVLQMVERCRIRKLQLLAHQYMISSKIEFYISESLPEYFAPYQAERFRRLGYVSLCDNEKTGCKARELKSVYVDAVGQFLKLIFHQNHVNKYNIYNQVALVAINIIGDPADFSDESNTASREKLIDHYLGHNSEDPALEGTYARKSDYISPLDDLAFDMYQDPEVAQIIRKLDERKREAVQKERYDYAKKLKQAIADLQKVGERLGRYEVEKRCAVEKEDYDLAKEKKQQMEQYRAEVYEQLELHSLLDAELMRRPFDLPLQPLARSGSPCHQKPMPSLPQLEERGTENQFAEPFLQEKPSSYSLTISPQHSAVDPLLPATDPHPKINAESLPYDERPLPAIRKHYGEAVVEPEMSNADISDARRGGMLGEPEPLTEKALREASSAIDVLGETLVAEAYCKTWSYREDALLALSKKLMEMPVGTPKEDLKNTLRASVFLVRRAIKDIVTSVFQASLKLLKMIITQYIPKHKLSKLETAHCVERTIPVLLTRTGDSSARLRVTAANFIQEMALFKEVKSLQIIPSYLVQPLKANSSVHLAMSQMGLLARLLKDLGTGSSGFTIDNVMKFSVSALEHRVYEVRETAVRIILDMYRQHQASILEYLPPDDSNTRRNILYKTIFEGFAKIDGRATDAEMRARRKAATEEAEKQKKEEIKALQGQLAALKEIQAEVQEKESDAVKPKNQDIQGGKAAPAEALGIPDEHYLDNLCIFCGERSESFTEEGLDLHYWKHCLMLTRCDHCKQVVEISSLTEHLLTECDKKDGFGKCYRCSEAVFKEELPRHIKHKDCNPAKPEKLANRCPLCHENFSPGEEAWKAHLMGPAGCTMNLRKTHILQKAPALQPGEGQRR

SEQ ID NO: 758431 - protein, 866 aa, Homo sapiens
MPHKIGFVVVSSSGHEDGFSARELMIHAPTVSGWRSPRFCQFPQEIVLQMVERCRIRKLQLLAHQYMISSKIEFYISESLPEYFAPYQAERFRRLGYVSLCDNEKTGCKARELKSVYVDAVGQFLKLIFHQNHVNKYNIYNQVALVAINIIGDPADFSDESNTASREKLIDHYLGHNSEDPALEGTYARKSDYISPLDDLAFDMYQDPEVAQIIRKLDERKREAVQKERYDYAKKLKQAIADLQKVGERLGRYEVEKRCAVEKEDYDLAKEKKQQMEQYRAEVYEQLELHSLLDAELMRRPFDLPLQPLARSGSPCHQKPMPSLPQLEERGTENQFAEPFLQEKPSSYSLTISPQHSAVDPLLPATDPHPKINAESLPYDERPLPAIRKHYGEAVVEPEMSNADISDARRGGMLGEPEPLTEKALREASSAIDVLGETLVAEAYCKTWSYREDALLALSKKLMEMPVGTPKEDLKNTLRASVFLVRRAIKDIVTSVFQASLKLLKMIITQYIPKHKLSKLETAHCVERTIPVLLTRTGDSSARLRVTAANFIQEMALFKEVKSLQIIPSYLVQPLKANSSVHLAMSQMGLLARLLKDLGTGSSGFTIDNVMKFSVSALEHRVYEVRETAVRIILDMYRQHQASILEYLPPDDSNTRRNILYKTIFEGFAKIDGRATDAEMRARRKAATEEAEKQKKEEIKALQGQLAALKEIQAEVQEKESDAVKPKNQDIQGGKAAPAEALGIPDEHYLDNLCIFCGERSESFTEEGLDLHYWKHCLMLTRCDHCKQVVEISSLTEHLLTECDKKDGFGKCYRCSEAVFKEELPRHIKHKDCNPAKPEKLANRCPLCHENFSPGEEVRGLGRRDQ

SEQ ID NO: 758432 - protein, 720 aa, Homo sapiens [sequence omitted]

SEQ ID NO: 758433 - protein, 867 aa, Homo sapiens
MPHKIGFVVVSSSGHEDGFSARELMIHAPTVSGWRSPRFCQFPQEIVLQMVERCRIRKLQLLAHQYMISSKIEFYISESLPEYFAPYQAERFRRLGYVSLCDNEKTGCKARELKSVYVDAVGQFLKLIFHQNHVNKYNIYNQVALVAINIIGDPADFSDESNTASREKLIDHYLGHNSEDPALEGTYARKSDYISPLDDLAFDMYQDPEVAQIIRKLDERKREAVQKERYDYAKKLKQAIADLQKVGERLGRYEVEKRCAVEKEDYDLAKEKKQQMEQYRAEVYEQLELHSLLDAELHSAVDPLLPATDPHPKINAESLPYDERPLPAIRKHYGEAVVEPEMSNADISDARRGGMLGEPEPLTEKALREASSAIDVLGETLVAEAYCKTWSYREDALLALSKKLMEMPVGTPKEDLKNTLRASVFLVRRAIKDIVTSVFQASLKLLKMIITQYIPKHKLSKLETAHCVERTIPVLLTRTGDSSARLRVTAANFIQEMALFKEVKSLQIIPSYLVQPLKANSSVHLAMSQMGLLARLLKDLGTGSSGFTIDNVMKFSVSALEHRVYEVRETAVRIILDMYRQHQASILEYLPPDDSNTRRNILYKTIFEGFAKIDGRATDAEMRARRKAATEEAEKQKKEEIKALQGQLAALKEIQAEVQEKESDAVKPKNQDIQGGKAAPAEALGIPDEHYLDNLCIFCGERSESFTEEGLDLHYWKHCLMLTRCDHCKQVVEISSLTEHLLTECDKKDGFGKCYRCSEAVFKEELPRHIKHKDCNPAKPEKLANRCPLCHENFSPGEEAWKAHLMGPAGCTMNLRKTHILQKAPALQPGKSSAVAASGPLGSKAGSKIPTPKGGLSKSSSRTYAKR

SEQ ID NO: 758434 - protein, 859 aa, Homo sapiens
MPHKIGFVVVSSSGHEDGFSARELMIHAPTVSGWRSPRFCQFPQEIVLQMVERCRIRKLQLLAHQYMISSKIEFYISESLPEYFAPYQAERFRRLGYVSLCDNEKTGCKARELKSVYVDAVGQFLKLIFHQNHVNKYNIYNQVALVAINIIGDPADFSDESNTASREKLIDHYLGHNSEDPALEGTYARKSDYISPLDDLAFDMYQDPEVAQIIRKLDERKREAVQKERYDYAKKLKQAIADLQKVGERLGRYEVEKRCAVEKEDYDLAKEKKQQMEQYRAEVYEQLELHSLLDAELMRRPFDLPLQPLARSGSPCHQKPMPSLPQLEERGTENQFAEPFLQEKPSSYSLTISPQHSAVDPLLPATDPHPKINVAEAYCKTWSYREDALLALSKKLMEMPVGTPKEDLKNTLRASVFLVRRAIKDIVTSVFQASLKLLKMIITQYIPKHKLSKLETAHCVERTIPVLLTRTGDSSARLRVTAANFIQEMALFKEVKSLQIIPSYLVQPLKANSSVHLAMSQMGLLARLLKDLGTGSSGFTIDNVMKFSVSALEHRVYEVRETAVRIILDMYRQHQASILEYLPPDDSNTRRNILYKTIFEGFAKIDGRATDAEMRARRKAATEEAEKQKKEEIKALQGQLAALKEIQAEVQEKESDAVKPKNQDIQGGKAAPAEALGIPDEHYLDNLCIFCGERSESFTEEGLDLHYWKHCLMLTRCDHCKQVVEISSLTEHLLTECDKKDGFGKCYRCSEAVFKEELPRHIKHKDCNPAKPEKLANRCPLCHENFSPGEEAWKAHLMGPAGCTMNLRKTHILQKAPALQPGKSSAVAASGPLGSKAGSKIPTPKGGLSKSSSRTYAKR

SEQ ID NO: 758435 - protein, 858 aa, Homo sapiens
MSLLSSIRVGSSFIEQHIFKFFSCVLFFSYVSLCDNEKTGCKARELKSVYVDAVGQFLKLIFHQNHVNKYNIYNQVALVAINIIGDPADFSDESNTASREKLIDHYLGHNSEDPALEGTYARKSDYISPLDDLAFDMYQDPEVAQIIRKLDERKREAVQKERYDYAKKLKQAIADLQKVGERLGRYEVEKRCAVEKEDYDLAKEKKQQMEQYRAEVYEQLELHSLLDAELMRRPFDLPLQPLARSGSPCHQKPMPSLPQLEERGTENQFAEPFLQEKPSSYSLTISPQHSAVDPLLPATDPHPKINAESLPYDERPLPAIRKHYGEAVVEPEMSNADISDARRGGMLGEPEPLTEKALREASSAIDVLGETLVAEAYCKTWSYREDALLALSKKLMEMPVGTPKEDLKNTLRASVFLVRRAIKDIVTSVFQASLKLLKMIITQYIPKHKLSKLETAHCVERTIPVLLTRTGDSSARLRVTAANFIQEMALFKEVKSLQIIPSYLVQPLKANSSVHLAMSQMGLLARLLKDLGTGSSGFTIDNVMKFSVSALEHRVYEVRETAVRIILDMYRQHQASILEYLPPDDSNTRRNILYKTIFEGFAKIDGRATDAEMRARRKAATEEAEKQKKEEIKALQGQLAALKEIQAEVQEKESDAVKPKNQDIQGGKAAPAEALGIPDEHYLDNLCIFCGERSESFTEEGLDLHYWKHCLMLTRCDHCKQVVEISSLTEHLLTECDKKDGFGKCYRCSEAVFKEELPRHIKHKDCNPAKPEKLANRCPLCHENFSPGEEAWKAHLMGPAGCTMNLRKTHILQKAPALQPGKSSAVAASGPLGSKAGSKIPTPKGGLSKSSSRTYAKR

SEQ ID NO: 758436 - protein, 526 aa, Homo sapiens [sequence omitted]

SEQ ID NO: 758437 - protein, 463 aa, Homo sapiens [sequence omitted]

SEQ ID NO: 758438 - protein, 494 aa, Homo sapiens
  misc_feature (1)..(1): Xaa can be any naturally occurring amino acid
  misc_feature (7)..(7): Xaa can be any naturally occurring amino acid
XRGTILXLVAEAYCKTWSYREDALLALSKKLMEMPVGTPKEDLKNTLRASVFLVRRAIKDIVTSVFQASLKLLKMIITQYIPKHKLSKLETAHCVERTIPVLLTRTGDSSARLRVTAANFIQEMALFKEVKSLQIIPSYLVQPLKANSSVHLAMSQMGLLARLLKDLGTGSSGFTIDNVMKFSVSALEHRVYEVRETAVRIILDMYRQHQASILEYLPPDDSNTRRNILYKTIFEGFAKIDGRATDAEMRARRKAATEEAEKQKKEEIKALQGQLAALKEIQAEVQEKESDAVKPKNQDIQGGKAAPAEALGIPDEHYLDNLCIFCGERSESFTEEGLDLHYWKHCLMLTRCDHCKQVVEISSLTEHLLTECDKKDGFGKCYRCSEAVFKEELPRHIKHKDCNPAKPEKLANRCPLCHENFSPGEEAWKAHLMGPAGCTMNLRKTHILQKAPALQPGKSSAVAASGPLGSKAGSKIPTPKGGLSKSSSRTYAKR

SEQ ID NO: 758439 - protein, 409 aa, Homo sapiens
RARYPFAHCVERTIPVLLTRTGDSSARLRVTAANFIQEMALFKEVKSLQIIPSYLVQPLKANSSVHLAMSQMGLLARLLKDLGTGSSGFTIDNVMKFSVSALEHRVYEVRETAVRIILDMYRQHQASILEYLPPDDSNTRRNILYKTIFEGFAKIDGRATDAEMRARRKAATEEAEKQKKEEIKALQGQLAALKEIQAEVQEKESDAVKPKNQDIQGGKAAPAEALGIPDEHYLDNLCIFCGERSESFTEEGLDLHYWKHCLMLTRCDHCKQVVEISSLTEHLLTECDKKDGFGKCYRCSEAVFKEELPRHIKHKDCNPAKPEKLANRCPLCHENFSPGEEAWKAHLMGPAGCTMNLRKTHILQKAPALQPGKSSAVAASGPLGSKAGSKIPTPKGGLSKSSSRTYAKR

SEQ ID NO: 758440 - protein, 371 aa, Homo sapiens [sequence omitted]

SEQ ID NO: 758441 - protein, 147 aa, Homo sapiens [sequence omitted]

SEQ ID NO: 758442 - protein, 147 aa, Homo sapiens [sequence omitted]

SEQ ID NO: 758443 - protein, 158 aa, Homo sapiens [sequence omitted]

SEQ ID NO: 758444 - protein, 683 aa, Homo sapiens
MPHKIGFVVVSSSGHEDGFSARELMIHAPTVSGWRSPRFCQFPQEIVLQMVERCRIRKLQLLAHQYMISSKIEFYISESLPEYFAPYQAERFRRLGYVSLCDNEKTGCKARELKSVYVDAVGQFLKLIFHQNHVNKYNIYNQVALVAINIIGDPADFSDESNTASREKLIDHYLGHNSEDPALEGTYARKSDYISPLDDLAFDMYQDPEVAQIIRKLDERKREAVQKERYDYAKKLKQAIADLQKVGERLGRYEVEKRCAVEKEDYDLAKEKKQQMEQYRAEVYEQLELHSLLDAELMRRPFDLPLQPLARSGSPCHQKPMPSLPQLEERGTENQFAEPFLQEKPSSYSLTISPQHSAVDPLLPATDPHPKINAESLPYDERPLPAIRKHYGEAVVEPEMSNADISDARRGGMLGEPEPLTEKALREASSAIDVLGETLVAEAYCKTWSYREDALLALSKKLMEMPVGTPKEDLKNTLRASVFLVRRAIKDIVTSVFQASLKLLKMIITQYIPKHKLSKLETAHCVERTIPVLLTRTGDSSARLRVTAANFIQEMALFKEVKSLQIIPSYLVQPLKANSSVHLAMSQMGLLARLLKDLGTGSSGFTIDNVMKFSVSALEHRVYEVRETAVRIILDMYRQHQASILEYLPPDDSNTRRNILYKTIFEGFAKIDGRATDAEMRVS

SEQ ID NO: 758445 - protein, 327 aa, Homo sapiens
MPHKIGFVVVSSSGHEDGFSARELMIHAPTVSGWRSPRFCQFPQEIVLQMVERCRIRKLQLLAHQYMISSKIEFYISESLPEYFAPYQAERFRRLGYVSLCDNEKTGCKARELKSVYVDAVGQFLKLIFHQNHVNKYNIYNQVALVAINIIGDPADFSDESNTASREKLIDHYLGHNSEDPALEGTYARKSDYISPLDDLAFDMYQDPEVAQIIRKLDERKREAVQKERYDYAKKLKQAIADLQKVGERLGRYEVEKRCAVEKEDYDLAKEKKQQMEQYRAEVYEQLELHSLLDAELHSAVDPLLPATDPHPKINAPALQPGEGQRR

SEQ ID NO: 758446 - protein, 68 aa, Homo sapiens
LTECDKKDGFGKCYRCSEAVFKEELPRHIKHKDCNRECPFPGSRALGSPGVLLEEVPLLLSLCKGLVN

SEQ ID NO: 758447 - protein, 699 aa, Homo sapiens
MIPASAKAPHKQPHKQSISIGRGTRKRDEDSGTEVGEGTDEWAQSKATVRPPDQLELTDAELKEEFTRILTANNPHAPQNIVRYSFKEGTYKPIGFVNQLAVHYTQVGNLIPKDSDEGRRQHYRDELVAGSQESVKVISETGNLEEDEEPKELETEPGSQTDVPAAGAAEKVTEEELMTPKQPKERKLTNQFNFSERASQTYNNPVRDRECQTEPPPRTNFSATANQWEIYDAYVEELEKQEKTKEKEKAKTPVAKKSGKMAMRKLTSMESQTDDLIKLSQAAKIMERMVNQNTYDDIAQDFKYYDDAADEYRDQVGTLLPLWKFQNDKAKRLSVTALCWNPKYRDLFAVGYGSYDFMKQSRGMLLLYSLKNPSFPEYMFSSNSGVMCLDIHVDHPYLVAVGHYDGNVAIYNLKKPHSQPSFCSSAKSGKHSDPVWQVKWQKDDMDQNLNFFSVSSDGRIVSWTLVKRKLVHIDVIKLKVEGSTTEVPEGLQLHPVGCGTAFDFHKEIDYMFLVGTEEGKIYKCSKSYSSQFLDTYDAHNMSVDTVSWNPYHTKVFMSCSSDWTVKIWDHTIKTPMFIYDLNSAVGDVAWAPYSSTVFAAVTTDGKAHIFDLAINKYEAICNQPVAAKKNRLTHVQFNLIHPIIIVGDDRGHIISLKLSPNLRKMPKEKKGQEVQKGPAVEIAKLDKLLNLVREVKIKT

SEQ ID NO: 758448 - protein, 175 aa, Homo sapiens
MTSFLPDSGTADRRQIRAQQGLQSISIGRGTRKRDEDSGTEVGEGTDEWAQSKATVRPPDQLELTDAELKEEFTRILTANNPHAPQNIVRYSFKKQWSLGFIPKLKRKIPVNYWGQDEGEISNETVRVIYSLGIFIMKIVTILLNINIEHLLCVRHCVNRLFLLFLILIIIMQIR

SEQ ID NO: 758449 - protein, 731 aa, Homo sapiens
MIPASAKAPHKQPHKQSISIGRGTRKRDEDSGTEVGEGTDEWAQSKATVRPPDQLELTDAELKEEFTRILTANNPHAPQNIVRYSFKEGTYKPIGFVNQLAVHYTQVGNLIPKDSDEGRRQHYRDELVAGSQESVKVISETGNLEEDEEPKELETEPGSQTDVPAAGAAEKVTEEELMTPKQPKERKLTNQFNFSERASQTYNNPVRDRECQTEPPPRTNFSATANQWEIYDAYVEELEKQEKTKEKEKAKTPVAKKSGKMAMRKLTSMESQTDDLIKLSQAAKIMERMVNQNTYDDIAQDFKYYDDAADEYRDQVGTLLPLWKFQNDKAKRLSVTALCWNPKYRDLFAVGYGSYDFMKQSRGMLLLYSLKNPSFPEYMFSSNSGVMCLDIHVDHPYLVAVGHYDGNVAIYNLKKPHSQPSFCSSAKSGKHSDPVWQVKWQKDDMDQNLNFFSVSSDGRIVSWTLVKRKLVHIDVIKLKVEGSTTEVPEGLQLHPVGCGTAFDFHKEIDYMFLVGTEEGKIYKCSKSYSSQFLDTYDAHNMSVDTVSWNPYHTKVFMSCSSDWTVKIWDHTIKEGPVPGSAWGPPLGYGTVSPLCHGLSTLHLCRTPMFIYDLNSAVGDVAWAPYSSTVFAAVTTDGKAHIFDLAINKYEAICNQPVAAKKNRLTHVQFNLIHPIIIVGDDRGHIISLKLSPNLRKMPKEKKGQEVQKGPAVEIAKLDKLLNLVREVKIKT

SEQ ID NO: 758450 - protein, 649 aa, Homo sapiens
MIPASAKAPHKQPHKQSISIGRGTRKRDEDSGTEVGEGTDEWAQSKATVRPPDQLELTDAELKEEFTRILTANNPHAPQNIVRYSFKEGTYKPIGFVNQLAVHYTQVGNLIPKDSDEGRRQHYRDELVAGSQESVKVISETGNLEEDEEPKELETEPGSQTDVPAAGAAEKVTEEELMTPKQPKERKLTNQFNFSERASQTYNNPVRDRECQTEPPPRTNFSATANQWEIYDAYVEELEKQEKTKEKEKAKTPVAKKSGKMAMRKLTSMESQTDDLIKLSQAAKIMERMVNQNTYDDIAQDFKYYDDAADEYRDQVGTLLPLWKFQNDKAKRLSVTALCWNPKYRDLFAVGYGSYDFMKQSRGMLLLYSLKNPSFPEYMFSSNSGVMCLDIHVDHPYLVAVGHYDGNVAIYNLKKPHSQPSFCSSAKSGKHSDPVWQVKWQKDDMDQNLNFFSVSSDGRIVSWTLVKRKLVHIDVIKLKVEGSTTEVPEGLQLHPVGCGTAFDFHKEIDYMFLVGTEEGKSTRTPMFIYDLNSAVGDVAWAPYSSTVFAAVTTDGKAHIFDLAINKYEAICNQPVAAKKNRLTHVQFNLIHPIIIVGDDRGHIISLKLSPNLRKMPKEKKGQEVQKGPAVEIAKLDKLLNLVREVKIKT

SEQ ID NO: 758451 - protein, 638 aa, Homo sapiens
MIPASAKAPHKQPHKQSISIGRGTRKRDEDSGTEVGEGTDEWAQSKATVRPPDQLELTDAELKEEFTRILTANNPHAPQNIVRYSFKEGTYKPIGFVNQLAVHYTQVGNLIPKDSDEGRRQHYRDELVAGSQESVKVISETGNLEEDEEPKELETEPGSQTDVPAAGAAEKVTEEELMTPKQPKERKLTNQFNFSERASQTYNNPVRDRECQTEPPPRTNFSATANQWEIYDAYVEELEKQEKTKEKEKAKTPVAKKSGKMAMRKLTSMESQTDDLIKLSQAAKIMERMVNQNTYDDIAQDFKYYDDAADEYRDQVGTLLPLWKFQNDKAKRLSVTALCWNPKYRDLFAVGYGSYDFMKQSRGMLLLYSLKNPSFPEYMFSSNSGVMCLDIHVDHPYLVAVGHYDGNVAIYNLKKPHSQPSFCSSAKSGKHSDPVWQVKWQKDDMDQNLNFFSVSSDGRIVSWTLVKRKLVHIDVIKLKVEGSTTEVPEGLQLHPVGCGTAFDFHKEIDYMFLVGTEEGKIYKCSKSYSSQFLDTYDAHNMSVDTVSWNPYHTKVFMSCSSDWTVKIWDHTIKTPMFIYDLNSAVGDVAWAPYSSTVFAAVTTDGKEKKGQEVQKGPAVEIAKLDKLLNLVREVKIKT

SEQ ID NO: 758452 - protein, 739 aa, Homo sapiens
MDEDSGTEVGEGTDEWAQSKATVRPPDQLELTDAELKEEFTRILTANNPHAPQNIVRYSFKKQWSLGFIPKLKRKIPVNYWGQDEDENFRLTEDLEGTYKPIGFVNQLAVHYTQVGNLIPKDSDEGRRQHYRDELVAGSQESVKVISETGNLEEDEEPKELETEPGSQTDVPAAGAAEKVTEEELMTPKQPKERKLTNQFNFSERASQTYNNPVRDRECQTEPPPRTNFSATANQWEIYDAYVEELEKQEKTKEKEKAKTPVAKKSGKMAMRKLTSMESQTDDLIKLSQAAKIMERMVNQNTYDDIAQDFKYYDDAADEYRDQVGTLLPLWKFQNDKAKRLSVTALCWNPKYRDLFAVGYGSYDFMKQSRGMLLLYSLKNPSFPEYMFSSNSGVMCLDIHVDHPYLVAVGHYDGNVAIYNLKKPHSQPSFCSSAKSGKHSDPVWQVKWQKDDMDQNLNFFSVSSDGRIVSWTLVKRKLVHIDVIKLKVEGSTTEVPEGLQLHPVGCGTAFDFHKEIDYMFLVGTEEGKIYKCSKSYSSQFLDTYDAHNMSVDTVSWNPYHTKVFMSCSSDWTVKIWDHTIKEGPVPGSAWGPPLGYGTVSPLCHGLSTLHLCRTPMFIYDLNSAVGDVAWAPYSSTVFAAVTTDGKAHIFDLAINKYEAICNQPVAAKKNRLTHVQFNLIHPIIIVGDDRGHIISLKLSPNLRKMPKEKKGQEVQKGPAVEIAKLDKLLNLVREVKIKT

SEQ ID NO: 758453 - protein, 738 aa, Homo sapiens
MTSFLPDSGTADRRQIRAQQGLQSISIGRGTRKRDEDSGTEVGEGTDEWAQSKATVRPPDQLELTDAELKEEFTRILTANNPHAPQNIVRYSFKEGTYKPIGFVNQLAVHYTQVGNLIPKDSDEGRRQHYRDELVAGSQESVKVISETGNLEEDEEPKELETEPGSQTDVPAAGAAEKVTEEELMTPKQPKERKLTNQFNFSERASQTYNNPVRDRECQTEPPPRTNFSATANQWEIYDAYVEELEKQEKTKEKEKAKTPVAKKSGKMAMRKLTSMESQTDDLIKLSQAAKIMERMVNQNTYDDIAQDFKYYDDAADEYRDQVGTLLPLWKFQNDKAKRLSVTALCWNPKYRDLFAVGYGSYDFMKQSRGMLLLYSLKNPSFPEYMFSSNSGVMCLDIHVDHPYLVAVGHYDGNVAIYNLKKPHSQPSFCSSAKSGKHSDPVWQVKWQKDDMDQNLNFFSVSSDGRIVSWTLVKRKLVHIDVIKLKVEGSTTEVPEGLQLHPVGCGTAFDFHKEIDYMFLVGTEEGKIYKCSKSYSSQFLDTYDAHNMSVDTVSWNPYHTKVFMSCSSDWTVKIWDHTIKWGPVPGSAWGPPLGYGTVSPLCHGLSTLHLCRTPMFIYDLNSAVGDVAWAPYSSTVFAAVTTDGKAHIFDLAINKYEAICNQPVAAKKNRLTHVQFNLIHPIIIVGDDRGHIISLKLSPNLRKMPKEKKGQEVQKGPAVEIAKLDKLLNLVREVKIKT

SEQ ID NO: 758454 - protein, 569 aa, Homo sapiens
MRKLTSMESQTDDLIKLSQAAKIMERMVNQNTYDDIAQDFKYYDDAADEYRDQVGTLLPLWKFQNDKAKRLSVTALCWYSIGIAANAEPLSALYIPNPQYPLLHLTTLSMTCDSIEKYGNLDSYGITRPPPGLPSGEGLSWRTDVCSIFRHQCQWEGPCPQEGHVHFLCQWIHIFFCRNPKYRDLFAVGYGSYDFMKQSRGMLLLYSLKNPSFPEYMFSSNSGVMCLDIHVDHPYLVAVGHYDGNVAIYNLKKPHSQPSFCSSAKSGKHSDPVWQVKWQKDDMDQNLNFFSVSSDGRIVSWTLVKRKLVHIDVIKLKVEGSTTEVPEGLQLHPVGCGTAFDFHKEIDYMFLVGTEEGKIYKCSKSYSSQFLDTYDAHNMSVDTVSWNPYHTKVFMSCSSDWTVKIWDHTIKEGPVPGSAWGPPLGYGTVSPLCHGLSTLHLCRTPMFIYDLNSAVGDVAWAPYSSTVFAAVTTDGKAHIFDLAINKYEAICNQPVAAKKNRLTHVQFNLIHPIIIVGDDRGHIISLKLSPNLRKMPKEKKGQEVQKGPAVEIAKLDKLLNLVREVKIKT

SEQ ID NO: 758455 - protein, 374 aa, Homo sapiens
MARSLTWRCCPWCLTEDEKAAARVDQEINRILLEQKKQDRGELKLLLLGPGESGKSTFIKQMRIIHGAGYSEEERKGFRPLVYQNIFVSMRAMIEAMERLQIPFSRPESKHHASLVMSQDPYKVTTFEKRYAAAMQWLWRDAGIRACYERRREFHLLDSAVYYLSHLERITEEGYVPTAQDVLRSRMPTTGINEYCFSVQKTNLRIVDVGGQKSERKKWIHCFENVIALIYLASLSEYDQCLEENNQENRMKESLALFGTILELPWFKSTSVILFLNKTDILEEKIPTSHLATYFPSFQGPKQDAEAAKRFILDMYTRMYTGCVDGPEGSKKGARSRRLFSHYTCATDTQNIRKVFKDVRDSVLARYLDEINLL

SEQ ID NO: 758456 - protein, 374 aa, Homo sapiens; identical to SEQ ID NO: 758455

SEQ ID NO: 758457 - protein, 205 aa, Homo sapiens
MARSLTWRCCPWCLTEDEKAAARVDQEINRILLEQKKQDRGELKLLLLGPGESGKSTFIKQMRIIHGAGYSEEERKGFRPLVYQNIFVSMRAMIEAMERLQIPFSRPESKHHASLVMSQDPYKVTTFEKRYAAAMQWLWRDAGIRACYERRREFHLLDSAVYYLSHLERITEEGYVPTAQDVLRSRMPTTGINEYCFSVQKTNLR

SEQ ID NO: 758458 - protein, 189 aa, Homo sapiens
MALSFSLLMAVLVLSYKSICSLGCDLPQTHSLGNRRALILLAQMGRISHFSCLKDRYDFGFPQEVFDGNQFQKAQAISAFHEMIQQTFNLFSTKDSSAAWDETLLDKFYIELFQQLNDLEACVTQEVGVEEIALMNEDSILAVRKYFQRITLYLMGKKYSPCAWEVVRAEIMRSFSFSTNLQKGLRRKD

SEQ ID NO: 758459 - protein, 120 aa, Homo sapiens
MPIIPSLWEAGRSLEARSSKIFCILIVVVVTQLYKFVKIQRTIHLKGRLLLYEVYLINNQPKNLCSHFSFPTTYIKKERLWLGPVAHTYNPSTLGGRGGWITRGQEFKTSLANMVEPCLY

SEQ ID NO: 758460 - protein, 63 aa, Homo sapiens
WRVRGRTRTQSRGSLLPKPKPTTTLSAHPTLLEQRAQGSGQRELAPDAKPGLNVWPGLSKDQA

SEQ ID NO: 758461 - protein, 144 aa, Homo sapiens
MCHHKRHALRWYNHIKSYEKEKASLPGVKKALGKYGPADVEDTTGSGATDSKDDDDIDLFGSDDEEESEEAKRLREERLAQYESKKAKKPALVAKSSILLDVKPWDDETDMAKLEERVRSIQADGLVWGSSKLVPVGYGIKKLQ

SEQ ID NO: 758462 - protein, 160 aa, Homo sapiens
MGFGDLKSPAGLQVLNDYLADKSYIEGYVPSQADVAVFEAVSSPPPADLCHALRWYNHIKSYEKEKASLPGVKKALGKYGPADVEDTTGSGATDSKDDDDIDLFGSDDEEESEEAKRLREERLAGAAGSPRKTEEATERTTSIATTTTTTTESVEEVVRE

SEQ ID NO: 758463 - protein, 142 aa, Homo sapiens
MGFGDLIEGYVPSQADVAVFEAVSSPPPADLCHALRWYNHIKSYEKEKASLPGVKKALGKYGPADVEDTTGSGATDSKDDDDIDLFGSDDEEESEEAKRLREERLAGAAGSPRKTEEATERTTSIATTTTTTTESVEEVVRE

SEQ ID NO: 758464 - protein, 188 aa, Homo sapiens
MGFGDLKSPAGLQVLNDYLADKSYIEGYVPSQADVAVFEAVSSPPPADLCHALRWYNHIKSYEKEKASLPGVKKALGKYGPADVEDTTGSGATDSKDDDDIDLFGSDDEEESEEAKRLREERLAQYESKKAKKPALVAKSSILLDVKPWDDETDMAKLEERVRSIQADGLVWGSSKLVPVGYGIKKLQ

SEQ ID NO: 758465 - protein, 170 aa, Homo sapiens
MPILGIYFQTQRKVHGQFVGHLIQGPQFVRGEVGMQSTLTFNLRSGAVEGNASVSIEGIFRSLRVLFPLFSVGRPQFARSLSAAPQLSDTADTMGFGDLKSPAGLQVLNDYLADKSYIEGYVPSQADVAVFEAVSSPPPADLCHALRWYNHIKSYEKEKASLPGVKKALM

SEQ ID NO: 758466 - protein, 342 aa, Homo sapiens
MRNWLVLLCPCVLGAALHLWLRLRSPPPACASGAGPADQLALFPQWKSTHYDVVVGVLSARNNHELRNVIRSTWMRHLLQHPTLSQRVLVKFIIGAHGCEVPVEDREDPYSCKLLNITNPVLNQEIEAFSLSEDTSSGLPEDRVVSVSFRVLYPIVITSLGVFYDANDVGFQRNITVKLYQAEQEEALFIARFSPPSCGVQVNKLWYKPVEQFILPESFEGTIVWESQDLHGLVSRNLHKVTVNDGGGVLRVITAGEGALPHEFLEGVEGVAGGFIYTIQEGDALLHNLHSRPQRLIDHIRNLHEEDALLKEESSIYDDIVFVDVVDTYRNVPAKLLNFYRW

SEQ ID NO: 758467 - protein, 498 aa, Homo sapiens
RAPRDSAASDILLDDIVLTHSLFLPTEKFLQELHQYFVRAGGMEGPEGLGRKQACLAMLLHFLDTYQGLLQEEEGAGHIIKDLYLLIMKDESLYQGLREDTLRLHQLVETVELKIPEENQPPSKQVKPLFRHFRRIDSCLQTRVAFRGSDEIFCRVYMPDHSYVTIRSRLSASVQDILGSVTEKLQYSEEPAGREDSLILVAVSSSGEKVLLQPTEDCVFTALGINSHLFACTRDSYEALVPLPEEIQVSPGDTEIHRVEPEDVANHLTAFHWELFRCVHELEFVDYVFHGERGRRETANLELLLQRCSEVTHWVATEVLLCEAPGKRAQLLKKFIKIAALCKQNQDLLSFYAVVMGLDNAAVSRLRLTWEKLPGKFKNLFRKFENLTDPCRNHKSYREVISKMKPPVIPFVPLILKDLTFLHEGSKTLVDGLVNIEKLHSVAEKVRTIRKYRSRPLCLDMEASPNHLQTKAYVRQFQVIDNQNLLFELSYKLEANSQ

SEQ ID NO: 758468 - protein, 498 aa, Homo sapiens; identical to SEQ ID NO: 758467

SEQ ID NO: 758469 - protein, 662 aa, Homo sapiens
MKPLEKFLKKQTSQLAGRTVAGGPGGGLGSCGGPGGGGGPGGGGGPAGGQRSLQRRQSVSRLLLPAFLREPPAEPGLEPPLRRKEESRRGSRRSRAAGGPAGCSWRRCRGPGLSGDGGPMRSPSSYSSDELSPGEPLTSPPWAPLGAPERPEHLLNRVLERLAGGATRDSAASDILLDDIVLTHSLFLPTEKFLQELHQYFVRAGGMEGPEGLGRKQACLAMLLHFLDTYQGLLQEEEGAGHIIKDLYLLIMKDESLYQGLREDTLRLHQLVETVELKIPEENQPPSKQVKPLFRHFRRIDSCLQTRVAFRGSDEIFCRVYMPDHSYVTIRSRLSASVQDILGSVTEKLQYSEEPAGREDSLILVAVSSSGEKVLLQPTEDCVFTALGINSHLFACTRDSYEALVPLPEEIQVSPGDTEIHRVEPEDVANHLTAFHWELFRCVHELEFVDYVFHGERGRRETANLELLLQRCSEVTHWVATEVLLCEAPGKRAQLLKKFIKIAALCKQNQDLLSFYAVVMGLDNAAVSRLRLTWEKLPGKFKNLFRKFENLTDPCRNHKSYREVISKMKPPVIPFVPLILKDLTFLHEGSKTLVDGLVNIEKLHSVAEKVRTIRKYRSRPLCLDMEASPNHLQTKAYVRQFQVIDNQNLLFELSYKLEANSQ

SEQ ID NO: 758470 - protein, 575 aa, Homo sapiens
RAPRDSAASDILLDDIVLTHSLFLPTEKFLQELHQYFVRAGGMEGPEGLGRKQACLAMLLHFLDTYQGLLQEEEGAGHIIKDLYLLIMKDESLYQGLREDTLRLHQLVETVELKIPEENQPPSKQVKPLFRHFRRIDSCLQTRVAFRGSDEIFCRVYMPDHSYVTIRSRLSASVQDILGSVTEKLQYSEEPAGREDSLILVAVSSSGEKVLLQPTEDCVFTALGINSHLFACTRDSYEALVPLPEEIQVSPGDTEIHRVEPEDVANHLTAFHWELFRCVHELEFVDYVFHGERGRRETANLELLLQRCSEVTHWVATEVLLCEAPGKRAQLLKKFIKIAALCKQNQDLLSFYAVVMGLDNAAVSRLRLTWEKLPGKFKNLFRKFENLTDPCRNHKSYREVISKMKPPVIPFVPLILKGERVTPKLCRFHPCFPSPMPCFYFQLPLDSALSTHLERSPPPQTEWVLGKSGVLGCSGPFRTPLLSFPHIGFSPHPLDLTFLHEGSKTLVDGLVNIEKLHSVAEKVRTIRKYRSRPLCLDMEASPNHLQTKAYVRQFQVIDNQNLLFELSYKLEANSQ

SEQ ID NO: 758471 - protein, 392 aa, Homo sapiens
MPSCVHARIPEENQPPSKQVKPLFRHFRRIDSCLQTRVAFRGSDEIFCRVYMPDHSYVTIRSRLSASVQDILGSVTEKLQYSEEPAGREDSLILVAVSSSGEKVLLQPTEDCVFTALGINSHLFACTRDSYEALVPLPEEIQVSPGDTEIHRVEPEDVANHLTAFHWELFRCVHELEFVDYVFHGERGRRETANLELLLQRCSEVTHWVATEVLLCEAPGKRAQLLKKFIKIAALCKQNQDLLSFYAVVMGLDNAAVSRLRLTWEKLPGKFKNLFRKFENLTDPCRNHKSYREVISKMKPPVIPFVPLILKDLTFLHEGSKTLVDGLVNIEKLHSVAEKVRTIRKYRSRPLCLDMEASPNHLQTKAYVRQFQVIDNQNLLFELSYKLEANSQ

SEQ ID NO: 758472 - protein, 847 aa, Homo sapiens
MKPLEKFLKKQTSQLAGRTVAGGPGGGLGSCGGPGGGGGPGGGGGPAGGQRSLQRRQSVSRLLLPAFLREPPAEPGLEPPLRRKEESRRGSRRSRAAGGPAGCSWRRCRGPGLSGDGGPMRSPSSYSSDELSPGEPLTSPPWAPLGAPERPEHLLNRVLERLAGGATRDSAASDILLDDIVLTHSLFLPTEKFLQELHQYFVRAGGMEGPEGLGRKQACLAMLLHFLDTYQGLLQEEEGAGHIIKDLYLLIMKDESLYQGLREDTLRLHQLVETVELKIPEENQPPSKQVKPLFRHFRRIDSCLQTRVAFRGSDEIFCRVYMPDHSYVTIRSRLSASVQDILGSVTEKLQYSEEPAGREDSLILVAVSSSGEKVLLQPTEDCVFTALGINSHLFACTRDSYEALVPLPEEIQVSPGDTEIHRVEPEDVANHLTAFHWELFRCVHEVGTEAGAMLGGWREKCAIGRRCSQHNVLVPRLTVQQALGQRMAVTFVPPSEKNRKERDPRAQWLRAQVLFTQNLTQDFYVLKYSLLKKYNKAETIMPEQMVVLRMSAVSECLAPSKCSVAGEILLMLVVFFFRIFAASCPFYFSIFHPFRPRPPAFRSSSPCTAIFPPTPLTPWRPGRPPLPWVQLEFVDYVFHGERGRRETANLELLLQRCSEVTHWVATEVLLCEAPGKRAQLLKKFIKIAALCKQNQDLLSFYAVVMGLDNAAVSRLRLTWEKLPGKFKNLFRKFENLTDPCRNHKSYREVISKMKPPVIPFVPLILKDLTFLHEGSKTLVDGLVNIEKLHSVAEKVRTIRKYRSRPLCLDMEASPNHLQTKAYVRQFQVIDNQNLLFELSYKLEANSQ

SEQ ID NO: 758473 - protein, 341 aa, Homo sapiens
MPDHSYVTIRSRLSASVQDILGSVTEKLQYSEEPAGREDSLILVAVSSSGEKVLLQPTEDCVFTALGINSHLFACTRDSYEALVPLPEEIQVSPGDTEIHRVEPEDVANHLTAFHWELFRCVHELEFVDYVFHGERGRRETANLELLLQRCSEVTHWVATEVLLCEAPGKRAQLLKKFIKIAALCKQNQDLLSFYAVVMGLDNAAVSRLRLTWEKLPGKFKNLFRKFENLTDPCRNHKSYREVISKMKPPVIPFVPLILKDLTFLHEGSKTLVDGLVNIEKLHSVAEKVRTIRKYRSRPLCLDMEASPNHLQTKAYVRQFQVIDNQNLLFELSYKLEANSQ

SEQ ID NO: 758474 - protein, 177 aa, Homo sapiens
DLNFQYAGDVPCVCDVPVFSASGDKNQYLDMTNVMFCETPWLLNTTDPLRNQVAAQWPQANGSLGRLYAMGVDAYRLAPRLGQLKALPDTRVDGLSGNLGIGAYQRVDRQILGHLALKHFARCLNQHLTSFPWSNFLLHGKEVDGFTPGPISLFILLKSPPHCSFKPKLHFAGSCPL

SEQ ID NO: 758475 - protein, 90 aa, Homo sapiens
SLASHLSSQFLRSACVGIFLNLRVSFVRAGGMEGPEGLGRKQACLAMLLHFLDTYQGLLQEEEGAGHIIKVGLGEEKVGKQAISSGRGPL

SEQ ID NO: 758476 - protein, 222 aa, Homo sapiens
MSQTKMLKVRVTLFCILAGIVLAMTAVVTDHWAVLSPHMEHHNTTCEAAHFGLWRICTKRIPMDDSKTCGPITLPGEKNCSYFRHFNPGESSEIFEFTTQKEYSISAAAIAIFSLGFIILGSLCVLLSLGKKRDYLLRPASMFYAFAGLCILVSVEVMRQSVKRMIDSEDTVWIEYYYSWSFACACAAFILLFLGGLALLLFSLPRMPRNPWESCMDAEPEH

SEQ ID NO: 758477 - protein, 279 aa, Homo sapiens [sequence omitted]

SEQ ID NO: 758478 - protein, 159 aa, Homo sapiens
MHLPEWGSLGALILGSQAHCQGQQDGRHTRISPAFPLCTGRVPGRYLTTRHTCTHTLTLGQNADHSPSLQAQVVVLEQSHSPAQLEVDAQQQQLELQQEVERLRSAQAQTERTLEARERAHRQRVRGLEEQVSTLKGQLQQELRRSSAPFSPPSGPPEK

SEQ ID NO: 758479 - protein, 1043 aa, Homo sapiens
MALAALMFWGVCLGPLLVCHRHPVLAPEEAAWRELEAERAQLQSQLQREQEELLARLEAEKEELSEEIAALQQERDEGLLLAESEKQQALSLKESEKTALSEKLMGTRHSLATISLEMERQKRDAQSRQEQDRSTVNALTSELRDLRAQREEAAAAHAQEVRRLQEQARDLGKQRDSCLREAEELRTQLRLLEDARDGLRRELLEAQRKLRESQEGREVQRQEAGELRRSLGEGAKEREALRRSNEELRSAVKKAESERISLKLANEDKEQKLALLEEARTAVGKEAGELRTGLQEVERSRLEARRELQELRRQMKMLDSENTRLGRELAELQGRLALGERAEKESRRETLGLRQRLLKGEASLEVMRQELQVAQRKLQEQEGEFRTRERRLLGSLEEARGTEKQQLDHARGLELKLEAARAEAAELGLRLSAAEGRAQGLEAELARVEVQRRAAEAQLGGLRSALRRGLGLGRAPSPAPRPVPGSPARDAPAEGSGEGLNSPSTLECSPGSQPPSPGPATSPASPDLDPEAVRGALREFLQELRSAQRERDELRTQTSALNRQLAEMEAERDSATSRARQLQKAVAESEEARRSVDGRLSGVQAELALQEESVRRSERERRATLDQVATLERSLQATESELRASQEKISKMKANETKLEGDKRRLKEVLDASESRTVKLELQRRSLEGELQRSRLGLSDREAQAQALQDRVDSLQRQVADSEVKAGTLQLTVERLNGALAKVEESEGALRDKVRGLTEALAQSSASLNSTRDKNLHLQKALTACEHDRQVLQERLDAARQALSEARKQSSSLGEQVQTLRGEVADLELQRVEAEGQLQQLREVLRQRQEGEAAALNTVQKLQDERRLLQERLGSLQRALAQLEAEKREVERSALRLEKDRVALRRTLDKVEREKLRSHEDTVRLSAEKGRLDRTLTGAELELAEAQRQIQQLEAQVVVLEQSHSPAQLEVDAQQQQLELQQEVERLRSAQAQTERTLEARERAHRQRVRGLEEQVSTLKGQLQQELRRSSAPFSPPSGPPEK

SEQ ID NO: 758480 - protein, 316 aa, Homo sapiens
MLQAEKAEVAEALTKAEAGRVELELSMTKLRAEEASLQDSLSKLSALNESLAQDKLDLNRLVAQLEEEKSALQGRQRQAEQEATVAREEQERLEELRLEQEVARQGLEGSLRVAEQAQEALEQQLPTLRHERSQLQEQLAQLSRQLSGREQELEQARREAQRQVEALERAAREKEALAKEHAGLAVQLVAAEREGRTLSEEATRLRLEKEALEGSLFEVQRQLAQLEARREQLEAEGQALLLAKETLTGELAGLRQQIIATQEKASLDKELMAQKLVQAEREAQASLREQRAAHEEDLQRLQREKVQAAGEGWAGL

SEQ ID NO: 758481 - protein, 125 aa, Homo sapiens
MTVSEMCGRPVASASLSKSSFSSRKRGRAQQPQHLRMQPWVPATISRTCHLPSLSRPGPGGSARGPPGIPARAAECPERTGKPGCAWLDGEPGGPWGGCRVSEQGSVFVPPCRGYRTNFGPRPVP

SEQ ID NO: 758482 - protein, 1313 aa, Homo sapiens
MLQAEKAEVAEALTKAEAGRVELELSMTKLRAEEASLQDSLSKLSALNESLAQDKLDLNRLVAQLEEEKSALQGRQRQAEQEATVAREEQERLEELRLEQEVARQGLEGSLRVAEQAQEALEQQLPTLRHERSQLQEQLAQLSRQLSGREQELEQARREAQRQVEALERAAREKEALAKEHAGLAVQLVAAEREGRTLSEEATRLRLEKEALEGSLFEVQRQLAQLEARREQLEAEGQALLLAKETLTGELAGLRQQIIATQEKASLDKELMAQKLVQAEREAQASLREQRAAHEEDLQRLQREKEAAWRELEAERAQLQSQLQREQEELLARLEAEKEELSEEIAALQQERDEGLLLAESEKQQALSLKESEKTALSEKLMGTRHSLATISLEMERQKRDAQSRQEQDRSTVNALTSELRDLRAQREEAAAAHAQEVRRLQEQARDLGKQRDSCLREAEELRTQLRLLEDARDGLRRELLEAQRKLRESQEGREVQRQEAGELRRSLGEGAKEREALRRSNEELRSAVKKAESERISLKLANEDKEQKLALLEEARTAVGKEAGELRTGLQEVERSRLEARRELQELRRQMKMLDSENTRLGRELAELQGRLALGERAEKESRRETLGLRQRLLKGEASLEVMRQELQVAQRKLQEQEGEFRTRERRLLGSLEEARGTEKQQLDHARGLELKLEAARAEAAELGLRLSAAEGRAQGLEAELARVEVQRRAAEAQLGGLRSALRRGLGLGRAPSPAPRPVPGSPARDAPAEGSGEGLNSPSTLECSPGSQPPSPGPATSPASPDLDPEAVRGALREFLQELRSAQRERDELRTQTSALNRQLAEMEAERDSATSRARQLQKAVAESEEARRSVDGRLSGVQAELALQEESVRRSERERRATLDQVATLERSLQATESELRASQEKISKMKANETKLEGDKRRLKEVLDASESRTVKLELQRRSLEGELQRSRLGLSDREAQAQALQDRVDSLQRQVADSEVKAGTLQLTVERLNGALAKVEESEGALRDKVRGLTEALAQSSASLNSTRDKNLHLQKALTACEHDRQVLQERLDAARQALSEARKQSSSLGEQVQTLRGEVADLELQRVEAEGQLQQLREVLRQRQEGEAAALNTVQKLQDERRLLQERLGSLQRALAQLEAEKREVERSALRLEKDRVALRRTLDKVEREKLRSHEDTVRLSAEKGRLDRTLTGAELELAEAQRQIQQLEAQVVVLEQSHSPAQLEVDAQQQQLELQQEVERLRSAQAQTERTLEARERAHRQRVSTLKGQLQQELRRSSAPFSPPSGPPEK

SEQ ID NO: 758483 - protein, 918 aa, Homo sapiens
MALAALMFWGVCLGPLLVCHRHPVLAPEEAAWRELEAERAQLQSQLQREQEELLARLEAEKEELSEEIAALQQERDEGLLLAESEKQQALSLKESEKTALSEKLMGTRHSLATISLEMERQKRDAQSRQEQDRSTVNALTSELRDLRAQREEAAAAHAQEVRRLQEQARDLGKQRDSCLREAEELRTQLRLLEDARDGLRRELLEAQRKLRESQEGREVQRQEAGELRRSLGEGAKEREALRRSNEELRSAVKKAESERISLKLANEDKEQKLALLEEARTAVGKEAGELRTGLQEVERSRLEARRELQELRRQMKMLDSENTRLGRELAELQGRLALGERAEKESRRETLGLRQRLLKGEASLEVMRQELQVAQRKLQEQEGEFRTRERRLLGSLEEARGTEKQQLDHARGLELKLEAARAEAAELGLRLSAAEGRAQGLEAELARVEVQRRAAEAQLGGLRSALRRGLGLGRAPSPAPRPVPGSPARDAPAEGSGEGLNSPSTLECSPGSQPPSPGPATSPASPDLDPEAVRGALREFLQELRSAQRERDELRTQTSALNRQLAEMEAERDSATSRARQLQKAVAESEEARRSVDGRLSGVQAELALQEESVRRSERERRATLDQVATLERSLQATESELRASQEKISKMKANETKLEGDKRRLKEVLDASESRTVKLELQRRSLEGELQRSRLGLSDREAQAQALQDRVDSLQRQVLRQRQEGEAAALNTVQKLQDERRLLQERLGSLQRALAQLEAEKREVERSALRLEKDRVALRRTLDKVEREKLRSHEDTVRLSAEKGRLDRTLTGAELELAEAQRQIQQLEAQVVVLEQSHSPAQLEVDAQQQQLELQQEVERLRSAQAQTERTLEARERAHRQRVRGLEEQVSTLKGQLQQELRRSSAPFSPPSGPPEK

SEQ ID NO: 758484 - protein, 63 aa, Homo sapiens
MPPGPAHPPSPLSPASAQALSLKESEKTALSEKLMGTRHSLATISLEMERQKRDAQSRQEQDR

SEQ ID NO: 758485 - protein, 334 aa, Homo sapiens
MGEAGAAEEACRHMGTKEEFVKVRKKDLERLTTEVMQIRDFLPRILNGEVLESFQKLKIVEKNLERKEQELEQLKMDCEHFKARLETVQADNIREKKEKLALRQQLNEAKQQLLQQAEYCTEMGAAACTLLWGVSSSEEVVKAILGGDKALKFFSITGQTMESFVKSLDGDVQELDSDESQFVFALAGIVTNVAAIACGREFLVNSSRVLLDTILQLLGDLKPGQCTKLKVLMLMSLYNVSINLKGLKYISESPGFIPLLWWLLSDPDAEVCLHVLRLVQSVVLEPEVFSKSASEFRSSLPLQRILAMSKSRNPRLQTAAQELLEDLRTLEHNV

SEQ ID NO: 758486 - protein, 819 aa, Homo sapiens
METKGYHSLPEGLDMERRWGQVSQAVERSSLGPTERTDENNYMEIVNVSCVSGAIPNNSTQGSSKEKQELLPCLQQDNNRPGILTSDIKTELESKELSATVAESMGLYMDSVRDADYSYEQQNQQGSMSPAKIYQNVEQLVKFYKGNGHRPSTLSCVNTPLRSFMSDSGSSVNGGVMRAIVKSPIMCHEKSPSVCSPLNMTSSVCSPAGINSVSSTTASFGSFPVHSPITQGTPLTCSPNVENRGSRSHSPAHASNVGSPLSSPLSSMKSSISSPPSHCSVKSPVSSPNNVTLRSSVSSPANINNSRCSVSSPSNTNNRSTLSSPAASTVGSICSPVNNAFSYTASGTSAGSSTLRDVVPSPDTQEKGAQEVPFPKTEEVESAISNGVTGQLNIVQYIKPEPDGAFSSSCLGGNSKINSDSSFSVPIKQESTKHSCSGTSFKGNPTVNPFPFMDGSYFSFMDDKDYYSLSGILGPPVPGFDGNCEGSGFPVGIKQEPDDGSYYPEASIPSSAIVGVNSGGQSFHYRIGAQGTISLSRSARDQSFQHLSSFPPVNTLVESWKSHGDLSSRRSDGYPVLEYIPENVSSSTLRSVSTGSSRPSKICLVCGDEASGCHYGVVTCGSCKVFFKRAVEGQHNYLCAGRNDCIIDKIRRKNCPALQTSEMSSSWNEFRREKMHQSAMYELCQGMHQISLQFVRLQLTFEEYTIMKVLLLLSTIPKDGLKSQAAFEEMRTNYIKELRKMVTKCPNNSGQSWQRFYQLTKLLDSMHDLVSDLLEFCFYTFRESHALKVEFPAMLVEIISDQLPKVESGNAKPLYFHRK

SEQ ID NO: 758487 - protein, 867 aa, Homo sapiens [sequence omitted]

SEQ ID NO: 758488 - protein, 845 aa, Homo sapiens
METKGYHSLPEGLDMERRWGQVSQAVERSSLGPTERTDENNYMEIVNVSCVSGAIPNNSTQGSSKEKQELLPCLQQDNNRPGILTSDIKTELESKELSATVAESMGLYMDSVRDADYSYEQQNQQGSMSPAKIYQNVEQLVKFYKGNGHRPSTLSCVNTPLRSFMSDSGSSVNGGVMRAIVKSPIMCHEKSPSVCSPLNMTSSVCSPAGINSVSSTTASFGSFPVHSPITQGTPLTCSPNVENRGSRSHSPAHASNVGSPLSSPLSSMKSSISSPPSHCSVKSPVSSPNNVTLRSSVSSPANINNSRCSVSSPSNTNNRSTLSSPAASTVGSICSPVNNAFSYTASGTSAGSSTLRDVVPSPDTQEKGAQEVPFPKTEEVESAISNGVTGQLNIVQYIKPEPDGAFSSSCLGGNSKINSDSSFSVPIKQESTKHSCSGTSFKGNPTVNPFPFMDGSYFSFMDDKDYYSLSGILGPPVPGFDGNCEGSGFPVGIKQEPDDGSYYPEASIPSSAIVGVNSGGQSFHYRIGAQGTISLSRSARDQSFQHLSSFPPVNTLVESWKSHGDLSSRRSDGYPVLEYIPENVSSSTLRSVSTGSSRPSKICLVCGDEASGCHYGVVTCGSCKVFFKRAVEGQHNYLCAGRNDCIIDKIRRKNCPACRLQKCLQAGMNLGARKSKKLGKLKGIHEEQPQQQQPPPPPPPPQSPEEGTTYIAPAKEPSVNTALVPQLSTISRALTPSPVMVLENIEPEIVYAGYDSSKPDTAENLLSTLNRLAGKQMIQVVKWAKVLPGFKNLPLEDQITLIQYSWMCLSSFALSWRSYKHTNSQFLYFAPDLVFNELLARVREG

SEQ ID NO: 758489 - protein, 837 aa, Homo sapiens
METKGYHSLPEGLDMERRWGQVSQAVERSSLGPTERTDENNYMEIVNVSCVSGAIPNNSTQGSSKEKQELLPCLQQDNNRPGILTSDIKTELESKELSATVAESMGLYMDSVRDADYSYEQQNQQGSMSPAKIYQNVEQLVKFYKGNGHRPSTLSCVNTPLRSFMSDSGSSVNGGVMRAIVKSPIMCHEKSPSVCSPLNMTSSVCSPAGINSVSSTTASFGSFPVHSPITQGTPLTCSPNVENRGSRSHSPAHASNVGSPLSSPLSSMKSSISSPPSHCSVKSPVSSPNNVTLRSSVSSPANINNSRCSVSSPSNTNNRSTLSSPAASTVGSICSPVNNAFSYTASGTSAGSSTLRDVVPSPDTQEKGAQEVPFPKTEEVESAISNGVTGQLNIVQYIKPEPDGAFSSSCLGGNSKINSDSSFSVPIKQESTKHSCSGTSFKGNPTVNPFPFMDGSYFSFMDDKDYYSLSGILGPPVPGFDGNCEGSGFPVGIKQEPDDGSYYPEASIPSSAIVGVNSGGQSFHYRIGAQGTISLSRSARDQSFQHLSSFPPVNTLVESWKSHGDLSSRRSDGYPVLEYIPENVSSSTLRSVSTGSSRPSKICLVCGDEASGCHYGVVTCGSCKVFFKRAVEGQHNYLCAGRNDCIIDKIRRKNCPACRLQKCLQAGMNLGARKSKKLGKLKGIHEEQPQQQQPPPPPPPPQSPEEGTTYIAPAKEPSVNTALVPQLSTISRALTPSPVMVLENIEPEIVYAGYDSSKPDTAENLLSTLNRLAGKQMIQVVKWAKVLPGFKNLPLEDQITLIQYSWMCLSSFALSWRSYKHTNSQFLYFAPDLVFNE

SEQ ID NO: 758490 - protein, 984 aa, Homo sapiens [sequence omitted]

SEQ ID NO: 758491 - protein, 415 aa, Homo sapiens
MDGSYFSFMDDKDYYSLSGILGPPVPGFDGNCEGSGFPVGIKQEPDDGSYYPEASIPSSAIVGVNSGGQSFHYRIGAQGTISLSRSARDQSFQHLSSFPPVNTLVESWKSHGDLSSRRSDGYPVLEYIPENVSSSTLRSVSTGSSRPSKICLVCGDEASGCHYGVVTCGSCKVFFKRAVEGQHNYLCAGRNDCIIDKIRRKNCPACRLQKCLQAGMNLGGFKNLPLEDQITLIQYSWMCLSSFALSWRSYKHTNSQFLYFAPDLVFNEEKMHQSAMYELCQGMHQISLQFVRLQLTFEEYTIMKVLLLLSTIPKDGLKSQAAFEEMRTNYIKELRKMVTKCPNNSGQSWQRFYQLTKLLDSMHDLVSDLLEFCFYTFRESHALKVEFPAMLVEIISDQLPKVESGNAKPLYFHRK

SEQ ID NO: 758492 - protein, 648 aa, Homo sapiens [sequence omitted]

SEQ ID NO: 758493 - protein, 114 aa, Homo sapiens
MSLLSSRAARVPGPSSSLCALLVLLLLLTQPGPIASAGPAAAVLRELRCVCLQTTQGVHPKMISNLQVFAIGPQCSKVEVVASLKNGKEICLDPEAPFLKKVIQKILDGGNKEN

SEQ ID NO: 758494 - protein, 196 aa, Homo sapiens
NSALGVREDPAGRPRPACELGRGRGWSLLGATAMDALEGESFALSFSSASDAEFDAVVGYLEDIIMDDEFQLLQRNFMDKYYLEFEDTEENKLIYTPIFNEYISLVEKYIEEQLLQRIPEFNMAAFTTTLQHHKDEVAGDIFDMLLTFTDFLAFKEMFLDYRAEKEGRGLDLSSGLVVTSLCKSSSLPASQNNLRH

SEQ ID NO: 758495 - protein, 163 aa, Homo sapiens
MDALEGESFALSFSSASDAEFDAVVGYLEDIIMDDEFQLLQRNFMDKYYLEFEDTEENKLIYTPIFNEYISLVEKYIEEQLLQRIPEFNMAAFTTTLQHHKDEVAGDIFDMLLTFTDFLAFKEMFLDYRAEKEGRGLDLSSGLVVTSLCKSSSLPASQNNLRH

SEQ ID NO: 758496 - protein, 106 aa, Homo sapiens
MDALEGESFALSFSSASDAEFDAVVGYLEDIIMDDEFQLLQRNFMDKYYLEFEDTEENKLIYTPIFNEYISLVEKYIEEQLLQRIPEFNMAAFTTTLHHLFRLQAP

SEQ ID NO: 758497 - protein, 117 aa, Homo sapiens
MDALEGESFALSFSSASDAEFDAVVGYLEDIIMDDEFQLLQRNFMDKYYLEFEDTEENKLIYTPIFNEYISLVEKYIEEQLLQRIPEFNMAAFTTTLHPIGSAHDDRTHLGKTDSVM

SEQ ID NO: 758498 - protein, 104 aa, Homo sapiens
TRRGRVGSLTIVLLPTSSRHLSQELLSQTPLERALCQALHLGGPSPAYLLVCKCGLTRRHHPLFQQALHESLCTCTSFSHGPQFQYFSLSGVPDVYLGCYSSPV

SEQ ID NO: 758499 - protein, 123 aa, Homo sapiens
  misc_feature (6)..(6): Xaa can be any naturally occurring amino acid
IVFERXVYGAGFPGESLCFQFLIKRDMNEKSIWAPTNPPECCGRGWSLLGATAMDALEGESFALSFSSASDAEFDAVVGYLEDIIMDDEFQLLQRNFMDKYYLEFEDTEENKLIYTPIFNEYL

SEQ ID NO: 758500 - protein, 163 aa, Homo sapiens; identical to SEQ ID NO: 758495

SEQ ID NO: 758501 - protein, 163 aa, Homo sapiens; identical to SEQ ID NO: 758495

SEQ ID NO: 758502 - protein, 196 aa, Homo sapiens; identical to SEQ ID NO: 758494

SEQ ID NO: 758503 - protein, 143 aa, Homo sapiens
MDALEGESFALSFSSASDAEFDAVVGYLEDIIMDDEFQLLQRNFMDKYYLEFEDTEENKLIYTPIFNEYISLVEKYIEEQLLQRIPEFNMAAFTTTLQHHKDEVAGDIFDMLLTFTDFLAFKEMFLDYRAPEQSAALGPTSSQ

SEQ ID NO: 758504 - protein, 163 aa, Homo sapiens; identical to SEQ ID NO: 758495

SEQ ID NO: 758505 - protein, 163 aa, Homo sapiens; identical to SEQ ID NO: 758495

SEQ ID NO: 758506 - protein, 103 aa, Homo sapiens
MDALEGESFALSFSSASDAEFDAVVGYLEDIIMDDEFQLLQRNFMDKYYLEFEDTEENKLIYTPIFNEYISLVEKYIEEQLLQRIPELTQGRAANSGAELLIQ

SEQ ID NO: 758507 - protein, 434 aa, Homo sapiens
GLRHKTARGSQGRQRRTMRLILPVGLIATTLAIAPVRFDREKVFRVKPQDEKQADIIKDLAKTNELDFWYPGATHHVAANMMVDFRVSEKESQAIQSALDQNKMHYEILIHDLQEEIEKQFDVKEDIPGRHSYAKYNNWEKIVAWTEKMMDKYPEMVSRIKIGSTVEDNPLYVLKIGEKNERRKAIFMDCGIHAREWVSPAFCQWFVYQATKTYGRNKIMTKLLDRMNFYILPVFNVDGYIWSWTKNRMWRKNRSKNQNSKCIGTDLNRNFNASWNSIPNTNDPCADNYRGSAPESEKETKAVTNFIRSHLNEIKVYITFHSYSQMLLFPYGYTSKLPPNHEDLAKVAKIGTDVLSTRYETRYIYGPIESTIYPISGSSLDWAYDLGIKHTFAFELRDKGKFGFLLPESRIKPTCRETMLAVKFIAKYILKHTS

SEQ ID NO: 758508 - protein, 353 aa, Homo sapiens
GLRHKTARGSQGRQRRTMRLILPVGLIATTLAIAPVRFDREKVFRVKPQDEKQADIIKDLAKTNELDFWYPGATHHVAANMMVDFRVSEKESQAIQSALDQNKMHYEILIHDLQEEIEKQFDVKEDIPGRHSYAKYNNWEKIVAWTEKMMDKYPEMVSRIKIGSTVEDNPLYVLKIGEKNERRKAIFMDCGIHAREWVSPAFCQWFVYQATKTYGRNKIMTKLLDRMNFYILPVFNVDGYIWSWTKNRMWRKNRSKNQNSKCIGTDLNRNFNASWNSIPNTNDPCADNYRGSAPESEKETKAVTNFIRSHLNEIKVYITFHSYSQMLLFPYGYTSKLPPNHEDLSKFQIGLWS

SEQ ID NO: 758509 - protein, 434 aa, Homo sapiens; identical to SEQ ID NO: 758507

SEQ ID NO: 758510 - protein, 68 aa, Homo sapiens
YCLCFTDPISGSSLDWAYDLGIKHTFAFELRDKGKFGFLLPESRIKPTCRETMLAVKFIAKYILKHTS

SEQ ID NO: 758511 - protein, 2351 aa, Homo sapiens
MQIELSTCFFLCLLRFCFSATRRYYLGAVELSWDYMQSDLGELPVDARFPPRVPKSFPFNTSVVYKKTLFVEFTDHLFNIAKPRPPWMGLLGPTIQAEVYDTVVITLKNMASHPVSLHAVGVSYWKASEGAEYDDQTSQREKEDDKVFPGGSHTYVWQVLKENGPMASDPLCLTYSYLSHVDLVKDLNSGLIGALLVCREGSLAKEKTQTLHKFILLFAVFDEGKSWHSETKNSLMQDRDAASARAWPKMHTVNGYVNRSLPGLIGCHRKSVYWHVIGMGTTPEVHSIFLEGHTFLVRNHRQASLEISPITFLTAQTLLMDLGQFLLFCHISSHQHDGMEAYVKVDSCPEEPQLRMKNNEEAEDYDDDLTDSEMDVVRFDDDNSPSFIQIRSVAKKHPKTWVHYIAAEEEDWDYAPLVLAPDDRSYKSQYLNNGPQRIGRKYKKVRFMAYTDETFKTREAIQHESGILGPLLYGEVGDTLLIIFKNQASRPYNIYPHGITDVRPLYSRRLPKGVKHLKDFPILPGEIFKYKWTVTVEDGPTKSDPRCLTRYYSSFVNMERDLASGLIGPLLICYKESVDQRGNQIMSDKRNVILFSVFDENRSWYLTENIQRFLPNPAGVQLEDPEFQASNIMHSINGYVFDSLQLSVCLHEVAYWYILSIGAQTDFLSVFFSGYTFKHKMVYEDTLTLFPFSGETVFMSMENPGLWILGCHNSDFRNRGMTALLKVSSCDKNTGDYYEDSYEDISAYLLSKNNAIEPRSFSQNSRHPSTRQKQFNATTIPENDIEKTDPWFAHRTPMPKIQNVSSSDLLMLLRQSPTPHGLSLSDLQEAKYETFSDDPSPGAIDSNNSLSEMTHFRPQLHHSGDMVFTPESGLQLRLNEKLGTTAATELKKLDFKVSSTSNNLISTIPSDNLAAGTDNTSSLGPPSMPVHYDSQLDTTLFGKKSSPLTESGGPLSLSEENNDSKLLESGLMNSQESSWGKNVSSTESGRLFKGKRAHGPALLTKDNALFKVSISLLKTNKTSNNSATNRKTHIDGPSLLIENSPSVWQNILESDTEFKKVTPLIHDRMLMDKNATALRLNHMSNKTTSSKNMEMVQQKKEGPIPPDAQNPDMSFFKMLFLPESARWIQRTHGKNSLNSGQGPSPKQLVSLGPEKSVEGQNFLSEKNKVVVGKGEFTKDVGLKEMVFPSSRNLFLTNLDNLHENNTHNQEKKIQEEIEKKETLIQENVVLPQIHTVTGTKNFMKNLFLLSTRQNVEGSYDGAYAPVLQDFRSLNDSTNRTKKHTAHFSKKGEEENLEGLGNQTKQIVEKYACTTRISPNTSQQNFVTQRSKRALKQFRLPLEETELEKRIIVDDTSTQWSKNMKHLTPSTLTQIDYNEKEKGAITQSPLSDCLTRSHSIPQANRSPLPIAKVSSFPSIRPIYLTRVLFQDNSSHLPAASYRKKDSGVQESSHFLQGAKKNNLSLAILTLEMTGDQREVGSLGTSATNSVTYKKVENTVLPKPDLPKTSGKVELLPKVHIYQKDLFPTETSNGSPGHLDLVEGSLLQGTEGAIKWNEANRPGKVPFLRVATESSAKTPSKLLDPLAWDNHYGTQIPKEEWKSQEKSPEKTAFKKKDTILSLNACESNHAIAAINEGQNKPEIEVTWAKQGRTERLCSQNPPVLKRHQREITRTTLQSDQEEIDYDDTISVEMKKEDFDIYDEDENQSPRSFQKKTRHYFIAAVERLWDYGMSSSPHVLRNRAQSGSVPQFKKVVFQEFTDGSFTQPLYRGELNEHLGLLGPYIRAEVEDNIMVTFRNQASRPYSFYSSLISYEEDQRQGAEPRKNFVKPNETKTYFWKVQHHMAPTKDEFDCKAWAYFSDVDLEKDVHSGLIGPLLVCHTNTLNPAHGRQVTVQEFALFFTIFDETKSWYFTENMERNCRAPCNIQMEDPTFKENYRFHAINGYIMDTLPGLVMAQDQRIRWYLLSMGSNENIHSIHFSGHVFTVRKKEEYKMALYNLYPGVFETVEMLPSKAGIWRVECLIGEHLHAGMSTLFLVYSNKCQTPLGMASGHIRDFQITASGQYGQWAPKLARLHYSGSINAWSTKEPFSWIKVDLLAPMIIHGIKTQGARQKFSSLYISQFIIMYSLDGKKWQTYRGNSTGTLMVFFGNVDSSGIKHNIFNPPIIARYIRLHPTHYSIRSTLRMELMGCDLNSCSMPLGMESKAISDAQITASSYFTNMFATWSPSKARLHLQGRSNAWRPQVNNPKEWLQVDFQKTMKVTGVTTQGVKSLLTSMYVKEFLISSSQDGHQWTLFFQNGKVKVFQGNQDSFTPVVNSLDPPLLTRYLRIHPQSWVHQIALRMEVLGCEAQDLY

SEQ ID NO: 758512 - protein, 483 aa, Homo sapiens
MQIELSTCFFLCLLRFCFSATRRYYLGAVELSWDYMQSDLGELPVDARFPPRVPKSFPFNTSVVYKKTLFVEFTDHLFNIAKPRPPWMGLLGPTIQAEVYDTVVITLKNMASHPVSLHAVGVSYWKASEGAEYDDQTSQREKEDDKVFPGGSHTYVWQVLKENGPMASDPLCLTYSYLSHVDLVKDLNSGLIGALLVCREGSLAKEKTQTLHKFILLFAVFDEGKSWHSETKNSLMQDRDAASARAWPKMHTVNGYVNRSLPGLIGCHRKSVYWHVIGMGTTPEVHSIFLEGHTFLVRNHRQASLEISPITFLTAQTLLMDLGQFLLFCHISSHQHDGMEAYVKVDSCPEEPQLRMKNNEEAEDYDDDLTDSEMDVVRFDDDNSPSFIQIRSVAKKHPKTWVHYIAAEEEDWDYAPLVLAPDDRSYKSQYLNNGPQRIGRKYKKVRFMAYTDETFKTREAIQHESGILGPLLYGEVGDTLLVS

SEQ ID NO: 758513 - protein, 598 aa, Homo sapiens
MLEFTDGSFTQPLYRGELNEHLGLLGPYIRAEVEDNIMVTFRNQASRPYSFYSSLISYEEDQRQGAEPRKNFVKPNETKTYFWKVQHHMAPTKDEFDCKAWAYFSDVDLEKDVHSGLIGPLLVCHTNTLNPAHGRQVTVQEFALFFTIFDETKSWYFTENMERNCRAPCNIQMEDPTFKENYRFHAINGYIMDTLPGLVMAQDQRIRWYLLSMGSNENIHSIHFSGHVFTVRKKEEYKMALYNLYPGVFETVEMLPSKAGIWRVECLIGEHLHAGMSTLFLVYSNKCQTPLGMASGHIRDFQITASGQYGQWAPKLARLHYSGSINAWSTKEPFSWIKVDLLAPMIIHGIKTQGARQKFSSLYISQFIIMYSLDGKKWQTYRGNSTGTLMVFFGNVDSSGIKHNIFNPPIIARYIRLHPTHYSIRSTLRMELMGCDLNSCSMPLGMESKAISDAQITASSYFTNMFATWSPSKARLHLQGRSNAWRPQVNNPKEWLQVDFQKTMKVTGVTTQGVKSLLTSMYVKEFLISSSQDGHQWTLFFQNGKVKVFQGNQDSFTPVVNSLDPPLLTRYLRIHPQSWVHQIALRMEVLGCEAQDLY

SEQ ID NO: 758514 - protein, 195 aa, Homo sapiens
PQAPPALPSPPDPGAMWPLALVIASLTLALSGGVSQESSKVLNTNGTSGFLPGGYTCFPHSQPWQAALLVQGRLLCGGVLVHPKWVLTAAHCLKEGLKVYLGKHALGRVEAGEQVREVVHSIPHPEYRRSPTHLNHDHDIMLLELQSPVQLTGYIQTLPLSHNNRLTPGTTCRVSGWGTTTSPQGMHPHRWPEAP

SEQ ID NO: 758515 - protein, 292 aa, Homo sapiens
PQAPPALPSPPDPGAMWPLALVIASLTLALSGGVSQESSKVLNTNGTSGFLPGGYTCFPHSQPWQAALLVQGRLLCGGVLVHPKWVLTAAHCLKEGLKVYLGKHALGRVEAGEQVREVVHSIPHPEYRRSPTHLNHDHDIMLLELQSPVQLTGYIQTLPLSHNNRLTPGTTCRVSGWGTTTSPQVNYPKTLQCANIQLRSDEECRQVYPGKITDNMLCAGTKEGGKDSCEGDSGGPLVCNRTLYGIVSWGDFPCGQPDRPGVYTRVSRYVLWIRETIRKYETQQQKWLKGPQ

SEQ ID NO: 758516 - protein, 292 aa, Homo sapiens; identical to SEQ ID NO: 758515

SEQ ID NO: 758517 - protein, 292 aa, Homo sapiens; identical to SEQ ID NO: 758515

SEQ ID NO: 758518 - protein, 81 aa, Homo sapiens
MRSDGPGDRVEKGQGLGGRLPWRKEGPTEAGPCLAAGTGQEQRWGLQSPADWGHTCCPDPAQDRCHPVLMTTSALLRAPAT

SEQ ID NO: 758519 - protein, 37 aa, Homo sapiens [sequence omitted]

SEQ ID NO: 758520 - protein, 422 aa, Homo sapiens
MDGMLLNGLNVFVGRFRSPKEQEAELGARAKESKVGPASSVKVITDEGGKSKGFGFVSFERHEDPQTAMDVNGKEFSGNQTYICLAPKKVEEQTELKCKFEQMKQDRITRYQGANVCVKNLDESIDDERLQKEFSPFGIINSANVMMEGGCSKRFGFVCFSSPEEVAKAVTAMNGKIVASKPLHVALAQCKEQRLAHFTNQYMQKMASVRAVPHPVINPYQPAPSTCYFVAAIPQTQNRAAYYPPGQIAQLRPSPPWAVQSVRPYPFQISPVLSAQLLVTTTLRPASSQVPPVMSTQYVANSSIQTISPCPVAAAAGSTPAVYIIPQYKYASGILIPQQHLKAHPQVTRKQLAVHVQGQKLLTASMLASAPLQQQKQILGERLFPLIQATHPTLAGKITGMLLELDNLKLLHMLVSPESLKL

SEQ ID NO: 758521 - protein, 255 aa, Homo sapiens
MHQKIAREMNLSETAFIRKLHPTDNFAQSSCFGLRWFTPASEVPLCGHATLASAAVLFHKIKNMNSTLTFVTLSGELRARRAEDGIVLDLPLYPAHPQDFHEVEDLIKTAIGNTLVQDICYSPDTQKLLVRLSDVYNRSFLENLKVNTENLLQVENTGKVKGLILTLKGEPGGQTQAFDFYSRYFAPWVGVAEDPVTGSAHAVLSSYWSQHLGKKEMHAFQCSHRGGELGISLRPDGRVDIRGGAAVVLEGTLTA

SEQ ID NO: 758522 - protein, 288 aa, Homo sapiens
MKLPIFIADAFTARAFRGNPAAVCLLENELDEDMHQKIAREMNLSETAFIRKLHPTDNFAQSSCFGLRWFTPASEVPLCGHATLASAAVLFHKIKNMNSTLTFVTLSGELRARRAEDGIVLDLPLYPAHPQDFHEVEDLIKTAIGNTLVQDICYSPDTQKLLVRLSDVYNRSFLENLKVNTENLLQVENTGKVKGLILTLKGEPGGQTQAFDFYSRYFAPWVGVAEDPVTGSAHAVLSSYWSQHLGKKEMHAFQCSHRGGELGISLRPDGRVDIRGGAAVVLEGTLTA

SEQ ID NO: 758523 - protein, 288 aa, Homo sapiens; identical to SEQ ID NO: 758522

SEQ ID NO: 758524 - protein, 288 aa, Homo sapiens; identical to SEQ ID NO: 758522

SEQ ID NO: 758525 - protein, 288 aa, Homo sapiens; identical to SEQ ID NO: 758522

SEQ ID NO: 758526 - protein, 288 aa, Homo sapiens; identical to SEQ ID NO: 758522

SEQ ID NO: 758527 - protein, 288 aa, Homo sapiens; identical to SEQ ID NO: 758522

SEQ ID NO: 758528 - protein, 249 aa, Homo sapiens
MKLPIFIADAFTARAFRGNPAAVCLLENELDEDMHQKIAREMNLSETAFIRKLHPTDNFAQSSCFGLRWFTPASEVPLCGHATLASAAVLFHKIKNMNSTLTFVTLSGELRARRAEDGIVLDLPLYPAHPQDFHEVEDLIKTAIGNTLVQDICYSPDTQKLLVRLSDVYNRSFLENLKVNTENLLQVENTGKVKGLILTLKGEPGGQTQAFDFYSRYFAPWVGVAEDPVTGTKTKNQDESRKLTQKSMY

SEQ ID NO: 758529 - protein, 280 aa, Homo sapiens
MKLPIFIADAFTARAFRGNPAAVCLLENELDEDMHQKIAREMNLSETAFIRKLHPTDNFAQSSCFGLRWFTPASEVPLCGHATLASAAVLFHKIKNMNSTLTFVTLSGELRARRAEDGIVLDLPLYPAHPQDFHEVEDLIKTAIGNTLVQDICYSPDTQKLLVRLSDVYNRSFLENLKVNTENLLQVENTGKVKGLILTLKGEPGGQTQAFDFYSRYFAPWVGVAEDPVTGSAHAVLSSYWSQHLGKKEMHGRTALYQFLFYLPNSKLVFLLICTIPLKM

SEQ ID NO: 758530 - protein, 240 aa, Homo sapiens
MKLPIFIADAFTARAFRGNPAAVCLLENELDEDMHQKIAREMNLSETAFIRKLHPTDNFAQSSCFGLRWFTPASEVPLCGHATLASAAVLFHKIKNMNSTLTFVTLSGELRARRAEDGIVLDLPLYPAHPQDFHEVEDLIKTAIGNTLVQDICYSPDTQKLLVRLSDVYNRSFLENLKVNTENLLQVENTGKVKGLILTLKGEPGGQTQAFDFYSRYFAPWVGVAEDPVTGTFYLSPGEG

SEQ ID NO: 758531 - protein, 105 aa, Homo sapiens
MKLPIFIADAFTARAFRGNPAAVCLLENELDEDMHQKIAREMNLSETAFIRKLHPTDNFAQSSCFGLRWFTPASEVPLCGHATLASAAVLFHKISNVIFFNESNT

SEQ ID NO: 758532 - protein, 159 aa, Homo sapiens
RGAPATLHAGGTRRLMKELQDIARLSSRFISVELVDESLFDWNVKLHQVDKDSVLWQDMKETNTEFILLNLTFPDNFPFSPPFMRVLSPRLENGYVLDGGASAWSCSRRAAGPAPTPWRPSCASSQPAWSRARDGSVEKLANQKSPSVARKLKLPLRVW

SEQ ID NO: 758533 - protein, 98 aa, Homo sapiens
YLSLITGNEDISHLQIAHPIRKLGQRSLSLQKRSSSNPLGKVSKVWESRCEVKQCGRGANSANAGHGQLATSSLPEEGLSKLHTNPGSLSPNIVLCHL

SEQ ID NO: 758534 - protein, 128 aa, Homo sapiens
ERLLKMTLEERRKEYLRDYIPLNSILSWKEEMKGKGQNDEENTQETSQVKKSLTEKVSLYRGDITLLEVDAIVNAANASLLGGGGVDGCIHRAAGPCLLAECRNLNGCDTGHAKITCGYDLPAKCEYN

SEQ ID NO: 758535 - protein, 137 aa, Homo sapiens
ERLLKMTLEERRKEYLRDYIPLNSILSWKEEMKGKGQNDEENTQETSQVKKSLTEKVSLYRGDITLLEVDAIVNAANASLLGGGGVDGCIHRAAGPCLLAECRNLNGCDTGHAKITCGYDLPAKCPMSLPLKFGQNL

SEQ ID NO: 758536 - protein, 166 aa, Homo sapiens
ERLLKMTLEERRKEYLRDYIPLNSILSWKEEMKGKGQNDEENTQETSQVKKSLTEKVSLYRGDITLLEVDAIVNAANASLLGGGGVDGCIHRAAGPCLLAECRNLNGCDTGHAKITCGYDLPAKSNLDARKLLKLNLLLHLKRSITSITPPKNLPKIKHAVVSPGA

SEQ ID NO: 758537 - protein, 165 aa, Homo sapiens
  misc_feature (6)..(6): Xaa can be any naturally occurring amino acid
  misc_feature (158)..(158): Xaa can be any naturally occurring amino acid
  misc_feature (163)..(163): Xaa can be any naturally occurring amino acid
GGAWWXAGCAVVGDGGASAPRPSWAAGHPRWPDANSDIDLSNLERLEKYRSFDRYRRRAEQEARPRTGGGPTESISGRRQIPKRRLILGCLHPKSPGPNSYWNGNRPSRSFGPMWKRSGLPASAQPVFPLDAVRAEWERTFGPYHKQLLLSIYGFNEXFSTVXNF

SEQ ID NO: 758538 - protein, 254 aa, Homo sapiens
VSSSARPSGSGQEVGGQTAVKNQAKVECHTEAQSQVKIRNHTEARGHTASTAPSTRRQETSREYLCPPRVLPSSRDSPSSPTFISIQSATRKPLETPSFKGNPDVSVKSTQLAQDIGQALLHQKGVQDKTGKKDITQCSVQPEPAPPSASPLPRGWQKSVLELQTGPGSSQHYGAMRTVTEQYEEVDQFGNTVLMSSTTVTEQAEPPRNPGSHLGLHASPLLRQFLHSPAGFSSDLTEAETVQVSCSYSQPAAQ

SEQ ID NO: 758539 - protein, 254 aa, Homo sapiens; identical to SEQ ID NO: 758538

SEQ ID NO: 758540 - protein, 335 aa, Homo sapiens
MGCLLFLLLWALLQAWGSAEVPQRLFPLRCLQISSFANSSWTRTDGLAWLGELQTHSWSNDSDTVRSLKPWSQGTFSDQQWETLQHIFRVYRSSFTRDVKEFAKMLRLSYPLELQVSAGCEVHPGNASNNFFHVAFQGKDILSFQGTSWEPTQEAPLWVNLAIQVLNQDKWTRETVQWLLNGTCPQFVSGLLESGKSELKKQVKPKAWLSRGPSPGPGRLLLVCHVSGFYPKPVWVKWMRGEQEQQGTQPGDILPNADETWYLRATLDVVAGEAAGLSCRVKHSSLEGQDIVLYWGGSYTSMGLIALAVLACLLFLLIVGFTSRFKRQTSYQGVL

SEQ ID NO: 758541 - protein, 335 aa, Homo sapiens; identical to SEQ ID NO: 758540

SEQ ID NO: 758542 - protein, 335 aa, Homo sapiens; identical to SEQ ID NO: 758540

SEQ ID NO: 758543 - protein, 335 aa, Homo sapiens; identical to SEQ ID NO: 758540

SEQ ID NO: 758544 - protein, 105 aa, Homo sapiens
PGAISAHCDLCLRVVGLQLCTTQSAPRPPCQACARISVTLQMRKLSLWEADKVPDTGQGRAHPHGLCCSLCLVGHGTPSTRSPSRMRRRVPGALGMSLAEKAAQG

SEQ ID NO: 758545 - protein, 42 aa, Homo sapiens
FYPRGQHGAVEQCEPVKDLAVRTTFLGTPFPVLLAHFPSPIP

SEQ ID NO: 758546 - protein, 124 aa, Homo sapiens
RAAGIRHEDWWTDSSAEKKHVWFGESMDGGFQFSYGNPELPEDVLDVQLAFLRLLSSRASQNITYHCKNSIAYMDQASGNVKKALKLMGSNEGEFKAEGNSKFTYTVLEDGCTKHTGEMEQNSL

SEQ ID NO: 758547 - protein, 78 aa, Homo sapiens
METGETCISANPLNVPRKHWWTDSSAEKKHVWFGESMDGGFQFSYGNPELPEDVLDVQLAFLRLLSSRASRQNGVPTL

SEQ ID NO: 758548 - protein, 75 aa, Homo sapiens
MLSHFRVKVKGFILISKYFDPYDLVSSYPKYGPHTSRTGILWELVRNVESLVLRFSKSESAFSSALLAIHMFEKD

SEQ ID NO: 758549 - protein, 108 aa, Homo sapiens
  misc_feature (65)..(65): Xaa can be any naturally occurring amino acid
  misc_feature (91)..(91): Xaa can be any naturally occurring amino acid
  misc_feature (99)..(99): Xaa can be any naturally occurring amino acid
ITLEPFGGKGDAGAPGERGPPGLAGAPGLRGGAGPPGPEGGKVLLVLQEKMENLGNQVQRVMPVXLELQEARVMLVPLVNVDLLDWQGPQXLEVELVPXGPERLQGFG

SEQ ID NO: 758550 - protein, 1429 aa, Homo sapiens
MMSFVQKGSWLLLALLHPTIILAQQEAVEGGCSHLGQSYADRDVWKPEPCQICVCDSGSVLCDDIICDDQELDCPNPEIPFGECCAVCPQPPTAPTRPPNGQGPQGPKGDPGPPGIPGRNGDPGIPGQPGSPGSPGPPGICESCPTGPQNYSPQYDSYDVKSGVAVGGLAGYPGPAGPPGPPGPPGTSGHPGSPGSPGYQGPPGEPGQAGPSGPPGPPGAIGPSGPAGKDGESGRPGRPGERGLPGPPGIKGPAGIPGFPGMKGHRGFDGRNGEKGETGAPGLKGENGLPGENGAPGPMGPRGAPGERGRPGLPGAAGARGNDGARGSDGQPGPPGPPGTAGFPGSPGAKGEVGPAGSPGSNGAPGQRGEPGPQGHAGAQGPPGPPGINGSPGGKGEMGPAGIPGAPGLMGARGPPGPAGANGAPGLRGGAGEPGKNGAKGEPGPRGERGEAGIPGVPGAKGEDGKDGSPGEPGANGLPGAAGERGAPGFRGPAGPNGIPGEKGPAGERGAPGPAGPRGAAGEPGRDGVPGGPGMRGMPGSPGGPGSDGKPGPPGSQGESGRPGPPGPSGPRGQPGVMGFPGPKGNDGAPGKNGERGGPGGPGPQGPPGKNGETGPQGPPGPTGPGGDKGDTGPPGPQGLQGLPGTGGPPGENGKPGEPGPKGDAGAPGAPGGKGDAGAPGERGPPGLAGAPGLRGGAGPPGPEGGKGAAGPPGPPGAAGTPGLQGMPGERGGLGSPGPKGDKGEPGGPGADGVPGKDGPRGPTGPIGPPGPAGQPGDKGEGGAPGLPGIAGPRGSPGERGETGPPGPAGFPGAPGQNGEPGGKGERGAPGEKGEGGPPGVAGPPGGSGPAGPPGPQGVKGERGSPGGPGAAGFPGARGLPGPPGSNGNPGPPGPSGSPGKDGPPGPAGNTGAPGSPGVSGPKGDAGQPGEKGSPGAQGPPGAPGPLGIAGITGARGLAGPPGMPGPRGSPGPQGVKGESGKPGANGLSGERGPPGPQGLPGLAGTAGEPGRDGNPGSDGLPGRDGSPGGKGDRGENGSPGAPGAPGHPGPPGPVGPAGKSGDRGESGPAGPAGAPGPAGSRGAPGPQGPRGDKGETGERGAAGIKGHRGFPGNPGAPGSPGPAGQQGAIGSPGPAGPRGPVGPSGPPGKDGTSGHPGPIGPPGPRGNRGERGSEGSPGHPGQPGPPGPPGAPGPCCGGVGAAAIAGIGGEKAGGFAPYYGDEPMDFKINTDEIMTSLKSVNGQIESLISPDGSRKNPARNCRDLKFCHPELKSGEYWVDPNQGCKLDAIKVFCNMETGETCISANPLNVPRKHWWTDSSAEKKHVWFGESMDGGFQFSYGNPELPEDVLDVQLAFLRLLSSRASQNITYHCKNSIAYMDQASGNVKKALKLMGSNEGEFKAEGNSKFTYTVLEDGCTKHTGEMEQNSL

SEQ ID NO: 758551 - protein, 1381 aa, Homo sapiens
MMSFVQKGSWLLLALLHPTIILAQQEAVEGGCSHLGQSYADRDVWKPEPCQICVCDSGSVLCDDIICDDQELDCPNPEIPFGECCAVCPQPPTAPTRPPNGQGPQGPKGDPGPPGIPGRNGDPGIPGQPGSPGSPGPPGICESCPTGPQNYSPQYDSYDVKSGVAVGGLAGYPGPAGPPGPPGPPGTSGHPGSPGSPGYQGPPGEPGQAGPSGPPGPPGAIGPSGPAGKDGESGRPGRPGERGLPGPPGIKGPAGIPGFPGMKGHRGFDGRNGEKGETGAPGLKGENGLPGENGAPGPMGPRGAPGERGRPGLPGAAGARGNDGARGSDGQPGPPGPPGTAGFPGSPGAKGEVGPAGSPGSNGAPGQRGEPGPQGHAGAQGPPGPPGINGSPGGKGEMGPAGIPGAPGLMGARGPPGPAGANGAPGLRGGAGEPGKNGAKGEPGPRGERGEAGIPGVPGAKGEDGKDGSPGEPGANGLPGAAGERGAPGFRGPAGPNGIPGEKGPAGERGAPGPAGPRGAAGEPGRDGVPGGPGMRGMPGSPGGPGSDGKPGPPGSQGESGRPGPPGPSGPRGQPGVMGFPGPKGNDGAPGKNGERGGPGGPGPQGPPGKNGETGPQGPPGPTGPGGDKGDTGPPGPQGLQGLPGTGGPPGENGKPGEPGAAGPPGPPGAAGTPGLQGMPGERGGLGSPGPKGDKGEPGGPGADGVPGKDGPRGPTGPIGPPGPAGQPGDKGEGGAPGLPGIAGPRGSPGERGETGPPGPAGFPGAPGQNGEPGGKGERGAPGEKGEGGPPGVAGPPGGSGPAGPPGPQGVKGERGSPGGPGAAGFPGARGLPGPPGSNGNPGPPGPSGSPGKDGPPGPAGNTGAPGSPGVSGPKGDAGQPGEKGSPGAQGPPGAPGPLGIAGITGARGLAGPPGMPGPRGSPGPQGVKGESGKPGANGLSGERGPPGPQGLPGLAGTAGEPGRDGNPGSDGLPGRDGSPGGKGDRGENGSPGAPGAPGHPGPPGPVGPAGKSGDRGESGPAGPAGAPGPAGSRGAPGPQGPRGDKGETGERGAAGIKGHRGFPGNPGAPGSPGPAGQQGAIGSPGPAGPRGPVGPSGPPGKDGTSGHPGPIGPPGPRGNRGERGSEGSPGHPGQPGPPGPPGAPGPCCGGVGAAAIAGIGGEKAGGFAPYYGDEPMDFKINTDEIMTSLKSVNGQIESLISPDGSRKNPARNCRDLKFCHPELKSGEYWVDPNQGCKLDAIKVFCNMETGETCISANPLNVPRKHWWTDSSAEKKHVWFGESMDGGFQFSYGNPELPEDVLDVQLAFLRLLSSRASQNITYHCKNSIAYMDQASGNVKKALKLMGSNEGEFKAEGNSKFTYTVLEDGCTKHTGEMEQNSL

SEQ ID NO: 758552 - protein, 861 aa, Homo sapiens
MMSFVQKGSWLLLALLHPTIILAQQEAVEGGCSHLGQSYADRDVWKPEPCQICVCDSGSVLCDDIICDDQELDCPNPEIPFGECCAVCPQPPTAPTRPPNGQGPQGPKGDPGPPGIPGRNGDPGIPGQPGSPGSPGPPGICESCPTGPQNYSPQYDSYDVKSGVAVGGLAGYPGPAGPPGPPGPPGTSGHPGSPGSPGYQGPPGEPGQAGPSGPPGPPGAIGPSGPAGKDGESGRPGRPGERGLPGPPGIKGPAGIPGFPGMKGHRGFDGRNGEKGETGAPGLKGENGLPGENGAPGPMGPRGAPGERGRPGLPGAAGARGNDGARGSDGQPGPPGPPGTAGFPGSPGAKGEVGPAGSPGSNGAPGQRGEPGPQGHAGAQGPPGPPGINGSPGGKGEMGPAGIPGAPGLMGARGPPGPAGANGAPGLRGGAGEPGKNGAKGEPGPRGERGEAGIPGVPGAKGEDGKDGSPGEPGANGLPGAAGERGAPGFRGPAGPNGIPGEKGPAGERGAPGPAGPRGAAGEPGRDGVPGGPGMRGMPGSPGGPGSDGKPGPPGSQGESGRPGPPGPSGPRGQPGVMGFPGPKGNDGAPGKNGERGGPGGPGPQGPPGKNGETGPQGPPGPTGPGGDKGDTGPPGPQGLQGLPGTGGPPGENGKPGEPGPKGDAGAPGAPGGKGDAGAPGERGPPGLAGAPGLRGGAGPPGPEGGKGAAGPPGPPGAAGTPGLQGMPGERGGLGSPGPKGDKGEPGGPGADGVPGKDGPRGPTGPIGPPGPAGQPGDKGEGGAPGLPGIAGPRGSPGERGETGPPGPAGFPGAPLLVPLVLAVVVLEPLPLLGLEVKKLAVLPRIMEMNQWISKSTPMRL

SEQ ID NO: 758553 - protein, 134 aa, Homo sapiens
METGETCISANPLNVPRKHWWTDSSAEKKHVWFGESMDGGFQFSYGNPELPEDVLDVQLAFLRLLSSRASQNITYHCKNSIAYMDQASGNVKKALKLMGSNEGEFKAEGNSKFTYTVLEDGCTKHTGEMEQNSL

SEQ ID NO: 758554 - protein, 1346 aa, Homo sapiens
MMSFVQKGSWLLLALLHPTIILAQQEAVEGGCSHLGQSYADRDVWKPEPCQICVCDSGSVLCDDIICDDQELDCPNPEIPFGECCAVCPQPPTAPTRPPNGQGPQGPKGDPGPPGIPGRNGDPGIPGQPGSPGSPGPPGICESCPTGPQNYSPQYDSYDVKSGVAVGGLAGYPGPAGPPGPPGPPGTSGHPGSPGSPGYQGPPGEPGQAGPSGPPGPPGAIGPSGPAGKDGESGRPGRPGERGLPGPPGIKGPAGIPGFPGMKGHRGFDGRNGEKGETGAPGLKGENGLPGENGAPGPMGPRGAPGERGRPGLPGAAGARGNDGARGSDGQPGPPGPPGTAGFPGSPGAKGEVGPAGSPGSNGAPGQRGEPGPQGHAGAQGPPGPPGINGSPGGKGEMGPAGIPGAPGLMGARGPPGPAGANGAPGLRGGAGEPGKNGAKGEPGPRGERGEAGIPGVPGAKGEDGKDGSPGEPGANGLPGAAGERGAPGFRGPAGPNGIPGEKGPAGERGAPGPAGPRGAAGEPGRDGVPGGPGMRGMPGSPGGPGSDGKPGPPGSQGESGRPGPPGPSGPRGQPGVMGFPGPKGNDGAPGKNGERGGPGGPGPQGPPGKNGETGPQGPPGPTGPGGDKGDTGPPGPQGLQGLPGTGGPPGENGKPGEPGPKGDAGAPGAPGGKGDAGAPGERGPPGLAGAPGLRGGAGPPGPEGGKGAAGPPGPPGAAGTPGLQGMPGERGGLGSPGPKGDKGEPGGPGADGVPGKDGPRGPTGPIGPPGPAGQPGDKGEGGAPGLPGIAGPRGSPGERGETGPPGPAGFPGAPGQNGEPGGKGERGAPGEKGEGGPPGVAGPPGGSGPAGPPGPQGVKGERGSPGGPGAAGFPGARGLPGPPGSNGNPGPPGPSGSPGKDGPPGPAGNTGAPGSPGVSGPKGDAGQPGEKGSPGAQGPPGAPGPLGIAGITGARGLAGPPGMPGPRGSPGPQGVKGESGKPGANGLSGERGPPGPQGLPGLAGTAGEPGRDGNPGSDGLPGRDGSPGGKGDRGENGSPGAPGAPGHPGPPGPVGPAGKSGDRGESGPAGPAGAPGPAGSRGAPGPQGPRGDKGETGERGAAGIKGHRGFPGNPGAPGSPGPAGQQGAIGSPGPAGPRGPVGPSGPPGKDGTSGHPGPIGPPGPRGNRGERGSEGSPGHPGQPGPPGPPGAPGPCCGGVGAAAIAGIGGEKAGGFAPYYGDEPMDFKINTDEIMTSLKSVNGQIESLISPDGSRKNPARNCRDLKFCHPELKSGEYWVDPNQGCKLDAIKVFCNMETGETCISANPLNVPRKHWWTDSSAEKKHVWFGESMDGGFQVGKDIPFFK

SEQ ID NO: 758555 - protein, 1429 aa, Homo sapiens; identical to SEQ ID NO: 758550

SEQ ID NO: 758556 - protein, 1429 aa, Homo sapiens; identical to SEQ ID NO: 758550

SEQ ID NO: 758557 - protein, 121 aa, Homo sapiens
MNREHVVAANECSEEDTFGLGESMEWWSQFSYGNPELPEDVLDVQLAFLRLLSSRASQNITYHCKNSIAYMDQASGNVKKALKLMGSNEGEFKAEGNSKFTYTVLEDGCTKHTGEMEQNSL

SEQ ID NO: 758558 - protein, 109 aa, Homo sapiens
ELGTLRIPHYVMDGAFQFSYGNPELPEDVLDVQLAFLRLLSSRASQNITYHCKNSIAYMDQASGNVKKALKLMGSNEGEFKAEGNSKFTYTVLEDGCTKHTGEMEQNSL

SEQ ID NO: 758559 - protein, 1428 aa, Homo sapiens
MMSFVQKGSWLLLALLHPTIILAQQEAVEGGCSHLGQSYADRDVWKPEPCQICVCDSGSVLCDDIICDDQELDCPNPEIPFGECCAVCPQPPTAPTRPPNGQGPQGPKGDPGPPGIPGRNGDPGIPGQPGSPGSPGPPGICESCPTGPQNYSPQYDSYDVKSGVAVGGLAGYPGPAGPPGPPGPPGTSGHPGSPGSPGYQGPPGEPGQAGPSGPPGPPGAIGPSGPAGKDGESGRPGRPGERGLPGPPGIKGPAGIPGFPGMKGHRGFDGRNGEKGETGAPGLKGENGLPGENGAPGPMGPRGAPGERGRPGLPGAAGARGNDGARGSDGQPGPPGPPGTAGFPGSPGAKGEVGPAGSPGSNGAPGQRGEPGPQGHAGAQGPPGPPGINGSPGGKGEMGPAGIPGAPGLMGARGPPGPAGANGAPGLRGGAGEPGKNGAKGEPGPRGERGEAGIPGVPGAKGEDGKDGSPGEPGANGLPGAAGERGAPGFRGPAGPNGIPGEKGPAGERGAPGPAGPRGAAGEPGRDGVPGGPGMRGMPGSPGGPGSDGKPGPPGSQGESGRPGPPGPSGPRGQPGVMGFPGPKGNDGAPGKNGERGGPGGPGPQGPPGKNGETGPQGPPGPTGPGGDKGDTGPPGPQGLQGLPGTGGPPGENGKPGEPGPKGDAGAPGAPGGKGDAGAPGERGPPGLAGAPGLRGGAGPPGPEGGKGAAGPPGPPGAAGTPGLQGMPGERGGLGSPGPKGDKGEPGGPGADGVPGKDGPRGPTGPIGPPGPAGQPGDKGEGGAPGLPGIAGPRGSPGERGETGPPGPAGFPGAPGQNGEPGGKGERGAPGEKGEGGPPGVAGPPGGSGPAGPPGPQGVKGERGSPGGPGAAGFPGARGLPGPPGSNGNPGPPGPSGSPGKDGPPGPAGNTGAPGSPGVSGPKGDAGQPGEKGSPGAQGPPGAPGPLGIAGITGARGLAGPPGMPGPRGSPGPQGVKGESGKPGANGLSGERGPPGPQGLPGLAGTAGEPGRDGNPGSDGLPGRDGSPGGKGDRGENGSPGAPGAPGHPGPPGPVGPAGKSGDRGESGPAGPAGAPGPAGSRGAPGPQGPRGDKGETGERGAAGIKGHRGFPGNPGAPGSPGPAGQQGAIGSPGPAGPRGPVGPSGPPGKDGTSGHPGPIGPPGPRGNRGERGSEGSPGHPGQPGPPGPPGAPGPCCGGVGAAAIAGIGGEKAGGFAPYYGDEPMDFKINTDEIMTSLKSVNGQIESLISPDGSRKNPARNCRDLKFCHPELKSGEYWVDPNQGCKLDAIKVFCNMETGETCISANPLNVPRKHWWTDSSAEKKHVWFGESMDGGFQFSYGNPELPEDVLDVQLAFLRLLSSRASQNITYHCKNSIAYMDQASGNVKKALKLMGSNEGEFKAEGNSKFTYTVLEDGCTGRKHFSQYRS

SEQ ID NO: 758560 - protein, 1429 aa, Homo sapiens; identical to SEQ ID NO: 758550

SEQ ID NO: 758561 - protein, 1429 aa, Homo sapiens; identical to SEQ ID NO: 758550

SEQ ID NO: 758562 - protein, 1428 aa, Homo sapiens; identical to SEQ ID NO: 758559

SEQ ID NO: 758563 - protein, 1429 aa, Homo sapiens; identical to SEQ ID NO: 758550

SEQ ID NO: 758564 - protein, 1429 aa, Homo sapiens; identical to SEQ ID NO: 758550

SEQ ID NO: 758565 - protein, 1429 aa, Homo sapiens; identical to SEQ ID NO: 758550

SEQ ID NO: 758566 - protein, 1470 aa, Homo sapiens
MMSFVQKGSWLLLALLHPTIILAQQEAVEGGCSHLGQSYADRDVWKPEPCQICVCDSGSVLCDDIICDDQELDCPNPEIPFGECCAVCPQPPTAPTRPPNGQGPQGPKGDPGPPGIPGRNGDPGIPGQPGSPGSPGPPGICESCPTGPQNYSPQYDSYDVKSGVAVGGLAGYPGPAGPPGPPGPPGTSGHPGSPGSPGYQGPPGEPGQAGPSGPPGPPGAIGPSGPAGKDGESGRPGRPGERGLPGPPGIKGPAGIPGFPGMKGHRGFDGRNGEKGETGAPGLKGENGLPGENGAPGPMGPRGAPGERGRPGLPGAAGARGNDGARGSDGQPGPPGPPGTAGFPGSPGAKGEVGPAGSPGSNGAPGQRGEPGPQGHAGAQGPPGPPGINGSPGGKGEMGPAGIPGAPGLMGARGPPGPAGANGAPGLRGGAGEPGKNGAKGEPGPRGERGEAGIPGVPGAKGEDGKDGSPGEPGANGLPGAAGERGAPGFRGPAGPNGIPGEKGPAGERGAPGPAGPRGAAGEPGRDGVPGGPGMRGMPGSPGGPGSDGKPGPPGSQGESGRPGPPGPSGPRGQPGVMGFPGPKGNDGAPGKNGERGGPGGPGPQGPPGKNGETGPQGPPGPTGPGGDKGDTGPPGPQGLQGLPGTGGPPGENGKPGEPGPKGDAGAPGAPGGKGDAGAPGERGPPGLAGAPGLRGGAGPPGPEGGKGAAGPPGPPGAAGTPGLQGMPGERGGLGSPGPKGDKGEPGGPGADGVPGKDGPRGPTGPIGPPGPAGQPGDKGEGGAPGLPGIAGPRGSPGERGETGPPGPAGFPGAPGQNGEPGGKGERGAPGEKGEGGPPGVAGPPGGSGPAGPPGPQGVKGERGSPGGPGAAGFPGARGLPGPPGSNGNPGPPGPSGSPGKDGPPGPAGNTGAPGSPGVSGPKGDAGQPGEKGSPGAQGPPGAPGPLGIAGITGARGLAGPPGMPGPRGSPGPQGVKGESGKPGANGLSGERGPPGPQGLPGLAGTAGEPGRDGNPGSDGLPGRDGSPGGKGDRGENGSPGAPGAPGHPGPPGPVGPAGKSGDRGESGPAGPAGAPGPAGSRGAPGPQGPRGDKGETGERGAAGIKGHRGFPGNPGAPGSPGPAGQQGAIGSPGPAGPRGPVGPSGPPGKDGTSGHPGPIGPPGPRGNRGERGSEGSPGHPGQPGPPGPPGAPGPCCGGVGAAAIAGIGGEKAGGFAPYYGDEPMDFKINTDEIMTSLKSVNGQIESLISPDGSRKNPARNCRDLKFCHPELKSGEYWVDPNQGCKLDAIKVFCNMETGETCISANPLNVPRKHWWTDSSAEKKHVWFGESMDGGFQFSYGNPELPEDVLDVQLAFLRLLSSRASQNITYHCKNSIAYMDQASGNVKKALKLMGSNEGEFKAEGNSKFTYTVLEDGCTKHWWTDSSAEKKHVWFGESMDGGFQFSYGNPELPEDVLDVQLAFLRLLSSRA

SEQ ID NO: 758567 - protein, 1427 aa, Homo sapiens
MMSFVQKGSWLLLALLHPTIILAQQEAVEGGCSHLGQSYADRDVWKPEPCQICVCDSGSVLCDDIICDDQELDCPNPEIPFGECCAVCPQPPTAPTRPPNGQGPQGPKGDPGPPGIPGRNGDPGIPGQPGSPGSPGPPGICESCPTGPQNYSPQYDSYDVKSGVAVGGLAGYPGPAGPPGPPGPPGTSGHPGSPGSPGYQGPPGEPGQAGPSGPPGPPGAIGPSGPAGKDGESGRPGRPGERGLPGPPGIKGPAGIPGFPGMKGHRGFDGRNGEKGETGAPGLKGENGLPGENGAPGPMGPRGAPGERGRPGLPGAAGARGNDGARGSDGQPGPPGPPGTAGFPGSPGAKGEVGPAGSPGSNGAPGQRGEPGPQGHAGAQGPPGPPGINGSPGGKGEMGPAGIPGAPGLMGARGPPGPAGANGAPGLRGGAGEPGKNGAKGEPGPRGERGEAGIPGVPGAKGEDGKDGSPGEPGANGLPGAAGERGAPGFRGPAGPNGIPGEKGPAGERGAPGPAGPRGAAGEPGRDGVPGGPGMRGMPGSPGGPGSDGKPGPPGSQGESGRPGPPGPSGPRGQPGVMGFPGPKGNDGAPGKNGERGGPGGPGPQGPPGKNGETGPQGPPGPTGPGGDKGDTGPPGPQGLQGLPGTGGPPGENGKPGEPGPKGDAGAPGAPGGKGDAGAPGERGPPGLAGAPGLRGGAGPPGPEGGKGAAGPPGPPGAAGTPGLQGMPGERGGLGSPGPKGDKGEPGGPGADGVPGKDGPRGPTGPIGPPGPAGQPGDKGEGGAPGLPGIAGPRGSPGERGETGPPGPAGFPGAPGQNGEPGGKGERGAPGEKGEGGPPGVAGPPGGSGPAGPPGPQGVKGERGSPGGPGAAGFPGARGLPGPPGSNGNPGPPGPSGSPGKDGPPGPAGNTGAPGSPGVSGPKGDAGQPGEKGSPGAQGPPGAPGPLGIAGITGARGLAGPPGMPGPRGSPGPQGVKGESGKPGANGLSGERGPPGPQGLPGLAGTAGEPGRDGNPGSDGLPGRDGSPGGKGDRGENGSPGAPGAPGHPGPPGPVGPAGKSGDRGESGPAGPAGAPGPAGSRGAPGPQGPRGDKGETGERGAAGIKGHRGFPGNPGAPGSPGPAGQQGAIGSPGPAGPRGPVGPSGPPGKDGTSGHPGPIGPPGPRGNRGERGSEGSPGHPGQPGPPGPPGAPGPCCGGVGAAAIAGIGGEKAGGFAPYYGDEPMDFKINTDEIMTSLKSVNGQIESLISPDGSRKNPARNCRDLKFCHPELKSGEYWVDPNQGCKLDAIKVFCNMETGETCISANPLNVPRKHWWTDSSAEKKHVWFGESMDGGFQFSYGNPELPEDVLDVQLAFLRLLSSRASQNITYHCKNSIAYMDQASGNVKKALKLMGSNEETHWGNGAKQSLNIEPRKGCETTYCRYCTL

SEQ ID NO: 758568 - protein, 1365 aa, Homo sapiens
MMSFVQKGSWLLLALLHPTIILAQQEAVEGGCSHLGQSYADRDVWKPEPCQICVCDSGSVLCDDIICDDQELDCPNPEIPFGECCAVCPQPPTAPTRPPNGQGPQGPKGDPGPPGIPGRNGDPGIPGQPGSPGSPGPPGICESCPTGPQNYSPQYDSYDVKSGVAVGGLAGYPGPAGPPGPPGPPGTSGHPGSPGSPGYQGPPGEPGQAGPSGPPGPPGAIGPSGPAGKDGESGRPGRPGERGLPGPPGIKGPAGIPGFPGMKGHRGFDGRNGEKGETGAPGLKGENGLPGENGAPGPMGPRGAPGERGRPGLPGAAGARGNDGARGSDGQPGPPGPPGTAGFPGSPGAKGEVGPAGSPGSNGAPGQRGEPGPQGHAGAQGPPGPPGINGSPGGKGEMGPAGIPGAPGLMGARGPPGPAGANGAPGLRGGAGEPGKNGAKGEPGPRGERGEAGIPGVPGAKGEDGKDGSPGEPGANGLPGAAGERGAPGFRGPAGPNGIPGEKGPAGERGAPGPAGPRGAAGEPGRDGVPGGPGMRGMPGSPGGPGSDGKPGPPGSQGESGRPGPPGPSGPRGQPGVMGFPGPKGNDGAPGKNGERGGPGGPGPQGPPGKNGETGPQGPPGPTGPGGDKGDTGPPGPQGLQGLPGTGGPPGENGKPGEPGPKGDAGAPGAPGGKGDAGAPGERGPPGLAGAPGLRGGAGPPGPEGGKGAAGPPGPPGAAGTPGLQGMPGERGGLGSPGPKGDKGEPGGPGADGVPGKDGPRGPTGPIGPPGPAGQPGDKGEGGAPGLPGIAGPRGSPGERGETGPPGPAGFPGAPGQNGEPGGKGERGAPGEKGEGGPPGVAGPPGGSGPAGPPGPQGVKGERGSPGGPGAAGFPGARGLPGPPGSNGNPGPPGPSGSPGKDGPPGPAGNTGAPGSPGVSGPKGDAGQPGEKGSPGAQGPPGAPGPLGIAGITGARGLAGPPGMPGPRGSPGPQGVKGESGKPGANGLSGERGPPGPQGLPGLAGTAGEPGRDGNPGSDGLPGRDGSPGGKGDRGENGSPGAPGAPGHPGPPGPVGPAGKSGDRGESGPAGPAGAPGPAGSRGAPGPQGPRGDKGETGERGAAGIKGHRGFPGNPGAPGSPGPAGQQGAIGSPGPAGPRGPVGPSGPPGKDGTSGHPGPIGPPGPRGNRGERGSEGSPGHPGQPGPPGPPGAPGPCCGGVGAAAIAGIGGEKAGGFAPYYGDEPMDFKINTDEIMTSLKSVNGQIESLISPDGSRKNPARNCRDLKFCHPELKSGEYWVDPNQGCKLDAIKVFCNMETGETCISANPLNVPRKHWWTDSSAEKKHVWFGESMDGGFQFSYGNPELPEDVLDVQLAFLRLLSSRAS

SEQ ID NO: 758569 - protein, 1342 aa, Homo sapiens
MMSFVQKGSWLLLALLHPTIILAQQEAVEGGCSHLGQSYADRDVWKPEPCQICVCDSGSVLCDDIICDDQELDCPNPEIPFGECCAVCPQPPTAPTRPPNGQGPQGPKGDPGPPGIPGRNGDPGIPGQPGSPGSPGPPGICESCPTGPQNYSPQYDSYDVKSGVAVGGLAGYPGPAGPPGPPGPPGTSGHPGSPGSPGYQGPPGEPGQAGPSGPPGPPGAIGPSGPAGKDGESGRPGRPGERGLPGPPGIKGPAGIPGFPGMKGHRGFDGRNGEKGETGAPGLKGENGLPGENGAPGPMGPRGAPGERGRPGLPGAAGARGNDGARGSDGQPGPPGPPGTAGFPGSPGAKGEVGPAGSPGSNGAPGQRGEPGPQGHAGAQGPPGPPGINGSPGGKGEMGPAGIPGAPGLMGARGPPGPAGANGAPGLRGGAGEPGKNGAKGEPGPRGERGEAGIPGVPGAKGEDGKDGSPGEPGANGLPGAAGERGAPGFRGPAGPNGIPGEKGPAGERGAPGPAGPRGAAGEPGRDGVPGGPGMRGMPGSPGGPGSDGKPGPPGSQGESGRPGPPGPSGPRGQPGVMGFPGPKGNDGAPGKNGERGGPGGPGPQGPPGKNGETGPQGPPGPTGPGGDKGDTGPPGPQGLQGLPGTGGPPGENGKPGEPGPKGDAGAPGAPGGKGDAGAPGERGPPGLAGAPGLRGGAGPPGPEGGKGAAGPPGPPGAAGTPGLQGMPGERGGLGSPGPKGDKGEPGGPGADGVPGKDGPRGPTGPIGPPGPAGQPGDKGEGGAPGLPGIAGPRGSPGERGETGPPGPAGFPGAPGQNGEPGGKGERGAPGEKGEGGPPGVAGPPGGSGPAGPPGPQGVKGERGSPGGPGAAGFPGARGLPGPPGSNGNPGPPGPSGSPGKDGPPGPAGNTGAPGSPGVSGPKGDAGQPGEKGSPGAQGPPGAPGPLGIAGITGARGLAGPPGMPGPRGSPGPQGVKGESGKPGANGLSGERGPPGPQGLPGLAGTAGEPGRDGNPGSDGLPGRDGSPGGKGDRGENGSPGAPGAPGHPGPPGPVGPAGKSGDRGESGPAGPAGAPGPAGSRGAPGPQGPRGDKGETGERGAAGIKGHRGFPGNPGAPGSPGPAGQQGAIGSPGPAGPRGPVGPSGPPGKDGTSGHPGPIGPPGPRGNRGERGSEGSPGHPGQPGPPGPPGAPGPCCGGVGAAAIAGIGGEKAGGFAPYYGDEPMDFKINTDEIMTSLKSVNGQIESLISPDGSRKNPARNCRDLKFCHPELKSGEYWVDPNQGCKLDAIKVFCNMETGETCISANPLNVPRKHWWTDSSAEKKHVWFGESMDGGFQVSLAE

SEQ ID NO: 758570 - protein, 1192 aa, Homo sapiens
MMSFVQKGSWLLLALLHPTIILAQQEAVEGGCSHLGQSYADRDVWKPEPCQICVCDSGSVLCDDIICDDQELDCPNPEIPFGECCAVCPQPPTAPTRPPNGQGPQGPKGDPGPPGIPGRNGDPGIPGQPGSPGSPGPPGICESCPTGPQNYSPQYDSYDVKSGVAVGGLAGYPGPAGPPGPPGPPGTSGHPGSPGSPGYQGPPGEPGQAGPSGPPGPPGAIGPSGPAGKDGESGRPGRPGERGLPGPPGIKGPAGIPGFPGMKGHRGFDGRNGEKGETGAPGLKGENGLPGENGAPGPMGPRGAPGERGRPGLPGAAGARGNDGARGSDGQPGPPGPPGTAGFPGSPGAKGEVGPAGSPGSNGAPGQRGEPGPQGHAGAQGPPGPPGINGSPGGKGEMGPAGIPGAPGLMGARGPPGPAGANGAPGLRGGAGEPGKNGAKGEPGPRGERGEAGIPGVPGAKGEDGKDGSPGEPGANGLPGAAGERGAPGFRGPAGPNGIPGEKGPAGERGAPGPAGPRGAAGEPGRDGVPGGPGMRGMPGSPGGPGSDGKPGPPGSQGESGRPGPPGPSGPRGQPGVMGFPGPKGNDGAPGKNGERGGPGGPGPQGPPGKNGETGPQGPPGPTGPGGDKGDTGPPGPQGLQGLPGTGGPPGENGKPGEPGPKGDAGAPGAPGGKGDAGAPGERGPPGLAGAPGLRGGAGPPGPEGGKGAAGPPGPPGAAGTPGLQGMPGERGGLGSPGPKGDKGEPGGPGADGVPGKDGPRGPTGPIGPPGPAGQPGDKGEGGAPGLPGIAGPRGSPGERGETGPPGPAGFPGAPGQNGEPGGKGERGAPGEKGEGGPPGVAGPPGGSGPAGPPGPQGVKGERGSPGGPGAAGFPGARGLPGPPGSNGNPGPPGPSGSPGKDGPPGPAGNTGAPGSPGVSGPKGDAGQPGEKGSPGAQGPPGAPGPLGIAGITGARGLAGPPGMPGPRGSPGPQGVKGESGKPGANGLSGERGPPGPQGLPGLAGTAGEPGRDGNPGSDGLPGRDGSPGGKGDRGENGSPGAPGAPGHPGPPGPVGPAGKSGDRGESGPAGPAGAPGPAGSRGAPGPQGPRGDKGETGERGAAGIKGHRGFPGNPGAPGSPGPAGQQGAIGSPGPAGPRGPVGPSGPPGKDGTSGHPGPIGPPGPRGNRGERGSEGSPGHPGRGILKRPRTN

SEQ ID NO: 758571 - protein, 1204 aa, Homo sapiens
MMSFVQKGSWLLLALLHPTIILAQQEAVEGGCSHLGQSYADRDVWKPEPCQICVCDSGSVLCDDIICDDQELDCPNPEIPFGECCAVCPQPPTAPTRPPNGQGPQGPKGDPGPPGIPGRNGDPGIPGQPGSPGSPGPPGICESCPTGPQNYSPQYDSYDVKSGVAVGGLAGYPGPAGPPGPPGPPGTSGHPGSPGSPGYQGPPGEPGQAGPSGPPGPPGAIGPSGPAGKDGESGRPGRPGERGLPGPPGIKGPAGIPGFPGMKGHRGFDGRNGEKGETGAPGLKGENGLPGENGAPGPMGPRGAPGERGRPGLPGAAGARGNDGARGSDGQPGPPGPPGTAGFPGSPGAKGEVGPAGSPGSNGAPGQRGEPGPQGHAGAQGPPGPPGINGSPGGKGEMGPAGIPGAPGLMGARGPPGPAGANGAPGLRGGAGEPGKNGAKGEPGPRGERGEAGIPGVPGAKGEDGKDGSPGEPGANGLPGAAGERGAPGFRGPAGPNGIPGEKGPAGERGAPGPAGPRGAAGEPGRDGVPGGPGMRGMPGSPGGPGSDGKPGPPGSQGESGRPGPPGPSGPRGQPGVMGFPGPKGNDGAPGKNGERGGPGGPGPQGPPGKNGETGPQGPPGPTGPGGDKGDTGPPGPQGLQGLPGTGGPPGENGKPGEPGPKGDAGAPGAPGGKGDAGAPGERGPPGLAGAPGLRGGAGPPGPEGGKGAAGPPGPPGAAGTPGLQGMPGERGGLGSPGPKGDKGEPGGPGADGVPGKDGPRGPTGPIGPPGPAGQPGDKGEGGAPGLPGIAGPRGSPGERGETGPPGPAGFPGAPGQNGEPGGKGERGAPGEKGEGGPPGVAGPPGGSGPAGPPGPQGVKGERGSPGGPGAAGFPGARGLPGPPGSNGNPGPPGPSGSPGKDGPPGPAGNTGAPGSPGVSGPKGDAGQPGEKGSPGAQGPPGAPGPLGIAGITGARGLAGPPGMPGPRGSPGPQGVKGESGKPGANGLSGERGPPGPQGLPGLAGTAGEPGRDGNPGSDGLPGRDGSPGGKGDRGENGSPGAPGAPGHPGPPGPVGPAGKSGDRGESGPAGPAGAPGPAGSRGAPGPQGPRGDKGETGERGAAGIKGHRGFPGNPGAPGSPGLLSAGCNRSSRNCGPEDLLAQWTPGKDGPVGSLLGPRVLSDRGETVGGPRALAQASCLCAWSVVFGRCGGGTRFRLGLLNRF

SEQ ID NO: 758572 - protein, 1096 aa, Homo sapiens
MMSFVQKGSWLLLALLHPTIILAQQEAVEGGCSHLGQSYADRDVWKPEPCQICVCDSGSVLCDDIICDDQELDCPNPEIPFGECCAVCPQPPTAPTRPPNGQGPQGPKGDPGPPGIPGRNGDPGIPGQPGSPGSPGPPGICESCPTGPQNYSPQYDSYDVKSGVAVGGLAGYPGPAGPPGPPGPPGTSGHPGSPGSPGYQGPPGEPGQAGPSGPPGPPGAIGPSGPAGKDGESGRPGRPGERGLPGPPGIKGPAGIPGFPGMKGHRGFDGRNGEKGETGAPGLKGENGLPGENGAPGPMGPRGAPGERGRPGLPGAAGARGNDGARGSDGQPGPPGPPGTAGFPGSPGAKGEVGPAGSPGSNGAPGQRGEPGPQGHAGAQGPPGPPGINGSPGGKGEMGPAGIPGAPGLMGARGPPGPAGANGAPGLRGGAGEPGKNGAKGEPGPRGERGEAGIPGVPGAKGEDGKDGSPGEPGANGLPGAAGERGAPGFRGPAGPNGIPGEKGPAGERGAPGPAGPRGAAGEPGRDGVPGGPGMRGMPGSPGGPGSDGKPGPPGSQGESGRPGPPGPSGPRGQPGVMGFPGPKGNDGAPGKNGERGGPGGPGPQGPPGKNGETGPQGPPGPTGPGGDKGDTGPPGPQGLQGLPGTGGPPGENGKPGEPGPKGDAGAPGAPGGKGDAGAPGERGPPGLAGAPGLRGGAGPPGPEGGKGAAGPPGPPGAAGTPGLQGMPGERGGLGSPGPKGDKGEPGGPGADGVPGKDGPRGPTGPIGPPGPAGQPGDKGEGGAPGLPGIAGPRGSPGERGETGPPGPAGFPGAPGQNGEPGGKGERGAPGEKGEGGPPGVAGPPGGSGPAGPPGPQGVKGERGSPGGPGAAGFPGARGLPGPPGSNGNPGPPGPSGSPGKDGPPGPAGNTGAPGSPGVSGPKGDAGQPGEKGSPGAQGPPGAPGPLGIAGITGARGLAGPPGMPGPRGSPGPQGVKGESGKPGANGLSGERGPPGPQGLPGLAGTAGEPGRDGNPGSDGLPGRDGSPGGKGDRGENGSPGAPGAPGHPGPPGPVGPAGKSGDRGESGPAGPAGAPGPPGSEVLVVVRPRGDKVNR

SEQ ID NO: 758573 - protein, 891 aa, Homo sapiens
MMSFVQKGSWLLLALLHPTIILAQQEAVEGGCSHLGQSYADRDVWKPEPCQICVCDSGSVLCDDIICDDQELDCPNPEIPFGECCAVCPQPPTAPTRPPNGQGPQGPKGDPGPPGIPGRNGDPGIPGQPGSPGSPGPPGICESCPTGPQNYSPQYDSYDVKSGVAVGGLAGYPGPAGPPGPPGPPGTSGHPGSPGSPGYQGPPGEPGQAGPSGPPGPPGAIGPSGPAGKDGESGRPGRPGERGLPGPPGIKGPAGIPGFPGMKGHRGFDGRNGEKGETGAPGLKGENGLPGENGAPGPMGPRGAPGERGRPGLPGAAGARGNDGARGSDGQPGPPGPPGTAGFPGSPGAKGEVGPAGSPGSNGAPGQRGEPGPQGHAGAQGPPGPPGINGSPGGKGEMGPAGIPGAPGLMGARGPPGPAGANGAPGLRGGAGEPGKNGAKGEPGPRGERGEAGIPGVPGAKGEDGKDGSPGEPGANGLPGAAGERGAPGFRGPAGPNGIPGEKGPAGERGAPGPAGPRGAAGEPGRDGVPGGPGMRGMPGSPGGPGSDGKPGPPGSQGESGRPGPPGPSGPRGQPGVMGFPGPKGNDGAPGKNGERGGPGGPGPQGPPGKNGETGPQGPPGPTGPGGDKGDTGPPGPQGLQGLPGTGGPPGENGKPGEPGPKGDAGAPGAPGGKGDAGAPGERGPPGLAGAPGLRGGAGPPGPEGGKGAAGPPGPPGAAGTPGLQGMPGERGGLGSPGPKGDKGEPGGPGADGVPGKDGPRGPTGPIGPPGPAGQPGDKGEGGAPGLPGIAGPRGSPGERGETGPPGPAGFPGAPGQNGEPGGKGERGAPGEKGEGGPPGVAGPPGGSGPAGPPGPQGVKGERGSPGGPGAAGFPGARGLPGPPGSNVSNC

SEQ ID NO: 758574 - protein, 905 aa, Homo sapiens
MMSFVQKGSWLLLALLHPTIILAQQEAVEGGCSHLGQSYADRDVWKPEPCQICVCDSGSVLCDDIICDDQELDCPNPEIPFGECCAVCPQPPTAPTRPPNGQGPQGPKGDPGPPGIPGRNGDPGIPGQPGSPGSPGPPGICESCPTGPQNYSPQYDSYDVKSGVAVGGLAGYPGPAGPPGPPGPPGTSGHPGSPGSPGYQGPPGEPGQAGPSGPPGPPGAIGPSGPAGKDGESGRPGRPGERGLPGPPGIKGPAGIPGFPGMKGHRGFDGRNGEKGETGAPGLKGENGLPGENGAPGPMGPRGAPGERGRPGLPGAAGARGNDGARGSDGQPGPPGPPGTAGFPGSPGAKGEVGPAGSPGSNGAPGQRGEPGPQGHAGAQGPPGPPGINGSPGGKGEMGPAGIPGAPGLMGARGPPGPAGANGAPGLRGGAGEPGKNGAKGEPGPRGERGEAGIPGVPGAKGEDGKDGSPGEPGANGLPGAAGERGAPGFRGPAGPNGIPGEKGPAGERGAPGPAGPRGAAGEPGRDGVPGGPGMRGMPGSPGGPGSDGKPGPPGSQGESGRPGPPGPSGPRGQPGVMGFPGPKGNDGAPGKNGERGGPGGPGPQGPPGKNGETGPQGPPGPTGPGGDKGDTGPPGPQGLQGLPGTGGPPGENGKPGEPGPKGDAGAPGAPGGKGDAGAPGERGPPGLAGAPGLRGGAGPPGPEGGKGAAGPPGPPGAAGTPGLQGMPGERGGLGSPGPKGDKSQRWFRLQLPAPATSREGSRGGRYYRADDANVVRDRDLEVDTTLKSLSQQIENIRSPEGSRKNPARTCRDLKMCHSDWKSGEYWIDPNQGCNLDAIKVFCNMETGETCVYPTQPSVAQKNWYINKNPKDKRHVWFGESMTDGIPFQFGGQGFDPSDVAIQLT

SEQ ID NO: 758575 - protein, 77 aa, Homo sapiens
METGETCISANPLNVPRKHWWTDSSAEKKHVWFGESMDGGFQFSYGNPELPEDVLDVQLAFLRLLSSRASPPLNPPG

SEQ ID NO: 758576 - protein, 116 aa, Homo sapiens
VIRVRRYSTEKNTEVEESMDGGFQFSYGNPELPEDVLDVQLAFLRLLSSRASQNITYHCKNSIAYMDQASGNVKKALKLMGSNEGEFKAEGNSKFTYTVLEDGCTKHTGEMEQNSL

SEQ ID NO: 758577 - protein, 1396 aa, Homo sapiens
MMSFVQKGSWLLLALLHPTIILAQQEAVEGGCSHLGQSYADRDVWKPEPCQICVCDSGSVLCDDIICDDQELDCPNPEIPFGECCAVCPQPPTAPTRPPNGQGPQGPKGDPGPPGIPGRNGDPGIPGQPGSPGSPGPPGICESCPTGPQNYSPQYDSYDVKSGVAVGGLAGYPGPAGPPGPPGPPGTSGHPGSPGSPGYQGPPGEPGQAGPSGPPGPPGAIGPSGPAGKDGESGRPGRPGERGLPGPPGIKGPAGIPGFPGMKGHRGFDGRNGEKGETGAPGLKGENGLPGENGAPGPMGPRGAPGERGRPGLPGAAGARGNDGARGSDGQPGPPGPPGTAGFPGSPGAKGPPGINGSPGGKGEMGPAGIPGAPGLMGARGPPGPAGANGAPGLRGGAGEPGKNGAKGEPGPRGERGEAGIPGVPGAKGEDGKDGSPGEPGANGLPGAAGERGAPGFRGPAGPNGIPGEKGPAGERGAPGPAGPRGAAGEPGRDGVPGGPGMRGMPGSPGGPGSDGKPGPPGSQGESGRPGPPGPSGPRGQPGVMGFPGPKGNDGAPGKNGERGGPGGPGPQGPPGKNGETGPQGPPGPTGPGGDKGDTGPPGPQGLQGLPGTGGPPGENGKPGEPGPKGDAGAPGAPGGKGDAGAPGERGPPGLAGAPGLRGGAGPPGPEGGKGAAGPPGPPGAAGTPGLQGMPGERGGLGSPGPKGDKGEPGGPGADGVPGKDGPRGPTGPIGPPGPAGQPGDKGEGGAPGLPGIAGPRGSPGERGETGPPGPAGFPGAPGQNGEPGGKGERGAPGEKGEGGPPGVAGPPGGSGPAGPPGPQGVKGERGSPGGPGAAGFPGARGLPGPPGSNGNPGPPGPSGSPGKDGPPGPAGNTGAPGSPGVSGPKGDAGQPGEKGSPGAQGPPGAPGPLGIAGITGARGLAGPPGMPGPRGSPGPQGVKGESGKPGANGLSGERGPPGPQGLPGLAGTAGEPGRDGNPGSDGLPGRDGSPGGKGDRGENGSPGAPGAPGHPGPPGPVGPAGKSGDRGESGPAGPAGAPGPAGSRGAPGPQGPRGDKGETGERGAAGIKGHRGFPGNPGAPGSPGPAGQQGAIGSPGPAGPRGPVGPSGPPGKDGTSGHPGPIGPPGPRGNRGERGSEGSPGHPGQPGPPGPPGAPGPCCGGVGAAAIAGIGGEKAGGFAPYYGDEPMDFKINTDEIMTSLKSVNGQIESLISPDGSRKNPARNCRDLKFCHPELKSGEYWVDPNQGCKLDAIKVFCNMETGETCISANPLNVPRKHWWTDSSAEKKHVWFGESMDGGFQFSYGNPELPEDVLDVQLAFLRLLSSRASQNITYHCKNSIAYMDQASGNVKKALKLMGSNEGEFKAEGNSKFTYTVLEDGCTKHTGEMEQNSL

SEQ ID NO: 758578 - protein, 938 aa, Homo sapiens
MMSFVQKGSWLLLALLHPTIILAQQEAVEGGCSHLGQSYADRDVWKPEPCQICVCDSGSVLCDDIICDDQELDCPNPEIPFGECCAVCPQPPTAPTRPPNGQGPQGPKGDPGPPGIPGRNGDPGIPGQPGSPGSPGPPGICESCPTGPQNYSPQYDSYDVKSGVAVGGLAGYPGPAGPPGPPGPPGTSGHPGSPGSPGYQGPPGEPGQAGPSGPPGPPGAIGPSGPAGKDGESGRPGRPGERGLPGPPGIKGPAGIPGFPGMKGHRGFDGRNGEKGETGAPGLKGENGLPGENGAPGPMGPRGAPGERGRPGLPGAAGARGNDGARGSDGQPGPPGPPGTAGFPGSPGAKGEVGPAGSPGSNGAPGQRGEPGPQGHAGAQGPPGPPGINGSPGGKGEMGPAGIPGAPGLMGARGPPGPAGANGAPGLRGGAGEPGKNGAKGEPGPRGERGEAGIPGVPGAKGEDGKDGSPGEPGANGLPGAAGERGAPGFRGPAGPNGIPGEKGPAGERGAPGPAGPRGAAGEPGRDGVPGGPGMRGMPGSPGGPGSDGKPGPPGSQGESGRPGPPGPSGPRGQPGVMGFPGPKGNDAGSRGAPGPQGPRGDKGETGERGAAGIKGHRGFPGNPGAPGSPGPAGQQGAIGSPGPAGPRGPVGPSGPPGKDGTSGHPGPIGPPGPRGNRGERGSEGSPGHPGQPGPPGPPGAPGPCCGGVGAAAIAGIGGEKAGGFAPYYGDEPMDFKINTDEIMTSLKSVNGQIESLISPDGSRKNPARNCRDLKFCHPELKSGEYWVDPNQGCKLDAIKVFCNMETGETCISANPLNVPRKHWWTDSSAEKKHVWFGESMDGGFQFSYGNPELPEDVLDVQLAFLRLLSSRASQNITYHCKNSIAYMDQASGNVKKALKLMGSNEGEFKAEGNSKFTYTVLEDGCTKHTGEMEQNSL

SEQ ID NO: 758579 - protein, 1429 aa, Homo sapiens; identical to SEQ ID NO: 758550

SEQ ID NO: 758580 - protein, 1429 aa, Homo sapiens; identical to SEQ ID NO: 758550

SEQ ID NO: 758581 - protein, 1429 aa, Homo sapiens; identical to SEQ ID NO: 758550

SEQ ID NO: 758582 - protein, 104 aa, Homo sapiens
GTEAHSMDGGFQFSYGNPELPEDVLDVQLAFLRLLSSRASQNITYHCKNSIAYMDQASGNVKKALKLMGSNEGEFKAEGNSKFTYTVLEDGCTKHTGEMEQNSL

SEQ ID NO: 758583 - protein, 102 aa, Homo sapiens
DTARPGRGSQFSYGNPELPEDVLDVQLAFLRLLSSRASQNITYHCKNSIAYMDQASGNVKKALKLMGSNEGEFKAEGNSKFTYTVLEDGCTKHTGEMEQNSL

SEQ ID NO: 758584 - protein, 1429 aa, Homo sapiens; identical to SEQ ID NO: 758550

SEQ ID NO: 758585 - protein, 1399 aa, Homo sapiens
MMSFVQKGSWLLLALLHPTIILAQQEAVEGGCSHLGQSYADRDVWKPEPCQICVCDSGSVLCDDIICDDQELDCPNPEIPFGECCAVCPQPPTAPTRPPNGQGPQGPKGDPGPPGIPGRNGDPGIPGQPGSPGSPGPPGICESCPTGPQNYSPQYDSYDVKSGVAVGGLAGYPGPAGPPGPPGPPGTSGHPGSPGSPGYQGPPGEPGQAGPSGPPGPPGAIGPSGPAGKDGESGRPGRPGERGLPGPPGIKGPAGIPGFPGMKGHRGFDGRNGEKGETGAPGLKGENGLPGENGAPGPMGPRGAPGERGRPGLPGAAGARGNDGARGSDGQPGPPGPPGTAGFPGSPGAKGEVGPAGSPGSNGAPGQRGEPGPQGHAGAQGPPGPPGINGSPGGKGEMGPAGIPGAPGLMGARGPPGPAGANGAPGLRGGAGEPGKNGAKGEPGPRGERGEAGIPGVPGAKGEDGKDGSPGEPGANGLPGAAGERGAPGFRGPAGPNGIPGEKGPAGERGAPGPAGPRGAAGEPGRDGVPGGPGMRGMPGSPGGPGSDGKPGPPGSQGESGRPGPPGPSGPRGQPGVMGFPGPKGNDGAPGKNGERGGPGGPGPQGPPGKNGETGPQGPPGPTGPGGDKGDTGPPGPQGLQGLPGTGGPPGENGKPGEPGPKGDAGAPGAPGGKGDAGAPGERGPPGLAGAPGLRGGAGPPGPEGGKGAAGPPGPPGAAGTPGLQGMPGERGGLGSPGPKGDKGEPGGPGADGVPGKDGPRGPTGPIGPPGPAGQPGDKGEGGAPGLPGIAGPRGSPGERGETGPPGPAGFPGAPGQNGEPGGKGERGAPGEKGEGGPPGVAGPPGGSGPAGPPGPQGVKGERGSPGGPGAAGFPGARGLPGPPGSNGNPGPPGPSGSPGKDGPPGPAGNTGAPGSPGVSGPKGDAGQPGEKGSPGAQGPPGAPGPLGIAGITGARGLAGPPGMPGPRGSPGPQGVKGESGKPGANGLSGERGPPGPQGLPGLAGTAGEPGRDGNPGSDGLPGRDGSPGGKGDRGENGSPGAPGAPGHPGPPGPVGPAGKSGDRGESGPAGPAGAPGPAGSRGAPGPQGPRGDKGETGERGAAGIKGHRGFPGNPGAPGSPGPAGQQGAIGSPGPAGPRGPVGPSGPPGKDGTSGHPGPIGPPGPRGNRGERGSEGSPGHPGQPGPPGPPGAPGPCCGGVGAAAIAGIGGEKAGGFAPYYGDEPMDFKINTDEIMTSLKSVNGQIESLISPDGSRKNPARNCRDLKFCHPELKSGEYWVDPNQGCKLDAIKVFCNMETGETCISANPLNVPRKHWWTDSSAEKKHVWFGESMDGGFQFSYGNPELPEDVLDVQLAFLRLLSSRASQNITYHCKNSIAYMENTLGKWSKTVFEYRTTQGL

SEQ ID NO: 758586 - protein, 1429 aa, Homo sapiens; identical to SEQ ID NO: 758550

SEQ ID NO: 758587 - protein, 1429 aa, Homo sapiens; identical to SEQ ID NO: 758550

SEQ ID NO: 758588 - protein, 1429 aa, Homo sapiens; identical to SEQ ID NO: 758550

SEQ ID NO: 758589 - protein, 1429 aa, Homo sapiens; identical to SEQ ID NO: 758550

SEQ ID NO: 758590 - protein, 1429 aa, Homo sapiens; identical to SEQ ID NO: 758550

SEQ ID NO: 758591 - protein, 1428 aa, Homo sapiens; identical to SEQ ID NO: 758559

SEQ ID NO: 758592 - protein, 1436 aa, Homo sapiens
MMSFVQKGSWLLLALLHPTIILAQQEAVEGGCSHLGQSYADRDVWKPEPCQICVCDSGSVLCDDIICDDQELDCPNPEIPFGECCAVCPQPPTAPTRPPNGQGPQGPKGDPGPPGIPGRNGDPGIPGQPGSPGSPGPPGICESCPTGPQNYSPQYDSYDVKSGVAVGGLAGYPGPAGPPGPPGPPGTSGHPGSPGSPGYQGPPGEPGQAGPSGPPGPPGAIGPSGPAGKDGESGRPGRPGERGLPGPPGIKGPAGIPGFPGMKGHRGFDGRNGEKGETGAPGLKGENGLPGENGAPGPMGPRGAPGERGRPGLPGAAGARGNDGARGSDGQPGPPGPPGTAGFPGSPGAKGEVGPAGSPGSNGAPGQRGEPGPQGHAGAQGPPGPPGINGSPGGKGEMGPAGIPGAPGLMGARGPPGPAGANGAPGLRGGAGEPGKNGAKGEPGPRGERGEAGIPGVPGAKGEDGKDGSPGEPGANGLPGAAGERGAPGFRGPAGPNGIPGEKGPAGERGAPGPAGPRGAAGEPGRDGVPGGPGMRGMPGSPGGPGSDGKPGPPGSQGESGRPGPPGPSGPRGQPGVMGFPGPKGNDGAPGKNGERGGPGGPGPQGPPGKNGETGPQGPPGPTGPGGDKGDTGPPGPQGLQGLPGTGGPPGENGKPGEPGPKGDAGAPGAPGGKGDAGAPGERGPPGLAGAPGLRGGAGPPGPEGGKGAAGPPGPPGAAGTPGLQGMPGERGGLGSPGPKGDKGEPGGPGADGVPGKDGPRGPTGPIGPPGPAGQPGDKGEGGAPGLPGIAGPRGSPGERGETGPPGPAGFPGAPGQNGEPGGKGERGAPGEKGEGGPPGVAGPPGGSGPAGPPGPQGVKGERGSPGGPGAAGFPGARGLPGPPGSNGNPGPPGPSGSPGKDGPPGPAGNTGAPGSPGVSGPKGDAGQPGEKGSPGAQGPPGAPGPLGIAGITGARGLAGPPGMPGPRGSPGPQGVKGESGKPGANGLSGERGPPGPQGLPGLAGTAGEPGRDGNPGSDGLPGRDGSPGGKGDRGENGSPGAPGAPGHPGPPGPVGPAGKSGDRGESGPAGPAGAPGPAGSRGAPGPQGPRGDKGETGERGAAGIKGHRGFPGNPGAPGSPGPAGQQGAIGSPGPAGPRGPVGPSGPPGKDGTSGHPGPIGPPGPRGNRGERGSEGSPGHPGQPGPPGPPGAPGPCCGGVGAAAIAGIGGEKAGGFAPYYGDEPMDFKINTDEIMTSLKSVNGQIESLISPDGSRKNPARNCRDLKFCHPELKSGEYWVDPNQGCKLDAIKVFCNMETGETCISANPLNVPRKHWWTDSSAEKKHVWFGESMDGGFQFSYGNPELPEDVLDVQLAFLRLLSSRASQNITYHCKNSIAYMDQASGNVKKALKLMGSNEGEFKAEGNSKFTYTVLEDGCTVIFCTIGDLLHDEVIICT

SEQ ID NO: 758593 - protein, 1373 aa, Homo sapiens
MMSFVQKGSWLLLALLHPTIILAQQEAVEGGCSHLGQSYADRDVWKPEPCQICVCDSGSVLCDDIICDDQELDCPNPEIPFGECCAVCPQPPTAPTRPPNGQGPQGPKGDPGPPGIPGRNGDPGIPGQPGSPGSPGPPGICESCPTGPQNYSPQYDSYDVKSGVAVGGLAGYPGPAGPPGPPGPPGTSGHPGSPGSPGYQGPPGEPGQAGPSGPPGPPGAIGPSGPAGKDGESGRPGRPGERGLPGPPGIKGPAGIPGFPGMKGHRGFDGRNGEKGETGAPGLKGENGLPGENGAPGPMGPRGAPGERGRPGLPGAAGARGNDGARGSDGQPGPPGPPGTAGFPGSPGAKGEVGPAGSPGSNGAPGQRGEPGPQGHAGAQGPPGPPGINGSPGGKGEMGPAGIPGAPGLMGARGPPGPAGANGAPGLRGGAGEPGKNGAKGEPGPRGERGEAGIPGVPGAKGEDGKDGSPGEPGANGLPGAAGERGAPGFRGPAGPNGIPGEKGPAGERGAPGPAGPRGAAGEPGRDGVPGGPGMRGMPGSPGGPGSDGKPGPPGSQGESGRPGPPGPSGPRGQPGVMGFPGPKGNDGAPGKNGERGGPGGPGPQGPPGKNGETGPQGPPGPTGPGGDKGDTGPPGPQGLQGLPGTGGPPGENGKPGEPGPKGDAGAPGAPGGKGDAGAPGERGPPGLAGAPGLRGGAGPPGPEGGKGAAGPPGPPGAAGTPGLQGMPGERGGLGSPGPKGDKGEPGGPGADGVPGKDGPRGPTGPIGPPGPAGQPGDKGEGGAPGLPGIAGPRGSPGERGETGPPGPAGFPGAPGQNGEPGGKGERGAPGEKGEGGPPGVAGPPGGSGPAGPPGPQGVKGERGSPGGPGAAGFPGARGLPGPPGSNGNPGPPGPSGSPGKDGPPGPAGNTGAPGSPGVSGPKGDAGQPGEKGSPGAQGPPGAPGPLGIAGITGARGLAGPPGMPGPRGSPGPQGVKGESGKPGANGLSGERGPPGPQGLPGLAGTAGEPGRDGNPGSDGLPGRDGSPGGKGDRGENGSPGAPGAPGHPGPPGPVGPAGKSGDRGESGPAGPAGAPGPAGSRGAPGPQGPRGDKGETGERGAAGIKGHRGFPGNPGAPGSPGPAGQQGAIGSPGPAGPRGPVGPSGPPGKDGTSGHPGPIGPPGPRGNRGERGSEGSPGHPGQPGPPGPPGAPGPCCGGVGAAAIAGIGGEKAGGFAPYYGDEPMDFKINTDEIMTSLKSVNGQIESLISPDGSRKNPARNCRDLKFCHPELKSGEYWVDPNQGCKLDAIKVFCNMETGETCISANPLNVPRKHWWTDSSAEKKHVWFGESMDGGFQFSYGNPELPEDVLDVQLAFLRLLSSRASRQNGVPTL

SEQ ID NO: 758594 - protein, 1328 aa, Homo sapiens
MMSFVQKGSWLLLALLHPTIILAQQEAVEGGCSHLGQSYADRDVWKPEPCQICVCDSGSVLCDDIICDDQELDCPNPEIPFGECCAVCPQPPTAPTRPPNGQGPQGPKGDPGPPGIPGRNGDPGIPGQPGSPGSPGPPGICESCPTGPQNYSPQYDSYDVKSGVAVGGLAGYPGPAGPPGPPGPPGTSGHPGSPGSPGYQGPPGEPGQAGPSGPPGPPGAIGPSGPAGKDGESGRPGRPGERGLPGPPGIKGPAGIPGFPGMKGHRGFDGRNGEKGETGAPGLKGENGLPGENGAPGPMGPRGAPGERGRPGLPGAAGARGNDGARGSDGQPGPPGPPGTAGFPGSPGAKGEVGPAGSPGSNGAPGQRGEPGPQGHAGAQGPPGPPGINGSPGGKGEMGPAGIPGAPGLMGARGPPGPAGANGAPGLRGGAGEPGKNGAKGEPGPRGERGEAGIPGVPGAKGEDGKDGSPGEPGANGLPGAAGERGAPGFRGPAGPNGIPGEKGPAGERGAPGPAGPRGAAGEPGRDGVPGGPGMRGMPGSPGGPGSDGKPGPPGSQGESGRPGPPGPSGPRGQPGVMGFPGPKGNDGAPGKNGERGGPGGPGPQGPPGKNGETGPQGPPGPTGPGGDKGDTGPPGPQGLQGLPGTGGPPGENGKPGEPGPKGDAGAPGAPGGKGDAGAPGERGPPGLAGAPGLRGGAGPPGPEGGKGAAGPPGPPGAAGTPGLQGMPGERGGLGSPGPKGDKGEPGGPGADGVPGKDGPRGPTGPIGPPGPAGQPGDKGEGGAPGLPGIAGPRGSPGERGETGPPGPAGFPGAPGQNGEPGGKGERGAPGEKGEGGPPGVAGPPGGSGPAGPPGPQGVKGERGSPGGPGAAGFPGARGLPGPPGSNGNPGPPGPSGSPGKDGPPGPAGNTGAPGSPGVSGPKGDAGQPGEKGSPGAQGPPGAPGPLGIAGITGARGLAGPPGMPGPRGSPGPQGVKGESGKPGANGLSGERGPPGPQGLPGLAGTAGEPGRDGNPGSDGLPGRDGSPGGKGDRGENGSPGAPGAPGHPGPPGPVGPAGKSGDRGESGPAGPAGAPGPAGSRGAPGPQGPRGDKGETGERGAAGIKGHRGFPGNPGAPGSPGPAGQQGAIGSPGPAGPRGPVGPSGPPGKDGTSGHPGPIGPPGPRGNRGERGSEGSPGHPGQPGPPGPPGAPGPCCGGVGAAAIAGIGGEKAGGFAPYYGDEPMDFKINTDEIMTSLKSVNGQIESLISPDGSRKNPARNCRDLKFCHPELKSGEYWVDPNQGCKLDAIKVFCNMETGETCISANPLNVPRKPPAEGDEKKSESYSY

SEQ ID NO: 758595 - protein, 1170 aa, Homo sapiens
MMSFVQKGSWLLLALLHPTIILAQQEAVEGGCSHLGQSYADRDVWKPEPCQICVCDSGSVLCDDIICDDQELDCPNPEIPFGECCAVCPQPPTAPTRPPNGQGPQGPKGDPGPPGIPGRNGDPGIPGQPGSPGSPGPPGICESCPTGPQNYSPQYDSYDVKSGVAVGGLAGYPGPAGPPGPPGPPGTSGHPGSPGSPGYQGPPGEPGQAGPSGPPGPPGAIGPSGPAGKDGESGRPGRPGERGLPGPPGIKGPAGIPGFPGMKGHRGFDGRNGEKGETGAPGLKGENGLPGENGAPGPMGPRGAPGERGRPGLPGAAGARGNDGARGSDGQPGPPGPPGTAGFPGSPGAKGEVGPAGSPGSNGAPGQRGEPGPQGHAGAQGPPGPPGINGSPGGKGEMGPAGIPGAPGLMGARGPPGPAGANGAPGLRGGAGEPGKNGAKGEPGPRGERGEAGIPGVPGAKGEDGKDGSPGEPGANGLPGAAGERGAPGFRGPAGPNGIPGEKGPAGERGAPGPAGPRGAAGEPGRDGVPGGPGMRGMPGSPGGPGSDGKPGPPGSQGESGRPGPPGPSGPRGQPGVMGFPGPKGNDGAPGKNGERGGPGGPGPQGPPGKNGETGPQGPPGPTGPGGDKGDTGPPGPQGLQGLPGTGGPPGENGKPGEPGPKGDAGAPGAPGGKGDAGAPGERGPPGLAGAPGLRGGAGPPGPEGGKGAAGPPGPPGAAGTPGLQGMPGERGGLGSPGPKGDKGEPGGPGADGVPGKDGPRGPTGPIGPPGPAGQPGDKGEGGAPGLPGIAGPRGSPGERGETGPPGPAGFPGAPGQNGEPGGKGERGAPGEKGEGGPPGVAGPPGGSGPAGPPGPQGVKGERGSPGGPGAAGFPGARGLPGPPGSNGNPGPPGPSGSPGKDGPPGPAGNTGAPGSPGVSGPKGDAGQPGEKGSPGAQGPPGAPGPLGIAGITGARGLAGPPGMPGPRGSPGPQGVKGESGKPGANGLSGERGPPGPQGLPGLAGTAGEPGRDGNPGSDGLPGRDGSPGGKGDRGENGSPGAPGAPGHPGPPGPVGPAGKSGDRGESGPAGPAGAPGPAGSRGAPGPQGPRGDKGETGERGAAGIKGHRGFPGNPGAPGSPGPAGQQGAIGSPGPAGPRVSSTERYYRSTCFRCLHFRKIFWHCDVMILS

SEQ ID NO: 758596 - protein, 878 aa, Homo sapiens
MMSFVQKGSWLLLALLHPTIILAQQEAVEGGCSHLGQSYADRDVWKPEPCQICVCDSGSVLCDDIICDDQELDCPNPEIPFGECCAVCPQPPTAPTRPPNGQGPQGPKGDPGPPGIPGRNGDPGIPGQPGSPGSPGPPGICESCPTGPQNYSPQYDSYDVKSGVAVGGLAGYPGPAGPPGPPGPPGTSGHPGSPGSPGYQGPPGEPGQAGPSGPPGPPGAIGPSGPAGKDGESGRPGRPGERGLPGPPGIKGPAGIPGFPGMKGHRGFDGRNGEKGETGAPGLKGENGLPGENGAPGPMGPRGAPGERGRPGLPGAAGARGNDGARGSDGQPGPPGPPGTAGFPGSPGAKGEVGPAGSPGSNGAPGQRGEPGPQGHAGAQGPPGPPGINGSPGGKGEMGPAGIPGAPGLMGARGPPGPAGANGAPGLRGGAGEPGKNGAKGEPGPRGERGEAGIPGVPGAKGEDGKDGSPGEPGANGLPGAAGERGAPGFRGPAGPNGIPGEKGPAGERGAPGPAGPRGAAGEPGRDGVPGGPGMRGMPGSPGGPGSDGKPGPPGSQGESGRPGPPGPSGPRGQPGVMGFPGPKGNDGAPGKNGERGGPGGPGPQGPPGKNGETGPQGPPGPTGPGGDKGDTGPPGPQGLQGLPGTGGPPGENGKPGEPGPKGDAGAPGAPGGKGDAGAPGERGPPGLAGAPGLRGGAGPPGPEGGKGAAGPPGPPGAAGTPGLQGMPGERGGLGSPGPKGDKGEPGGPGADGVPGKDGPRGPTGPIGPPGPAGQPGDKGEGGAPGLPGIAGPRGSPGERGETGPPGPAGFPGAPGQNGEPGGKGERGAPGEKGEGGPPGVAGPPGGSGPAGPPGPQGVKGERGSPGGPVSIDPLNYY

SEQ ID NO: 758597 - protein, 866 aa, Homo sapiens
MMSFVQKGSWLLLALLHPTIILAQQEAVEGGCSHLGQSYADRDVWKPEPCQICVCDSGSVLCDDIICDDQELDCPNPEIPFGECCAVCPQPPTAPTRPPNGQGPQGPKGDPGPPGIPGRNGDPGIPGQPGSPGSPGPPGICESCPTGPQNYSPQYDSYDVKSGVAVGGLAGYPGPAGPPGPPGPPGTSGHPGSPGSPGYQGPPGEPGQAGPSGPPGPPGAIGPSGPAGKDGESGRPGRPGERGLPGPPGIKGPAGIPGFPGMKGHRGFDGRNGEKGETGAPGLKGENGLPGENGAPGPMGPRGAPGERGRPGLPGAAGARGNDGARGSDGQPGPPGPPGTAGFPGSPGAKGEVGPAGSPGSNGAPGQRGEPGPQGHAGAQGPPGPPGINGSPGGKGEMGPAGIPGAPGLMGARGPPGPAGANGAPGLRGGAGEPGKNGAKGEPGPRGERGEAGIPGVPGAKGEDGKDGSPGEPGANGLPGAAGERGAPGFRGPAGPNGIPGEKGPAGERGAPGPAGPRGAAGEPGRDGVPGGPGMRGMPGSPGGPGSDGKPGPPGSQGESGRPGPPGPSGPRGQPGVMGFPGPKGNDGAPGKNGERGGPGGPGPQGPPGKNGETGPQGPPGPTGPGGDKGDTGPPGPQGLQGLPGTGGPPGENGKPGEPGPKGDAGAPGAPGGKGDAGAPGERGPPGLAGAPGLRGGAGPPGPEGGKGAAGPPGPPGAAGTPGLQGMPGERGGLGSPGPKGDKGEPGGPGADGVPGKDGPRGPTGPIGPPGPAGQPGDKGEGGAPGLPGIAGPRGSPGERGETGPPGPAGFPGAPGQNGEPGGKGERGAPGEKGEGGPPGVAGPPGGSGPAGPPGPQGVKGVHYFS

SEQ ID NO: 758598 - protein, 761 aa, Homo sapiens
MMSFVQKGSWLLLALLHPTIILAQQEAVEGGCSHLGQSYADRDVWKPEPCQICVCDSGSVLCDDIICDDQELDCPNPEIPFGECCAVCPQPPTAPTRPPNGQGPQGPKGDPGPPGIPGRNGDPGIPGQPGSPGSPGPPGICESCPTGPQNYSPQYDSYDVKSGVAVGGLAGYPGPAGPPGPPGPPGTSGHPGSPGSPGYQGPPGEPGQAGPSGPPGPPGAIGPSGPAGKDGESGRPGRPGERGLPGPPGIKGPAGIPGFPGMKGHRGFDGRNGEKGETGAPGLKGENGLPGENGAPGPMGPRGAPGERGRPGLPGAAGARGNDGARGSDGQPGPPGPPGTAGFPGSPGAKGEVGPAGSPGSNGAPGQRGEPGPQGHAGAQGPPGPPGINGSPGGKGEMGPAGIPGAPGLMGARGPPGPAGANGAPGLRGGAGEPGKNGAKGEPGPRGERGEAGIPGVPGAKGEDGKDGSPGEPGANGLPGAAGERGAPGFRGPAGPNGIPGEKGPAGERGAPGPAGPRGAAGEPGRDGVPGGPGMRGMPGSPGGPGSDGKPGPPGSQGESGRPGPPGPSGPRGQPGVMGFPGPKGNDGAPGKNGERGGPGGPGPQGPPGKNGETGPQGPPGPTGPGGDKGDTGPPGPQGLQGLPGTGGPPGENGKPGEPGPKGDAGAPGAPGGKGDAGAPGERGPPGLAGAPGLRGGAGPPGPEGGKGAAGPPGPPGAAGTPGLQGMPGERGGLGSPGPKGDKGEPGGPGADGVPGKDGPR

SEQ ID NO: 758599 - protein, 112 aa, Homo sapiens
MGCRAASGLLPGVAVVLLLLLQSTQSVYIQYQGFRVQLESMKKLSDLEAQWAPSPRLQAQSLLPAVCHHPALPQDLQPVCASQEASSIFKTLRTIANDDCELCVNVACTGCL

SEQ ID NO: 758600 - protein, 396 aa, Homo sapiens
MSVAFASARPRGKGEVTQQTIQKMLDENHHLIQCILEYQSKGKTAECTQYQQILHRNLVYLATIADSNQNMQSLLPAPPTQNMNLGPGALTQSGSSQGLHSQGSLSDAISTGLPPSSLLQGQIGNGPSHVSMQQTAPNTLPTTSMSISGPGYSHAGPASQGVPMQGQGTIGNYVSRTNINMQSNPVSMMQQQAATSHYSSAQGGSQHYQGQSSIAMMGQGSQGSSMMGQRPMAPYRPSQQGSSQQYLGQEEYYGEQYSHSQGAAEPMGQQYYPDGHGDYAYQQSSYTEQSYDRSFEESTQHYYEGGNSQYSQQQAGYQQGAAQQQTYSQQQYPSQQSYPGQQQGYGSAQGAPSQYPGYQQGQGQQYGSYRAPQTAPSAQQQRPYGYEQGQYGNYQQ

SEQ ID NO: 758601 - protein, 273 aa, Homo sapiens [sequence omitted]

SEQ ID NO: 758602 - protein, 399 aa, Homo sapiens
MQSLSTEARYVPRVPQHRDQISPRSPQHGGQICPRSPLHRGQICPRSPPARRYQQILHRNLVYLATIADSNQNMQSLLPAPPTQNMNLGPGALTQSGSSQGLHSQGSLSDAISTGLPPSSLLQGQIGNGPSHVSMQQTAPNTLPTTSMSISGPGYSHAGPASQGVPMQGQGTIGNYVSRTNINMQSNPVSMMQQQAATSHYSSAQGGSQHYQGQSSIAMMGQGSQGSSMMGQRPMAPYRPSQQGSSQQYLGQEEYYGEQYSHSQGAAEPMGQQYYPDGHGDYAYQQSSYTEQSYDRSFEESTQHYYEGGNSQYSQQQAGYQQGAAQQQTYSQQQYPSQQSYPGQQQGYGSAQGAPSQYPGYQQGQGQQYGSYRAPQTAPSAQQQRPYGYEQGQYGNYQQ

SEQ ID NO: 758603 - protein, 273 aa, Homo sapiens [sequence omitted]

SEQ ID NO: 758604 - protein, 373 aa, Homo sapiens
MLDENHHLIQCILEYQSKGKTAECTQYQQILHRNLVYLATIADSNQNMQSLLPAPPTQNMNLGPGALTQSGSSQGLHSQGSLSDAISTGLPPSSLLQGQIGNGPSHVSMQQTAPNTLPTTSMSISGPGYSHAGPASQGVPMQGQGTIGNYVSRTNINMQSNPVSMMQQQAATSHYSSAQGGSQHYQGQSSIAMMGQGSQGSSMMGQRPMAPYRPSQQGSSQQYLGQEEYYGEQYSHSQGAAEPMGQQYYPDGHGDYAYQQSSYTEQSYDRSFEESTQHYYEGGNSQYSQQQAGYQQGAAQQQTYSQQQYPSQQSYPGQQQGYGSAQGAPSQYPGYQQGQGQQYGSYRAPQTAPSAQQQRPYGYEQGQYGNYQQ

SEQ ID NO: 758605 - protein, 273 aa, Homo sapiens [sequence omitted]

SEQ ID NO: 758606 - protein, 185 aa, Homo sapiens
QWSITKMGNAAMGPAEMDIRPWCLRALQLRCYQQSLSRQQYNAEQYSTSQGRCEPMGQQYYTGGHGDYAYQQSSYTEQSYDRSFEESTQHYYEGGNSQYSQQQAGYQQGAAQQQTYSQQQYPSQQSYPGQQQGYGSAQGAPSQYPGYQQGQGQQYGSYRAPQTAPSAQQQRPYGYEQGQYGNYQQ

SEQ ID NO: 758607 - protein, 361 aa, Homo sapiens
VPRSGLEPNISNGQGWGAHRAGAAGVSGGEDAECQLEGQNTLHHHGLALRCVVGRARCLPCTEDRGCGDSLGAWIYCLLRERPTQTQPCMLPAATEVQLRLQGQKDMVWKWMPLLLLLVCVATMCSAQDRTDLLNVCMDAKHHKTKPGPEDKLHDQCSPWKKNACCTASTSQELHKDTSRLYNFNWDHCGKMEPACKRHFIQDTCLYECSPNLGPWIQQVNQSWRKERFLDVPLCKEDCQRWWEDCHTSHTCKSNWHRGWDWTSGVNKCPAGALCRTFESYFPTPAALCEGLWSHSYKVSNYSRGSGRCIQMWFDSAQGNPNEEVARFYAAAMHVNAGEMLHGTGGLLLSLALMLQLWLLG

SEQ ID NO: 758608 - protein, 342 aa, Homo sapiens
NQFLQTARTVTFIIQKNKNQIIGYDIWYNNNVIEKWKNDPLMAWAKNSGDSLGAWIYCLLRERPTQTQPCMLPAATEVQLRLQGQKDMVWKWMPLLLLLVCVATMCSAQDRTDLLNVCMDAKHHKTKPGPEDKLHDQCSPWKKNACCTASTSQELHKDTSRLYNFNWDHCGKMEPACKRHFIQDTCLYECSPNLGPWIQQVNQSWRKERFLDVPLCKEDCQRWWEDCHTSHTCKSNWHRGWDWTSGVNKCPAGALCRTFESYFPTPAALCEGLWSHSYKVSNYSRGSGRCIQMWFDSAQGNPNEEVARFYAAAMHVNAGEMLHGTGGLLLSLALMLQLWLLG

SEQ ID NO: 758609 - protein, 361 aa, Homo sapiens; identical to SEQ ID NO: 758607

SEQ ID NO: 758610 - protein, 255 aa, Homo sapiens
MVWKWMPLLLLLVCVATMCSAQDRTDLLNVCMDAKHHKTKPGPEDKLHDQCSPWKKNACCTASTSQELHKDTSRLYNFNWDHCGKMEPACKRHFIQDTCLYECSPNLGPWIQQVNQSWRKERFLDVPLCKEDCQRWWEDCHTSHTCKSNWHRGWDWTSGVNKCPAGALCRTFESYFPTPAALCEGLWSHSYKVSNYSRGSGRCIQMWFDSAQGNPNEEVARFYAAAMHVNAGEMLHGTGGLLLSLALMLQLWLLG

SEQ ID NO: 758611 - protein, 255 aa, Homo sapiens; identical to SEQ ID NO: 758610

SEQ ID NO: 758612 - protein, 340 aa, Homo sapiens
VPRSGLEPNISNGQGWGAHRAGAAGVSGGEDAECQLEGQNTLHHHGLALRCVVGRARCLPCTEDRGCGDSLGAWIYCLLRERPTQTQPCMLPAATEVQLRLQGQKDMVWKWMPLLLLLVCVATMCSAQDRTDLLNVCMDAKHHKTKPGPEDKLHDQCSPWKKNACCTASTSQELHKDTSRLYNFNWDHCGKMEPACKRHFIQDTCLYECSPNLGPWIQQVNQSWRKERFLDVPLCKEDCQRWWEDCHTSHTCKSNWHRGWDWTSAALCEGLWSHSYKVSNYSRGSGRCIQMWFDSAQGNPNEEVARFYAAAMHVNAGEMLHGTGGLLLSLALMLQLWLLG

SEQ ID NO: 758613 - protein, 170 aa, Homo sapiens
MEPACKRHFIQDTCLYECSPNLGPWIQQVNQSWRKERFLDVPLCKEDCQRWWEDCHTSHTCKSNWHRGWDWTSGVNKCPAGALCRTFESYFPTPAALCEGLWSHSYKVSNYSRGSGRCIQMWFDSAQGNPNEEVARFYAAAMHVNAGEMLHGTGGLLLSLALMLQLWLLG

SEQ ID NO: 758614 - protein, 832 aa, Homo sapiens
MKPPGSSSRQPPLAGCSLAGASCGPQRGPAGSVPASAPARTPPCRLLLVLLLLPPLAASSRPRAWGAAAPSAPHWNETAEKNLGVLADEDNTLQQNSSSNISYSNAMQKEITLPSRLIYYINQDSESPYHVLDTKARHQQKHNKAVHLAQASFQIEAFGSKFILDLILNNGLLSSDYVEIHYENGKPQYSKGGEHCYYHGSIRGVKDSKVALSTCNGLHGMFEDDTFVYMIEPLELVHDEKSTGRPHIIQKTLAGQYSKQMKNLTMERGDQWPFLSELQWLKRRKRAVNPSRGIFEEMKYLELMIVNDHKTYKKHRSSHAHTNNFAKSVVNLVDSIYKEQLNTRVVLVAVETWTEKDQIDITTNPVQMLHEFSKYRQRIKQHADAVHLISRVTFHYKRSSLSYFGGVCSRTRGVGVNEYGLPMAVAQVLSQSLAQNLGIQWEPSSRKPKCDCTESWGGCIMEETGVSHSRKFSKCSILEYRDFLQRGGGACLFNRPTKLFEPTECGNGYVEAGEECDCGFHVECYGLCCKKCSLSNGAHCSDGPCCNNTSCLFQPRGYECRDAVNECDITEYCTGDSGQCPPNLHKQDGYACNQNQGRCYNGECKTRDNQCQYIWGTKAAGSDKFCYEKLNTEGTEKGNCGKDGDRWIQCSKHDVFCGFLLCTNLTRAPRIGQLQGEIIPTSFYHQGRVIDCSGAHVVLDDDTDVGYVEDGTPCGPSMMCLDRKCLQIQALNMSSCPLDSKGKVCSGHGVCSNEATCICDFTWAGTDCSIRDPVRNLHPPKDEGPKGPSATNLIIGSIAGAILVAAIVLGGTGWGFKNVKKRRFDPTQQGPI

SEQ ID NO: 758615 - protein, 384 aa, Homo sapiens
LSAFCIQLFIAELVGPCRKDGDRWIQCSILEYRDFLQRGGGACLFNRPTKLFEPTECGNGYVEAGEECDCGFHVECYGLCCKKCSLSNGAHCSDGPCCNNTSCLFQPRGYECRDAVNECDITEYCTGDSGQCPPNLHKQDGYACNQNQGRCYNGECKTRDNQCQYIWGTKAAGSDKFCYEKLNTEGTEKGNCGKDGDRWIQCSKHDVFCGFLLCTNLTRAPRIGQLQGEIIPTSFYHQGRVIDCSGAHVVLDDDTDVGYVEDGTPCGPSMMCLDRKCLQIQALNMSSCPLDSKGKVCSGHGVCSNEATCICDFTWAGTDCSIRDPVRNLHPPKDEGPKGPSATNLIIGSIAGAILVAAIVLGGTGWGFKNVKKRRFDPTQQGPI

SEQ ID NO: 758616 - protein, 832 aa, Homo sapiens; identical to SEQ ID NO: 758614

SEQ ID NO: 758617 - protein, 609 aa, Homo sapiens
MKPPGSSSRQPPLAGCSLAGASCGPQRGPAGSVPASAPARTPPCRLLLVLLLLPPLAASSRPRAWGAAAPSAPHWNETAEKNLGVLADEDNTLQQNSSSNISYSNAMQKEITLPSRLIYYINQDSESPYHVLDTKARHQQKHNKAVHLAQASFQIEAFGSKFILDLILNNGLLSSDYVEIHYENGKPQYSKGGEHCYYHGSIRGVKDSKVALSTCNGLHGMFEDDTFVYMIEPLELVHDEKSTGRPHIIQKTLAGQYSKQMKNLTMERGDQWPFLSELQWLKRRKRAVNPSRGIFEEMKYLELMIVNDHKTYKKHRSSHAHTNNFAKSVVNLVDSIYKEQLNTRVVLVAVETWTEKDQIDITTNPVQMLHEFSKYRQRIKQHADAVHLISRVTFHYKRSSLSYFGGVCSRTRGVGVNEYGLPMAVAQVLSQSLAQNLGIQWEPSSRKPKCDCTESWGGCIMEETGVSHSRKFSKCSILEYRDFLQRGGGACLFNRPTKLFEPTECGNGYVEAGEECDCGFHVECYGLCCKKCSLSNGAHCSDGPCCNNTSCLHPLGAPLLTPHLPPSIIPTPHWRPGQGRTPRTLLLLIHFPHCVFSWTEHPLEMGAGI

SEQ ID NO: 758618 - protein, 832 aa, Homo sapiens
MKPPGSSSRQPPLAGCSLAGASCGPQRGPAGSVPASAPARTPPCRLLLVLLLLPPLAASSRPRAWGAAAPSAPHWNETAEKNLGVLADEDNTLQQNSSSNISYSNAMQKEITLPSRLIYYINQDSESPYHVLDTKARHQQKHNKAVHLAQASFQIEAFGSKFILDLILNNGLLSSDYVEIHYENGKPQYSKGGEHCYYHGSIRGVKDSKVALSTCNGLHGMFEDDTFVYMIEPLELVHDEKSTGRPHIIQKTLAGQYSKQMKNLTMERGDQWPFLSELQWLKRRKRAVNPSRGIFEEMKYLELMIVNDHKTYKKHRSSHAHTNNFAKSVVNLVDSIYKEQLNTRVVLVAVETWTEKDQIDITTNPVQMLHEFSKYRQRIKQHADAVHLISRVTFHYKRSSLSYFGGVCSRTRGVGVNEYGLPMAVAQVLSQSLAQNLGIQWEPSSRKPKCDCTESWGGCIMEETGVSHSRKFSKCSILEYRDFLQRGGGACLFNRPTKLFEPTECGNGYVEAGEECDCGFHVECYGLCCKKCSLSNGAHCSDGPCCNNTSCLFQPRGYECRDAVNECDITEYCTGDSGQCPPNLHKQDGYACNQNQGRCYNGECKTRDNQCQYIWGTKAAGSDKFCYEKLNTEGTEKGNCGKDGDRWIQCSKHDVFCGFLLCTNLTRAPRIGQLQGEIIPTSFYHQGRVIDCSGAHVVLDDDTDVGYVEDGTPCGPSMMCLDRKCLQIQALNMSSCPLDSKGKVCSGHGVCSNEATCICDFTWAGTDCSIRDPVRNLHPPKDEGPKEMSRREGSILLSKAPSESAALDGHRLALLDSGYDILAAVLLELLSL

SEQ ID NO: 758619 - protein, 79 aa, Homo sapiens
LELALLSLSSPFCHHHLINIVDFPPLLASSFDSLWKKCQEEKVRSYSARPHLNQLRWMDTALHCWILGMTYSQQCYWNY

SEQ ID NO: 758620 - protein, 605 aa, Homo sapiens
MALRKGGLALALLLLSWVALGPRSLEGADPGTPGEAEGPACPAACVCSYDDDADELSVFCSSRNLTRLPDGVPGGTQALWLDGNNLSSVPPAAFQNLSSLGFLNLQGGQLGSLEPQALLGLENLCHLHLERNQLRSLALGTFAHTPALASLGLSNNRLSRLEDGLFEGLGSLWDLNLGWNSLAVLPDAAFRGLGSLRELVLAGNRLAYLQPALFSGLAELRELDLSRNALRAIKANVFVQLPRLQKLYLDRNLIAAVAPGAFLGLKALRWLDLSHNRVAGLLEDTFPGLLGLRVLRLSHNAIASLRPRTFKDLHFLEELQLGHNRIRQLAERSFEGLGQLEVLTLDHNQLQEVKAGAFLGLTNVAVMNLSGNCLRNLPEQVFRGLGKLHSLHLEGSCLGRIRPHTFTGLSGLRRLFLKDNGLVGIEEQSLWGLAELLELDLTSNQLTHLPHRLFQGLGKLEYLLLSRNRLAELPADALGPLQRAFWLDVSHNRLEALPNSLLAPLGRLRYLSLRNNSLRTFTPQPPGLERLWLEGNPWDCGCPLKALRDFALQNPSAVPRFVQAICEGDDCQPPAYTYNNITCASPPEVVGLDLRDLSEAHFAPC

SEQ ID NO: 758621 - protein, 113 aa, Homo sapiens
MNFYLLLASSILCALIVFWKYRRFQRNTGEMSSNSTALALVRPSSSGLINSNTDNNLAVYDLSRDILNNFPHSIARQKRILVNLSMVENKLVELEHTLLSKGFRGASPHRKST

SEQ ID NO: 758622 - protein, 633 aa, Homo sapiens
MALLLVSLLAFLSLGSGCHHRICHCSNRVFLCQESKVTEIPSDLPRNAIELRFVLTKLRVIQKGAFSGFGDLEKIEISQNDVLEVIEADVFSNLPKLHEIRIEKANNLLYINPEAFQNLPNLQYLLISNTGIKHLPDVHKIHSLQKVLLDIQDNINIHTIERNSFVGLSFESVILWLNKNGIQEIHNCAFNGTQLDELNLSDNNNLEELPNDVFHGASGPVILSELHPICNKSILRQEVDYMTQARGQRSSLAEDNESSYSRGFDMTYTEFDYDLCNEVVDVTCSPKPDAFNPCEDIMGYNILRVLIWFISILAITGNIIVLVILTTSQYKLTVPRFLMCNLAFADLCIGIYLLLIASVDIHTKSQYHNYAIDWQTGAGCDAAGFFTVFASELSVYTLTAITLERWHTITHAMQLDCKVQLRHAASVMVMGWIFAFAAALFPIFGISSYMKVSICLPMDIDSPLSQLYVMSLLVLNVLAFVVICGCYIHIYLTVRNPNIVSSSSDTRIAKRMAMLIFTDFLCMAPISFFAISASLKVPLITVSKAKILLVLFHPINSCANPFLYAIFTKNFRRDFFILLSKCGCYEMQAQIYRTETSSTVHNTHPRNGHCSSAPRVTSGSTYILVPLSHLAQN

SEQ ID NO: 758623 - protein, 695 aa, Homo sapiens
MALLLVSLLAFLSLGSGCHHRICHCSNRVFLCQESKVTEIPSDLPRNAIELRFVLTKLRVIQKGAFSGFGDLEKIEISQNDVLEVIEADVFSNLPKLHEIRIEKANNLLYINPEAFQNLPNLQYLLISNTGIKHLPDVHKIHSLQKVLLDIQDNINIHTIERNSFVGLSFESVILWLNKNGIQEIHNCAFNGTQLDELNLSDNNNLEELPNDVFHGASGPVILDISRTRIHSLPSYGLENLKKLRARSTYNLKKLPTLEKLVALMEASLTYPSHCCAFANWRRQISELHPICNKSILRQEVDYMTQARGQRSSLAEDNESSYSRGFDMTYTEFDYDLCNEVVDVTCSPKPDAFNPCEDIMGYNILRVLIWFISILAITGNIIVLVILTTSQYKLTVPRFLMCNLAFADLCIGIYLLLIASVDIHTKSQYHNYAIDWQTGAGCDAAGFFTVFASELSVYTLTAITLERWHTITHAMQLDCKVQLRHAASVMVMGWIFAFAAALFPIFGISSYMKVSICLPMDIDSPLSQLYVMSLLVLNVLAFVVICGCYIHIYLTVRNPNIVSSSSDTRIAKRMAMLIFTDFLCMAPISFFAISASLKVPLITVSKAKILLVLFHPINSCANPFLYAIFTKNFRRDFFILLSKCGCYEMQAQIYRTETSSTVHNTHPRNGHCSSAPRVTSGSTYILVPLSHLAQN

SEQ ID NO: 758624 - protein, 248 aa, Homo sapiens
WSLSASVSGCPRPPRNLTTMFRPALGSQQVVRNMTSEFFAAQLRSQISDHTTHPISYYKPEFYTPDDGGTAHLSVVAEDGSAVSATSTINLYGILFNNEWTTSALPAFTNEFGAPPSPANFIQPGKQPLLSMCLTIMVGQDGQVRMVVGAAGGTQITTDTALAIIYNLWFGYDVKRAVEEPRLHNKLLPNVTTVERNIDQAVTAALETRHHHTQIASTFIAVVQAIVRTAGGWAAASDSRKGGEPAGY

SEQ ID NO: 758625 - protein, 326 aa, Homo sapiens
LNNYRAELIEHPLNISLGDAVLYMPSARLSGPVLALILNILKGYNFSRESVETPEQKGLTYHRIVEAFRFAYAKRTLLGDPKFVDVTDVRPALGSQQVVRNMTSEFFAAQLRSQISDHTTHPISYYKPEFYTPDDGGTAHLSVVAEDGSAVSATSTINLYFGSKVCSPVSGILFNNEWTTSALPAFTNEFGAPPSPANFIQPGKQPLLSMCLTIMVGQDGQVRMVVGAAGGTQITTDTALAIIYNLWFGYDVKRAVEEPRLHNKLLPNVTTVERNIDQAVTAALETRHHHTQIASTFIAVVQAIVRTAGGWAAASDSRKGGEPAGY

SEQ ID NO: 758626 - protein, 275 aa, Homo sapiens
SCFRLGSSSCGNPGSLRPASPERSEPTRPALPKPRVLRPGVPAPRSPSTRESRASRPGVPEPAPPHPDTPRPRDCPRATASGSWSSWGAITIPRNGPWLHSGTHPGAWGSFWTTRLDISLSTVPPMGHCYSSFPRSPSRGRCGPLLTPVQQPDPDDYLPAERWVRGHPGSPVTRALLEESCCLSCPSRPLSVLATWRTWEEGVCPLSKRRNSWCLSEPAWENPNSSTPGNCGRVWGRLRPPWETPPATGCHLMPTALTKAGSPIAPAALACGSRS

SEQ ID NO: 758627 - protein, 546 aa, Homo sapiens
FLFPPRLLFLRESGIPTSRVPRALGAYAPSATETQSPAPWSPRAPEPEHPGVPSLAPRSARACAAAPGYPASPRAAEAARRRPADSTAFLPSVRAMAAPDLSTNLQEEATCAICLDYFTDPVMTDCGHNFCRECIRRCWGQPEGPYACPECRELSPQRNLRPNRPLAKMAEMARRLHPPSPVPQGVCPAHREPLAAFCGDELRLLCAACERSGEHWAHRVRPLQDAAEDLKAKLEKSLEHLRKQMQDALLFQAQADETCVLWQKMVESQRQNVLGEFERLRRLLAEEEQQLLQRLEEEELEVLPRLREGAAHLGQQSAHLAELIAELEGRCQLPALGLLQDIKDALRRVQDVKLQPPEVVPMELRTVCRVPGLVETLRRFRGDVTLDPDTANPELILSEDRRSVQRGDLRQALPDSPERFDPGPCVLGQERFTSGRHYWEVEVGDRTSWALGVCRENVNRKEKGELSAGNGFWILVFLGSYYNSSERALAPLRDPPRRVGIFLDYEAGHLSFYSATDGSLLFIFPEIPFSGTLRPSSHPCPAARPR

SEQ ID NO: 758628 - protein, 250 aa, Homo sapiens
FLFPPRLLFLRESGIPTSRVPRALGAYAPSATETQSPAPWSPRAPEPEHPGVPSLAPRSARACAAAPGYPASPRAAEAARRRPADSTAFLPSVRAMAAPDLSEDRRSVQRGDLRQALPDSPERFDPGPCVLGQERFTSGRHYWEVEVGDRTSWALGVCRENVNRKEKGELSAGNGFWILVFLGSYYNSSERALAPLRDPPRRVGIFLDYEAGHLSFYSATDGSLLFIFPEIPFSGTLRPSSHPCPAARPR

SEQ ID NO: 758629 - protein, 150 aa, Homo sapiens
MGHCYSSFPRSPSRGRCGPLLTPVQQPDPDDYLPAERWVRGHPGSPVTRALLEESCCLSCPSRPLSVLATWRTWEEGVCPLSKRRNSWCLSEPAWENPNSSTPGNCGRVWGRLRPPWETPPATGCHLMPTALTKAGSPIAPAALACGSRS

SEQ ID NO: 758630 - protein, 403 aa, Homo sapiens
FLFPPRLLFLRESGIPTSRVPRALGAYAPSATETQSPAPWSPRAPEPEHPGVPSLAPRSARACAAAPGYPASPRAAEAARRRPADSTAFLPSVRAMAAPDLSTNLQEEATCAICLDYFTDPVMTDCGHNFCRECIRRCWGQPEGPYACPECRELSPQRNLRPNRPLAKMAEMARRLHPPSPVPQGVCPAHREPLAAFCGDELRLLCAACERSGEHWAHRVRPLQDAAEDLKDIKDALRRYEPSLSWRGGRREWGGTQLLAMADNTWVVPSRVQDVKLQPPEVVPMELRTVCRVPGLVETLRRFRGRCGGPRWGDDSRRGPAKDLGSQPRVLCPATASSKLTVSWWWVVGKTSSAHASDISCVGIFTPNNSSTSGNELGIQGFHSALNRIASADTTGVSTDPTD

SEQ ID NO: 758631 - protein, 236 aa, Homo sapiens
ARGETLACKLAELIAELEGRCQLPALGLLQDIKDALRRVQDVKLQPPEVVPMELRTVCRVPGLVETLRRFRGDVTLDPDTANPELILSEDRRSVQRGDLRQALPDSPERFDPGPCVLGQERFTSGRHYWEVEVGDRTSWALGVCRENVNRKEKGELSAGNGFWILVFLGSYYNSSERALAPLRDPPRRVGIFLDYEAGHLSFYSATDGSLLFIFPEIPFSGTLRPSSHPCPAARPR

SEQ ID NO: 758632 - protein, 467 aa, Homo sapiens
FLFPPRLLFLRESGIPTSRVPRALGAYAPSATETQSPAPWSPRAPEPEHPGVPSLAPRSARACAAAPGYPASPRAAEAARRRPADSTAFLPSVRAMAAPDLSTNLQEEATCAICLDYFTDPVMTDCGHNFCRECIRRCWGQPEGPYACPECRELSPQRNLRPNRPLAKMAEMARRLHPPSPVPQGVCPAHREPLAAFCGDELRLLCAACERSGEHWAHRVRPLQDAAEDLKAKLEKSLEHLRKQMQDALLFQAQADETCVLWQLGCPSRVQDVKLQPPEVVPMELRTVCRVPGLVETLRRFRGDVTLDPDTANPELILSEDRRSVQRGDLRQALPDSPERFDPGPCVLGQERFTSGRHYWEVEVGDRTSWALGVCRENVNRKEKGELSAGNGFWILVFLGSYYNSSERALAPLRDPPRRVGIFLDYEAGHLSFYSATDGSLLFIFPEIPFSGTLRPSSHPCPAARPR

SEQ ID NO: 758633 - protein, 275 aa, Homo sapiens; identical to SEQ ID NO: 758626

SEQ ID NO: 758634 - protein, 480 aa, Homo sapiens
FLFPPRLLFLRESGIPTSRVPRALGAYAPSATETQSPAPWSPRAPEPEHPGVPSLAPRSARACAAAPGYPASPRAAEAARRRPADSTAFLPSVRAMAAPDLSTNLQEEATCAICLDYFTDPVMTDCGHNFCRECIRRCWGQPEGPYACPECRELSPQRNLRPNRPLAKMAEMARRLHPPSPVPQGVCPAHREPLAAFCGDELRLLCAACERSGEHWAHRVRPLQDAAEDLKAKLEKSLEHLRKQMQDALLFQAQADETCVLWQKMVESQRQNVLGEFERLRRLLAEEEQQLLQRLEEEELEVLPRLREGAAHLGQQSAHLAELIAELEGRCQLPALGLLQDIKDALRRVQDVKLQPPEVVPMELRTVCRVPGLVETLRRFRGRCGGPRWGDDSRRGPAKDLGSQPRVLCPATASSKLTVSWWWVVGKTSSAHASDISCVGIFTPNNSSTSGNELGIQGFHSALNRIASADTTGVSTDPTD

SEQ ID NO: 758635 - protein, 129 aa, Homo sapiens
LLDSLKHREWGVNDPLLPNYLNGFECFVCDYELARLDAEKAHAASPGDSPVFEPHIAQPSHMDCPVPTPGFGNVEEIPENDSWKEMWLQDYWQGLDQGEALTAMIHNNETEQTKFWDYLHEIFMKRQHL

SEQ ID NO: 758636 - protein, 108 aa, Homo sapiens
LLDSLKHREWGVNDPLLPNYLNGFECFVCDYELARLDAEKAHAASPGDSPVFEPHIAQPSHMDCPVPTPGFGNVEEIPENDSWKEMWLQDYWQGLDQGEALTAMIHNF

SEQ ID NO: 758637 - protein, 239 aa, Homo sapiens
GEVWRTLRGGGGRGELAMSGLGRLFGKGKKEKGPTPEEAIQKLKETEKILIKKQEFLEQKIQQELQTAKKYGTKNKRAALQALRRKKRFEQQLAQTDGTLSTLEFQREAIENATTNAEVLRTMELAAQSMKKAYQDMDIDKVDELMTDITEQQEVAQQISDAISRPMGFGDDVDEDELLEELEELEQEELAQELLNVGDKEEEPSVKLPSVPSTHLPAGPAPKVDEDEEALKQLAEWVS

SEQ ID NO: 758638 - protein, 227 aa, Homo sapiens
MFSFTKFGPTPLDSSGKKEKGPTPEEAIQKLKETEKILIKKQEFLEQKIQQELQTAKKYGTKNKRAALQALRRKKRFEQQLAQTDGTLSTLEFQREAIENATTNAEVLRTMELAAQSMKKAYQDMDIDKVDELMTDITEQQEVAQQISDAISRPMGFGDDVDEDELLEELEELEQEELAQELLNVGDKEEEPSVKLPSVPSTHLPAGPAPKVDEDEEALKQLAEWVS

SEQ ID NO: 758639 - protein, 221 aa, Homo sapiens
GEVWRTLRGGGGRGELAMSGLGRLFGKGKKEKGPTPEEAIQKLKETEKILIKKQEFLEQKIQQELQTAKKYGTKNKRAALQALRRKFQREAIENATTNAEVLRTMELAAQSMKKAYQDMDIDKVDELMTDITEQQEVAQQISDAISRPMGFGDDVDEDELLEELEELEQEELAQELLNVGDKEEEPSVKLPSVPSTHLPAGPAPKVDEDEEALKQLAEWVS

SEQ ID NO: 758640 - protein, 72 aa, Homo sapiens
MSSARLYTDELLEELEELEQEELAQELLNVGDKEEEPSVKLPSVPSTHLPAGPAPKVDEDEEALKQLAEWVS

SEQ ID NO: 758641 - protein, 239 aa, Homo sapiens; identical to SEQ ID NO: 758637

SEQ ID NO: 758642 - protein, 231 aa, Homo sapiens
GEVWRTLRGGGGRGELAMSGLGRLFGKGKKEKGPTPEEAIQKLKETEKILIKKQEFLEQKIQQELQTAKKYGTKNKRAALQALRRKKRFEQQLAQTDGTLSTLEFQREAIENATTNAEVLRTMELAAQSMKKAYQDMDIDKVDELMTDITEQQEVAQQISDAISRPMGFGDDVDEDELLEELEELEQEELAQELLNVGDKEEEPSVKLPSVPSTHLPAGPGMQGCSVVLRT

SEQ ID NO: 758643 - protein, 87 aa, Homo sapiens
GDSVACGGRALSLKKKYITRYTREARGVLVVGVRRTPRGCIGDYMLGARCSALSVGAAAPEGAYANPPASTLAFGCMEASSRLGEKS

SEQ ID NO: 758644 - protein, 66 aa, Homo sapiens
VWAFSGGLLRNVCNCKASLSSRFTQIRKLWRQTTIAEACPDYFTYITKSCKGSVPIGSPPITPHTT

SEQ ID NO: 758645 - protein, 70 aa, Homo sapiens
AHEAALVDWSLMPAALPYWSCMLVVLQCWCLGSGLTPMAPGGIALVRDLCGGSVPVTSFCLGFQAVHDIL

SEQ ID NO: 758646 - protein, 86 aa, Homo sapiens
FHTARALYNQGLTQLQHERDLRATESCSVPRLWIPPVMGSSLLPSPAQAIVTQAQSPTPAPHQHPESSLPSYQAFEQAFPTPASFG

SEQ ID NO: 758647 - protein, 791 aa, Homo sapiens
ETLFLSSPQQQHSKLAGLWSPGLVPAAPRTENYTIGPLALRPSDLDCVTLPGFQGSNLQTACCGTVSVIAKATMEDLGENTMVLSTLRSLNNFISQRVEGGSGLDISTSAPGSLQMQYQQSMQLEERAEQIRSKSHLIQVEREKMQMELSHKRARVELERAASTSARNYEREVDRNQELLTRIRQLQEREAGAEEKMQEQLERNRQCQQNLDAASKRLREKEDSLAQAGETINALKGRISELQWSVMDQEMRVKRLESEKQELQEQLDLQHKKCQEANQKIQELQASQEARADHEQQIKDLEQKLSLQEQDAAIVKNMKSELVRLPRLERELKQLREESAHLREMRETNGLLQEELEGLQRKLGRQEKMQETLVGLELENERLLAKLQSWERLDQTMGLSIRTPEDLSRFVVELQQRELALKDKNSAVTSSARGLEKARQQLQEELRQVSGQLLEERKKRETHEALARRLQKRVLLLTKERDGMRAILGSYDSELTPAEYSPQLTRRMREAEDMVQKVHSHSAEMEAQLSQALEELGGQKQRADMLEMELKMLKSQSSSAEQSFLFSREEADTLRLKVEELEGERSRLEEEKRMLEAQLERRALQGDYDQSRTKVLHMSLNPTSVARQRLREDHSQLQAECERLRGLLRAMERGGTVPADLEAAAASLPSSKEVAELKKQVESAELKNQRLKEVFQTKIQEFRKACYTLTGYQIDITTENQYRLTSLYAEHPGDCLIFKATSPSGSKMQLLETEFSHTVGELIEVHLRRQDSIPAFLSSLTLELFSRQTVA

SEQ ID NO: 758648 - protein, 284 aa, Homo sapiens
SLSQKVATSVTALLGFGLEYPGGGQHKLVLHPGLRECLVLPEEGRREVDRNQELLTRIRQLQEREAGAEEKMQEQLERNRQCQQNLDAASKRLREKEDSLAQAGETINALKGRISELQWSVMDQEMRVKRLESEKQELQEQLDLQHKKCQEANQKIQELQASQEARADHEQQIKDLEQKLSLQEQDAAIVKNMKSELVRLPRLERELKQLREESAHLREMRETNGLLQEELEGLQRKLGRQEKMQETLVGLELENERLLAKLQSWERLDQTMGLSIRDQVWGSS

SEQ ID NO: 758649 - protein, 758 aa, Homo sapiens
RDKWAPAERREIRAAAASWLRAAEQHSKLAGLWSPGLVPAAPRTENYTIGPLALRPSDLDCVTLPGFQGSNLQTACCGTVSVIAKATMEDLGENTMVLSTLRSLNNFISQRVEGGSGLDISTSAPGSLQMQYQQSMQREVDRNQELLTRIRQLQEREAGAEEKMQEQLERNRQCQQNLDAASKRLREKEDSLAQAGETINALKGRISELQWSVMDQEMRVKRLESEKQELQEQLDLQHKKCQEANQKIQELQASQEARADHEQQIKDLEQKLSLQEQDAAIVKNMKSELVRLPRLERELKQLREESAHLREMRETNGLLQEELEGLQRKLGRQEKMQETLVGLELENERLLAKLQSWERLDQTMGLSIRTPEDLSRFVVELQQRELALKDKNSAVTSSARGLEKARQQLQEELRQVSGQLLEERKKRETHEALARRLQKRVLLLTKERDGMRAILGSYDSELTPAEYSPQLTRRMREAEDMVQKVHSHSAEMEAQLSQALEELGGQKQRADMLEMELKMLKSQSSSAEQSFLFSREEADTLRLKVEELEGERSRLEEEKRMLEAQLERRALQGDYDQSRTKVLHMSLNPTSVARQRLREDHSQLQAECERLRGLLRAMERGGTVPADLEAAAASLPSSKEVAELKKQVESAELKNQRLKEVFQTKIQEFRKACYTLTGYQIDITTENQYRLTSLYAEHPGDCLIFKATSPSGSKMQLLETEFSHTVGELIEVHLRRQDSIPAFLSSLTLELFSRQTVA

SEQ ID NO: 758650 - protein, 308 aa, Homo sapiens
MRAILGSYDSELTPAEYSPQLTRRMREAEDMVQKVHSHSAEMEAQLSQALEELGGQKQRADMLEMELKMLKSQSSSAEQSFLFSREEADTLRLKVEELEGERSRLEEEKRMLEAQLERRALQGDYDQSRTKVLHMSLNPTSVARQRLREDHSQLQAECERLRGLLRAMERGGTVPADLEAAAASLPSSKEVAELKKQVESAELKNQRLKEVFQTKIQEFRKACYTLTGYQIDITTENQYRLTSLYAEHPGDCLIFKATSPSGSKMQLLETEFSHTVGELIEVHLRRQDSIPAFLSSLTLELFSRQTVA

SEQ ID NO: 758651 - protein, 805 aa, Homo sapiens
RDKWAPAERREIRAAAASWLRAAEQHSKLAGLWSPGLVPAAPRTENYTIGPLALRPSDLDCVTLPGFQGSNLQTACCGTVSVIAKATMEDLGENTMVLSTLRSLNNFISQRVEGGSGLDISTSAPGSLQMQYQQSMQLEERAEQIRSKSHLIQVEREKMQMELSHKRARVELERAASTSARNYEREVDRNQELLTRIRQLQEREAGAEEKMQEQLERNRQCQQNLDAASKRLREKEDSLAQAGETINALKGRISELQWSVMDQEMRVKRLESEKQELQEQLDLQHKKCQEANQKIQELQASQEARADHEQQIKDLEQKLSLQEQDAAIVKNMKSELVRLPRLERELKQLREESAHLREMRETNGLLQEELEGLQRKLGRQEKMQETLVGLELENERLLAKLQSWERLDQTMGLSIRTPEDLSRFVVELQQRELALKDKNSAVTSSARGLEKARQQLQEELRQVSGQLLEERKKRETHEALARRLQKRVLLLTKERDGMRAILGSYDSELTPAEYSPQLTRRMREAEDMVQKVHSHSAEMEAQLSQALEELGGQKQRADMLEMELKMLKSQSSSAEQSFLFSREEADTLRLKVEELEGERSRLEEEKRMLEAQLERRALQGDYDQSRTKVLHMSLNPTSVARQRLREDHSQLQAECERLRGLLRAMERGGTVPADLEAAAASLPSSKEVAELKKQVESAELKNQRLKEVFQTKIQEFRKACYTLTGYQIDITTENQYRLTSLYAEHPGDCLIFKATSPSGSKMQLLETEFSHTVGELIEVHLRRQDSIPAFLSSLTLELFSRQTVA

SEQ ID NO: 758652 - protein, 744 aa, Homo sapiens
TGEVQLRVRYSYGGGTAGCERLRKATMEDLGENTMVLSTLRSLNNFISQRVEGGSGLDISTSAPGSLQMQYQQSMQLEERAEQIRSKSHLIQVEREKMQMELSHKRARVELERAASTSARNYEREVDRNQELLTRIRQLQEREAGAEEKMQEQLERNRQCQQNLDAASKRLREKEDSLAQAGETINALKGRISELQWSVMDQEMRVKRLESEKQELQEQLDLQHKKCQEANQKIQELQASQEARADHEQQIKDLEQKLSLQEQDAAIVKNMKSELVRLPRLERELKQLREESAHLREMRETNGLLQEELEGLQRKLGRQEKMQETLVGLELENERLLAKLQSWERLDQTMGLSIRTPEDLSRFVVELQQRELALKDKNSAVTSSARGLEKARQQLQEELRQVSGQLLEERKKRETHEALARRLQKRVLLLTKERDGMRAILGSYDSELTPAEYSPQLTRRMREAEDMVQKVHSHSAEMEAQLSQALEELGGQKQRADMLEMELKMLKSQSSSAEQSFLFSREEADTLRLKVEELEGERSRLEEEKRMLEAQLERRALQGDYDQSRTKVLHMSLNPTSVARQRLREDHSQLQAECERLRGLLRAMERGGTVPADLEAAAASLPSSKEVAELKKQVESAELKNQRLKEVFQTKIQEFRKACYTLTGYQIDITTENQYRLTSLYAEHPGDCLIFKATSPSGSKMQLLETEFSHTVGELIEVHLRRQDSIPAFLSSLTLELFSRQTVA

SEQ ID NO: 758653 - protein, 598 aa, Homo sapiens
RDKWAPAERREIRAAAASWLRAAEQHSKLAGLWSPGLVPAAPRTENYTIGPLALRPSDLDCVTLPGFQGSNLQTACCGTVSVIAKATMEDLGENTMVLSTLRSLNNFISQRVEGGSGLDISTSAPGSLQMQYQQSMQLEERAEQIRSKSHLIQVEREKMQMELSHKRARVELERAASTSARNYEREVDRNQELLTRIRQLQEREAGAEEKMQEQLERNRQCQQNLDAASKRLREKEDSLAQAGETINALKGRISELQWSVMDQEMRVKRLESEKQELQEQLDLQHKKCQEANQKIQELQASQEARADHEQQIKDLEQKLSLQEQDAAIVKNMKSELVRLPRLERELKQLREESAHLREMRETNGLLQEELEGLQRKLGRQEKMQETLVGLELENERLLAKLQSWERLDQTMGLSISGGDVWAEPPVLLAAVTGPPWGPALSQRDPQSKASRELPDSCLALATALAGVQPVPLSSPLVKFRMGVPSSADRLTPPLGFIPGAESSDLPRSEVPCALSYLGRMQRPSLAAVCGPWGSVTQPGAEEQGSEPGQRTFLRPPVCRPGAWCRGPSGEQDPAVAMGLSSGGESEEDVDEVEKRFQV

SEQ ID NO: 758654 - protein, 454 aa, Homo sapiens
GFPRGRSQTISPWLWPPLCLGLATESCVSVAAFSLPVCVVSRKLHSRARVGRVSRSPCQSTPIPACFDLNLVTFRPSVEWGRMNSLSWLMAATGARGLEKARQQLQEELRQVSGQLLEERKKRETHEALARRLQKRVLLLTKERDGMRAILGSYDSELTPAEYSPQLTRRMREAEDMVQKVHSHSAEMEAQLSQALEELGGQKQRADMLEMELKMLKSQSSSAEQSFLFSREEADTLRLKVEELEGERSRLEEEKRMLEAQLERRALQGDYDQSRTKVLHMSLNPTSVARQRLREDHSQLQAECERLRGLLRAMERGGTVPADLEAAAASLPSSKEVAELKKQVESAELKNQRLKEVFQTKIQEFRKACYTLTGYQIDITTENQYRLTSLYAEHPGDCLIFKATSPSGSKMQLLETEFSHTVGELIEVHLRRQDSIPAFLSSLTLELFSRQTVA

SEQ ID NO: 758655 - protein, 118 aa, Homo sapiens
MAEQEPTAEQLAQIAAENEEDEHSVNYKPPAQKSIQEIQELDKDDESLRKYKEALLGRCGRFRRPQRPQRRGDWPDPGVQLGPGPPGAGPDGRPGELQEAVVCAEGGCGVPDKNLFPG

SEQ ID NO: 758656 - protein, 118 aa, Homo sapiens; identical to SEQ ID NO: 758655

SEQ ID NO: 758657 - protein, 171 aa, Homo sapiens
SQAGPAQVLWICVCMSMWPPRPFPGGEPSDPGTRGVCCCCSPAHQCLASLPPSLDRAVEMAPAAWGKPNCQNSSHLSTIQEAGYCPASAFSVSAGSAQSPHPPKSPRWTASPTPPGPSQEPRLAISIYCLRPCRPWATGLAPVPPGSQCHHPRQAFPDPARNKQGTKCTHC

SEQ ID NO: 758658 - protein, 158 aa, Homo sapiens
MSTRSTTSPRPRRASRRSRSWTRTTRACESTRRPCWAAVAVSADPNVPNVVVTGLTLVCSSAPGPLELDLTGDLESFKKQSFVLKEGVEYRIKISFRVNREIVSGMKYIQHTYRKGVKIDKTDYMVGSYSIKSRFTDDDKTDHLSWEWNLTIKKDWKD

SEQ ID NO: 758659 - protein, 139 aa, Homo sapiens
MSTRSTTSPRPRRASRRSRSWTRTTRACESTRRPCWAAVAVSADPNVPNVVVTGLTLVCSSAPGPLELDLTGDLESFKKQSFVLKEGVEYRIKISFRVNREIVSGMKYIQHTYRKGVKIDKTDYMVGRAMGPGPRSTSS

SEQ ID NO: 758660 - protein, 149 aa, Homo sapiens
MAEQEPTAEQLAQIAAENEEDEHSVNYKPPAQKSIQEIQELDKDDESLRKYKEALLGRCGRFRRPQRPQRRGDWPDPGVQLGPGPPGAGPDGVSALRPRGSGRPLVGISGSAARGPRRAGASRRAAGQSLRGRSPQQATWRASRSSRLC

SEQ ID NO: 758661 - protein, 118 aa, Homo sapiens; identical to SEQ ID NO: 758655

SEQ ID NO: 758662 - protein, 118 aa, Homo sapiens; identical to SEQ ID NO: 758655

SEQ ID NO: 758663 - protein, 208 aa, Homo sapiens
MLARGSLQHQVPLHRRRQDRPPVLGVESHHQEGLEGLSPARGGQGRLTDGRRTGGCCPPPQPLPSPYQSADRPSVPLPPWSASLAWLNRVPPTPLLSPPPPTGPASSVSCLVAASACAVGERGRSQASAALSVPPRFYLPVTPEAWLQEGAEQPFSRPRGCPWTCASAAPGWSWGVGCTASWGPGRPPAPLLPGQPPCRCRSRLTMMP

SEQ ID NO: 758664 - protein, 158 aa, Homo sapiens; identical to SEQ ID NO: 758658

SEQ ID NO: 758665 - protein, 118 aa, Homo sapiens; identical to SEQ ID NO: 758655

SEQ ID NO: 758666 - protein, 118 aa, Homo sapiens; identical to SEQ ID NO: 758655

SEQ ID NO: 758667 - protein, 118 aa, Homo sapiens; identical to SEQ ID NO: 758655

SEQ ID NO: 758668 - protein, 118 aa, Homo sapiens; identical to SEQ ID NO: 758655

SEQ ID NO: 758669 - protein, 118 aa, Homo sapiens; identical to SEQ ID NO: 758655

SEQ ID NO: 758670 - protein, 205 aa, Homo sapiens
MAEQEPTAEQLAQIAAENEEDEHSVNYKPPAQKSIQEIQELDKDDESLRKYKEALLGRCGRFRRPQRPQRRGDWPDPGVQLGPGPPGAGPDGVSALRPRGSGRPLVGISGKCSQGAAQGWGFAQGCWAVIEGEVPPTGDLESFKKQSFVLKEGVEYRIKISFRVNREIVSGMKYIQHTYRKGVKIDKTDYMVGRAMGPGPRSTSS

SEQ ID NO: 758671 - protein, 209 aa, Homo sapiens
MSTRSTTSPRPRRASRRSRSWTRTTRACESTRRPCWAAVAVSADPNVPNVVVTGLTLVCSSAPGPLELDLTGDLESFKKQSFVLKEGVEYRIKISFRVNREIVSGMKYIQHTYRKGVKKLWAPGRGVRVPDPRGGGTQGYAGPGQPTASSPASQTTTRPTTCPGSGISPSRRTGRTEPSQRRAGQTDGRTTDRRMLSPPPAPPLPIPKC

SEQ ID NO: 758672 - protein, 208 aa, Homo sapiens; identical to SEQ ID NO: 758663

SEQ ID NO: 758673 - protein, 118 aa, Homo sapiens; identical to SEQ ID NO: 758655

SEQ ID NO: 758674 - protein, 118 aa, Homo sapiens; identical to SEQ ID NO: 758655

SEQ ID NO: 758675 - protein, 118 aa, Homo sapiens; identical to SEQ ID NO: 758655

SEQ ID NO: 758676 - protein, 118 aa, Homo sapiens; identical to SEQ ID NO: 758655

SEQ ID NO: 758677 - protein, 118 aa, Homo sapiens; identical to SEQ ID NO: 758655

SEQ ID NO: 758678 - protein, 118 aa, Homo sapiens; identical to SEQ ID NO: 758655

SEQ ID NO: 758679 - protein, 118 aa, Homo sapiens; identical to SEQ ID NO: 758655

SEQ ID NO: 758680 - protein, 134 aa, Homo sapiens
MLARGSLQHQVPLHRRRQDRPPVLGVESHHQEGLEGLSPARGGQGRLTDGRRTGGCCPPPPPPPPPPPPPPPPPPPPPPPPPTTRPAPRVPAACARQPAPPPPRRAPSSSPASPLPAVLRPPAPPLAPSPSSRR

SEQ ID NO: 758681 - protein, 118 aa, Homo sapiens; identical to SEQ ID NO: 758655

SEQ ID NO: 758682 - protein, 118 aa, Homo sapiens; identical to SEQ ID NO: 758655

SEQ ID NO: 758683 - protein, 118 aa, Homo sapiens; identical to SEQ ID NO: 758655

SEQ ID NO: 758684 - protein, 118 aa, Homo sapiens; identical to SEQ ID NO: 758655

SEQ ID NO: 758685 - protein, 158 aa, Homo sapiens; identical to SEQ ID NO: 758658

SEQ ID NO: 758686 - protein, 189 aa, Homo sapiens
MSTRSTTSPRPRRASRRSRSWTRTTRACESTRRPCWAAVAVSADPNVPNVVVTGLTLVCSSAPGPLELDLTGDLESFKKQSFVLKEGVEYRIKISFRVNREIVSGMKYIQHTYRKGVKIDKTDYMVGRAMGPGPRSTSSGRPSLTQPGTNKGPSAHIAESRLLCLPRPIPGLRVVSARLRQRRLSLLLF

SEQ ID NO: 758687 - protein, 164 aa, Homo sapiens
MSTRSTTSPRPRRASRRSRSWTRTTRACESTRRPCWAAVAVSADPNVPNVVVTGLTLVCSSAPGPLELDLTGDLESFKKQSFVLKEGVEYRIKISFRVNREIVSGMKYIQHTYRKGVKIDKTDYMVGRAMGPGPRSTSSLPRPIPGLRVVSARLRQRRLSLLLF

SEQ ID NO: 758688 - protein, 134 aa, Homo sapiens
MSTRSTTSPRPRRASRRSRSWTRTTRACESTRRPCWAAVAVSADPNVPNVVVTGLTLVCSSAPGPLELDLTGDLESFKKQSFVLKEGVEYRIKISFRVNREIVSGMKYIQHTYRKGVKKDYYTGSSHGHRNGGR

SEQ ID NO: 758689 - protein, 149 aa, Homo sapiens; identical to SEQ ID NO: 758660

SEQ ID NO: 758690 - protein, 118 aa, Homo sapiens; identical to SEQ ID NO: 758655

SEQ ID NO: 758691 - protein, 122 aa, Homo sapiens
MAEQEPTAEQLAQIAAENEEDEHSVNYKPPAQKSIQEIQELDKDDESLRKYKEALLGRCGRFRRPQRPQRRGDWPDPGVQLGPGPPGAGPDGRPGELQEAVVCAEGGCGVPDKNLFPAVGPH

SEQ ID NO: 758692 - protein, 118 aa, Homo sapiens; identical to SEQ ID NO: 758655

SEQ ID NO: 758693 - protein, 118 aa, Homo sapiens; identical to SEQ ID NO: 758655

SEQ ID NO: 758694 - protein, 118 aa, Homo sapiens; identical to SEQ ID NO: 758655

SEQ ID NO: 758695 - protein, 118 aa, Homo sapiens; identical to SEQ ID NO: 758655

SEQ ID NO: 758696 - protein, 118 aa, Homo sapiens; identical to SEQ ID NO: 758655

SEQ ID NO: 758697 - protein, 202 aa, Homo sapiens
MSTRSTTSPRPRRASRRSRSWTRTTRACESTRRPCWAAVAVSADPNVPNVVVTGLTLVCSSAPGPLELDLTGDLESFKKQSFVLKEGVEYRIKISFRVNREIVSGMKYIQHTYRKGVKIDKTDYMVGRAMGPGPRSTSSWRLFPQALSATTPGRPSLTQPGTNKGPSAHIAESRLLCLPRPIPGLRVVSARLRQRRLSLLLF

SEQ ID NO: 758698 - protein, 202 aa, Homo sapiens; identical to SEQ ID NO: 758697

SEQ ID NO: 758699 - protein, 173 aa, Homo sapiens
MSTRSTTSPRPRRASRRSRSWTRTTRACESTRRPCWAAVAVSADPNVPNVVVTGLTLVCSSAPGPLELDLTGDLESFKKQSFVLKEGVEYRIKISFRVNREIVSGMKYIQWRLFPQALSATTPGRPSLTQPGTNKGPSAHIAESRLLCLPRPIPGLRVVSARLRQRRLSLLLF

SEQ ID NO: 758700 - protein, 155 aa, Homo sapiens [sequence omitted]

SEQ ID NO: 758701 - protein, 243 aa, Homo sapiens
MGSGYLASFNLSHSVSEALTWSGPPTLEPPEPQRRRGGGSPSAEARRPGPSRSRHRVWALELLPAPRTAGGWQWDRSGGFSRAVPRLAPCEGSERPLSRAVPRDIQKTRNLRNKVAASDRGPGGRGASDVPQDGLLLHGPFARKPKRIRTAFSPSQLLRLERAFEKNHYVVGAERKQLAGSLSLSETQVKVWFQNRRTKYKRQKLEEEGPESEQKKKGSHHINRWRIATKQANGEDIDVTSND

SEQ ID NO: 758702 - protein, 269 aa, Homo sapiens
MCLAGCTPRKAAAPGRGALPRARLPRTAPAAATMFQPAAKRGFTIESLVAKDGGTGGGTGGGGAGSHLLAAAASEEPLRPTALNYPHPSAAEAAFVSGFPAAAAAGAGRSLYGGPELVFPEAMNHPALTVHPAHQLGASPLQPPHSFFGAQHRDPLHFYPWVLRNRFFGHRFQASDVPQDGLLLHGPFARKPKRIRTAFSPSQLLRLERAFEKNHYVVGAERKQLAGSLSLSETQVRRVGVGLSDPQPSCCPGGGFQSLRAGRLPELRE

SEQ ID NO: 758703 - protein, 203 aa, Homo sapiens
MCLAGCTPRKAAAPGRGALPRARLPRTAPAAATMFQPAAKRGFTIESLVAKDGGTGGGTGGGGAGSHLLAAAASEEPLRPTALNYPHPSAAEAAFVSGFPAAAAAGAGRSLYGGPELVFPEAMNHPALTVHPAHQLGASPLQPPHSFFGAQHRDPLHFYPWVLRNRFFGHRFQGECPRCARRGGRPAPVLRRCGGGSGARGAV

SEQ ID NO: 758704 - protein, 120 aa, Homo sapiens
MQAASDVPQDGLLLHGPFARKPKRIRTAFSPSQLLRLERAFEKNHYVVGAERKQLAGSLSLSETQVKVWFQNRRTKYKRQKLEEEGPESEQKKKGSHHINRWRIATKQANGEDIDVTSND

SEQ ID NO: 758705 - protein, 71 aa, Homo sapiens
  misc_feature (9)..(9): Xaa can be any naturally occurring amino acid
RKSHEGRVXLLLARPLVKVWFQNRRTKYKRQKLEEEGPESEQKKKGSHHINRWRIATKQANGEDIDVTSND

SEQ ID NO: 758706 - protein, 290 aa, Homo sapiens
MCLAGCTPRKAAAPGRGALPRARLPRTAPAAATMFQPAAKRGFTIESLVAKDGGTGGGTGGGGAGSHLLAAAASEEPLRPTALNYPHPSAAEAAFVSGFPAAAAAGAGRSLYGGPELVFPEAMNHPALTVHPAHQLGASPLQPPHSFFGAQHRDPLHFYPWVLRNRFFGHRFQASDVPQDGLLLHGPFARKPKRIRTAFSPSQLLRLERAFEKNHYVVGAERKQLAGSLSLSETQVKVWFQNRRTKYKRQKLEEEGPESEQKKKGSHHINRWRIATKQANGEDIDVTSND

SEQ ID NO: 758707 - protein, 422 aa, Homo sapiens
PPALCAARGPGPPAPRLGSGAAADPPGLRAPRPPGRPRLLPSSASASSCRRAGGLQPPSALACQLPRRASVLRPPGPASQPASRAGGGHQAVPMPEPGPRMNGFSLGELCWLFCCPPCPSRIAAKLAFLPPEPTYTVLAPEQRGAGASAPAPAQATAAAAAAQPAPQQPEEGAGAGPGACSLHLSERADWQYSQRELDAVEVFFSRTARDNRLGCMFVRCAPSSRYTLLFSHGNAVDLGQMCSFYIGLGSRINCNIFSYDYSGYGVSSGKPSEKNLYADIDAAWQALRTRYGVSPENIILYGQSIGTVPTVDLASRYECAAVILHSPLMSGLRVAFPDTRKTYCFDAFPSIDKISKVTSPVLVIHGTEDEVIDFSHGLAMYERCPRAVEPLWVEGAGHNDIELYAQYLERLKQFISHELPNS

SEQ ID NO: 758708 - protein, 93 aa, Homo sapiens
LIFLTRSFSGASLRTHARPLDIDKISKVTSPVLVIHGTEDEVIDFSHGLAMYERCPRAVEPLWVEGAGHNDIELYAQYLERLKQFISHELPNS

SEQ ID NO: 758709 - protein, 422 aa, Homo sapiens; identical to SEQ ID NO: 758707

SEQ ID NO: 758710 - protein, 422 aa, Homo sapiens; identical to SEQ ID NO: 758707

SEQ ID NO: 758711 - protein, 422 aa, Homo sapiens; identical to SEQ ID NO: 758707

SEQ ID NO: 758712 - protein, 301 aa, Homo sapiens
SRVNVNDRAGVIVRTWLAVVLHLRYVVQTLEDDFQQTLRRQRQHLQQSIANMVLSCDKQPHNVRDVIKWLVKAVTEDGLTQPPNGNQTSSGTGILKASSSHPSSQPNLTKNTNQLIVCQLQRMLSIAVEVDRTPTCSSNKIAEMMFGFVLDIPERSQREMFFTTMESHLLRCKVLEIIFLHSCETPTRLPLSLAQALYFLNNSTSLLKCQSDKSQWQTWDELVEHLQFLLSSYQHVLREHLRSSVIDRKGLNNPKDKAQTPGEEDDHQQWLNVKKQNEGFRSADPDAGGGSWSPNPRQSAL

SEQ ID NO: 758713 - protein, 309 aa, Homo sapiens
MPRSFEQVIILKKWFLKPYKGQTLPGRVLFLRYVVQTLEDDFQQTLRRQRQHLQQSIANMVLSCDKQPHNVRDVIKWLVKAVTEDGLTQPPNGNQTSSGTGILKASSSHPSSQPNLTKNTNQLIVCQLQRMLSIAVEVDRTPTCSSNKIAEMMFGFVLDIPERSQREMFFTTMESHLLRCKVLEIIFLHSCETPTRLPLSLAQALYFLNNSTSLLKCQSDKSQWQTWDELVEHLQFLLSSYQHVLREHLRSSVIDRKGLNNPKDKAQTPGEEDDHQQWLNVKKQNEGFRSADPDAGGGSWSPNPRQSAL

SEQ ID NO: 758714 - protein, 434 aa, Homo sapiens
MEDFIVISDDSGSESSGGALPGPVAEAAPGPVREPPALLPRRTVNKGQKLEPIPHRRLRMVTNTIEENFPLGTVQFLMDFVSPQHYPPREIVAHIIQKILLSGSETVDVLKEAYMLLMKIQQLHPANAKTVEWDWKLLTYVMEEEGQTLPGRVLFLRYVVQTLEDDFQQTLRRQRQHLQQSIANMVLSCDKQPHNVRDVIKWLVKAVTEDGLTQPPNGNQTSSGTGILKASSSHPSSQPNLTKNTNQLIVCQLQRMLSIAVEVDRTPTCSSNKIAEMMFGFVLDIPERSQREMFFTTMESHLLRCKVLEIIFLHSCETPTRLPLSLAQALYFLNNSTSLLKCQSDKSQWQTWDELVEHLQFLLSSYQHVLREHLRSSVIDRKGLNNPKDKAQNPGEEDDHQQWLDVEKQNEGFRSADPDAGGGSWSPNPRQSAL

SEQ ID NO: 758715 - protein, 174 aa, Homo sapiens
MGAGALAICQSKAAVRLKEDMKKIVAVPLNEQKDFTYQKLFGVSLQELERQGLTENGIPAVVWNIVEYLTQHGLTQEGLFRVNGNVKVVEQLRLKFESGVPVELGKDGDVCSAASLLKLFLRELPDSLITSALQPRFIQLFQDGRNDVQESSLRDLIKELAETTTASSSTFASS

SEQ ID NO: 758716 - protein, 110 aa, Homo sapiens
LSSSFFKGPALKTRRTQSPKLGHEALALTPRDAVSLPEAAHQSRQRTQVPWGHDVGLRGRPGAGRLPVSWVRCCSALQLWSHAVPAEARSRNAAFGDFNFTFLLLSITKS

SEQ ID NO: 758717 - protein, 116 aa, Homo sapiens
MGVGIWGARRAQRDGDRPVVRPKCRLGTGSGANHRAPTPARVWAARGRQEWPGACVRLACGLTLWVAPALAMAFPFAPIPGSSEARFGRGPSLGTETVPERTLEPAESLHSASIQV

SEQ ID NO: 758718 - protein, 121 aa, Homo sapiens
MAAAYLDPNLNHTPNSSTKTHLGTGMERSPGAMERVLKVFHYFESNSEPTTWASIIRHGDATDVRGIIQKIVDSHKVKHVACYGFRLSHLRSEEVHWLHVDMGVSSVREKYELAHPPEECK

SEQ ID NO: 758719 - protein, 154 aa, Homo sapiens
LSLACGSKQILSQRGTGTLCADSWLDLYRIGCMLLELAGQEALKPAGAIYMEKSGCSPFPVCWAKEYDRYLASSKIMAAAYLDPNLNHTPNSSTKTHLGTGMERSPGAMERVLKVFHYFESNSEPTTWASIIRHGDATDVRVSTFFHETSLMFI

SEQ ID NO: 758720 - protein, 1052 aa, Homo sapiens
MAAAYLDPNLNHTPNSSTKTHLGTGMERSPGAMERVLKVFHYFESNSEPTTWASIIRHGDATDVRGIIQKIVDSHKVKHVACYGFRLSHLRSEEVHWLHVDMGVSSVREKYELAHPPEEWKYELRIRYLPKGFLNQFTEDKPTLNFFYQQVKSDYMLEIADQVDQEIALKLGCLEIRRSYWEMRGNALEKKSNYEVLEKDVGLKRFFPKSLLDSVKAKTLRKLIQQTFRQFANLNREESILKFFEILSPVYRFDKECFKCALGSSWIISVELAIGPEEGISYLTDKGCNPTHLADFTQVQTIQYSNSEDKDRKGMLQLKIAGAPEPLTVTAPSLTIAENMADLIDGYCRLVNGTSQSFIIRPQKEGERALPSIPKLANSEKQGMRTHAVSVSETDDYAEIIDEEDTYTMPSTRDYEIQRERIELGRCIGEGQFGDVHQGIYMSPENPALAVAIKTCKNCTSDSVREKFLQEALTMRQFDHPHIVKLIGVITENPVWIIMELCTLGELRSFLQVRKYSLDLASLILYAYQLSTALAYLESKRFVHRDIAARNVLVSSNDCVKLGDFGLSRYMEDSTYYKASKGKLPIKWMAPESINFRRFTSASDVWMFGVCMWEILMHGVKPFQGVKNNDVIGRIENGERLPMPPNCPPTLYSLMTKCWAYDPSRRPRFTELKAQLSTILEEEKAQQEERMRMESRRQATVSWDSGGSDEAPPKPSRPGYPSPRSSEGFYPSPQHMVQTNHYQVSGYPGSHGITAMAGSIYPGQASLLDQTDSWNHRPQEIAMWQPNVEDSTVLDLRGIGQVLPTHLMEERLIRQQQEMEEDQRWLEKEERFLKPDVRLSRGSIDREDGSLQGPIGNQHIYQPVGKPDPAAPPKKPPRPGAPGHLGSLASLSSPADSYNEGVKLQPQEISPPPTANLDRSNDKVYENVTGLVKAVIEMSSKIQPAPPEEYVPMVKEVGLALRTLLATVDETIPLLPASTHREIEMAQKLLNSDLGELINKMKLAQQYVMTSLQQEYKKQMLTAAHALAVDAKNLLDVIDQARLKMLGQTRPH
